United States Patent Application Publication US 2017/0114356 A1 - sequence listing, part 70

SEQ ID NO: 100727 - DNA, 2826 bp, Zea Mays
atggccaccatcgccctgccctccccacccctcccccaccgaactattcctcccgtcgcaccctccgtatcgcctcccaactccgcctcggcctccctgaagcggctctgcaaggaaggcgacctgcgtcaagctttgcgtcagctcacgacccgggcgccgcctgcccgggagcactacggctgggtgctggacctcgtcgctgccaggagggcggccgcggagggcaggcaggtccatgcgcatgccgtgaccaccggctcgctgaacgaagacgacgatggcttccttgcaaccaagcttgtgttcatgtacggccggtgcgggcgagtggacgacgcgcgccgcctgttcaacggaatgcccgcgcggaccgtcttctcctggaacgcgctcgtcggggcgtacctctcgtccgggagtgccggcgaggccatgcgggtctacggtgccatgcgggcgtcagcggccccggggtcggcgcccgacgggtgcacgctcgcgtccgtcctcaaggcttgcggcgcggaaggggacgggcgctgcgggggcgaggtgcacgggctggcggtgaaggtcggacttgataagagcaccctcgtggccaatgcgcttatcgggatgtacgccaagtgcggcctgttggattcagcgctgagggtgttcgagtggctgcagcaggacgcaagggacgtcgcgtcctggaactcggttgtatcaggatgcgtgcagaacgggaggaccttggaagctctggcgctgttccgagggatgcagagtgccgggttccctatgaattcttacacgtccgtcgcggtgctccaagtttgtgcggagctaggtctgctgagtttgggaagggagttacatgcagcgctcctcaaatgcggcagtgagttgaacatccagtgcaacgctttgcttgtcatgtacgccaaatatggcagggtggatagtgctctccgagtattcggtcagattgctgagaaagactacatatcgtggaattcgatgctgtcctgctacgtccaaaacagtttctatgcggaggccattgatttttttggtgaaatgcttcaacacggttttcagcctgatcatgcctgtgttgtgagcttgtcctctgcattggggcatttgagtaggctaaacaatggccgagagtttcatgcgtatgctataaagcagaggcttcataccgatttacaggttgggaatacattgatggacatgtacataaagtgtggctccatagagtgttcagcaaaggtatttgaaagcatgggcattagagatcacatatcatggacaacaatcctcgcttgttttgctcagagttcacgacattctgaagcactggaaatgatactagagttgcagaaagaagggattatggtggattctatgatgattggaagtattttagaaacatgctgcggtttgaaaagcatctcgctgctaaaacaagtgcattgttacgccattagaaatgggttgcttgatttgatactggagaatagactgatagatatatatggggagtgtggagagtttgaccattcactaaatttatttcagagagtagagaaaaaggacattgttagttggactagtatgataaactgttgcacaaataacggacggttaaatggagctgttttcttatttactgagatgcaaaaggcaaatattcaacctgattctgtggcactagtcagtattctggtggctattgctggtttgtcatcgctgacaaaaggaaaacaggttcacggcttccttatcagaaggaattttcctatagaaggtcctgttgttagttcccttgtggacatgtattcaggttgcggaagcatgaactatgctatcagagtattcgaacgggctaaatgtaaagatgtggttctttggacagcaatgattaatgctactgggatgcatggacatggcaagcaagccattgatcttttcaagagaatgctgcagactggtctgactcctgatcatgtgtcttttcttgctctgttgtatgcttgtagtcattcgaagctcgtcgaggagggtaaacactatctggatataatggtgagcaagtacaggttaaaaccatggcaggagcactatgcctgtgtggttgatatccttggacgctcaggccagacggaggaggcttacgagttcatcaagactatgcctatggacccaaaatcagctgtgtggtgtgcgctgctcggcgcatgccgtgtccacaggaactatggcctcgccgtggttgcagccaataagcttctcgagctggaacctgacaacccaggcaactacattcttgtatcaaatgtttttgctgagatgggcaagtggaacaatgccaaggaaactagaaccaggatggcagaacgggggttgagaaaaaatccagcttgcagttggattgagatagggaacaacatccacactttcacctcaggagattactgccatcgagactcggaggcaatccatctcaagctttccgagataacggaaatgctgcgcagagaaggtgggtacgtggaggacacaagatttgtccttcacgatacgagcgaagaggagaagatagatatgctacataagcacagcgagaggatcgcaatagcatttggcttgatcagcactcgcccaggcatgcctataaggatagccaagaacctcagggtgtgcggggactgccacgagttcaccaagctggtttccaagctgtttgaacgggatattgtggtccgagatgccaacaggttccatcatttcagtggaggctcttgttcttgtgaagacttctggtga

SEQ ID NO: 100728 - DNA, 1271 bp, Zea Mays
tcggaaacaaactgtgtaaagcccataattcattatcacatcgaacacggttgccgcagcggcccagctcacctgagaagacagtacgcacacgccgcatcgtctgcatctccggtggccatccatcctcctcccttctctcgtcgttccctccactcctaggcggaagcggccggcgcagagtggagatcgacccggactttgaaattgcctcttccttttgatgggtaccatgaagaggttggtttcgaccgccctcgccgcgagagggctcctgagatctcacggactgccgaccacaacttctgttatgtaccaaccagcattccagcaatttatgaactattcatcaccacatggtggtgatcccaatgcaaacacgaactcaactacaacacgaatagctgctgatcctgatacacatcaagatttcgagccaaagagcagaatttcagacatgactttgcatgacgctattgctcaggatatcaaggagaacccagtcttgatctacatgaagggttttcctgagtctccaatgtgtggcttcagtgcactggctgttaaggtcttccagcaatatggcgtccctgtctgtggtagagacattcttggggatcttaagctcaaagagtgtgttaaagcccacactaactggcctacatttccacaaatatttatcaaaggagagtttgttggggggtctgacatcatattaagcttgcaccagaagggtgagcttaaggatcttcttggggatattgcacaaagagacgaacaaaaagtgcatgctcacgattcatgaagcaatcaacagtaggttcttttactatgcgctatctactctgccactaaaatgttctatctcggagtctttaggcgacagcgtacgtgacattgtgaactgtccctacgcattggacatggatgaccggatgtgttcccagaatcaggttgtaggcatctggtattctggaagaggcaaaataatgatctgatacccatatgccgggttctctgtcaatgaataagcgacacttttagcaatagcaatgctgttctttggtgccttgtagtactatggaacttaaattccaggattcgtaggttatgacgttatgttgcattccttttttttaatttaatcgaactgaacttatgataacagataaggctgtaaaatggttatacgcgctgctgcctgctggtgttcaaacgggtggtgtccaacctccgccgccatcagatcaacccgctcccttttaactttt

SEQ ID NO: 100729 - DNA, 720 bp, Zea Mays
gattagtcactccacgcctaccagtttgtcgtgaatttgtcgttgtttcgagggcgacaataattccagtttattttccacgaaatctggagggttcaactaaacccctttccccacccaaagctcgtcgtcagttacacgctatccatttcgttctactattgttttgcgagagttcgctgatgctgcgatgggaatttggttgttgctgatttctccaattcgtttggcagatcccattcttaatctcattgtttgttgttgaatgcgccgttcacagggtaccatgaagaggttggtttcgaccgccctcgccgcgagagggctcctgagatctcacggactgccgaccacaacttctgtaaggttcacaaatccactccacgatggtcgccaatctccatacgtctttcttagcttcgagtgctaatgcagcgagattgttcgacacagccatgatgatagtagttttcctttttatctttttccaaaacactagactacacgcgcatctagtgtctgcaatttatgtccagacgagtatgcgaccttgtgccatgcgttgtttaatggcaaacgttacgcttcaaatgttgagaaatttacatgtgtagttttcaggcttccagtgaattggttttattctgggattgtgtaattggatactgacatactgtagtatatgtatagtttccggacttccagtgttcctgtttcata

SEQ ID NO: 100730 - DNA, 1191 bp, Zea Mays
atgcctatagtcctatacttacagctgaccaggcgatcaatcacgcacgccgctggtcagcagtcagcagcaagccgcctcgtcgcctcgtcgggagtcgggagtctggtgagcgagctggtgatcaggaccctggccgcgtcggctgtgatgggtcgaagcgccttggcggttcggttggcttcccttcttgcgtttggtttggtgctcgtctccgtcgaggccagcctcggggatgttgatccgcgctacagaacttgcgtgagggagtgtcaagctacagggattgttggggagaatgtcatcagccattgtcagtccaaagagaactacacttctgttggagtctcttggtataaccaggagcaaatttacatccagtggaaggaactgaactgtaggacagactgtcgctatttttgcatgatgcagagagaaggggaacgacagtcacttggtctgagccctgttaaatatcatggaaagtggccattcttacgtgtttctgtgttccaggaacccctttcaactgcactatctgctgtcaacctactgatgcacttcactggctggctttcatttttccttctagtgaattacaaattgcctcttagaccccagaccaagagaacttattatgaatacactagcctgtggcatatctatgcaatcttatcaatgaacgcatggttttggagctcaattttccatactcgagacattgagttgactgagaaactggactattcttcagctgtggccttgcttggctactcgttgatcctttcattgctaagggctttcaatgtcaaggatgaggctagcagggtgatgtttgcagcccctattttggcattcgttacaacgcacatcttgtatcttaacttctacgagcttgactatggatggaacatgaaagtctgcgtggtgatggctgcggttcaacttctgacgtgggctgtttgggctggtgtaagccggcatccatcacggctgaaactctggacggttgtttttggaggagcactggtcatgcttcttgagctctacgacttccctccatacatggggtttgccgatgcccattcactgtggcatgcaagcaccattccactcacctatctctggtggagcttcatcaaggacgatgccaaattccgcacgtcaacactcagcaagaaggcaaagtag

SEQ ID NO: 100731 - DNA, 512 bp, Zea Mays
ttcccgacaccgtcgccataccgacgaaaggacatggcgacagacacttgcctagataagaacccccctgccgaacagtcagtcagacacccacccagagaggcagccatgtgcgagctcaagttcaccaaggagcgggtggggtgctacctgctggtggtcctggtcatcgtcctcctcgtcggcgtcctcttcggcctcggcgtcttcaggcacggctacgacaggttcaaggacctcggccgcaaccacacctgcttcgactgcaacaccacaggtaccaaccgagtctgatcactggccgagaggagccaccaggcctgcctggggatcttggtctgcgccgctcggtgcaggcgcgtgcgtgcctgcgtgcgtgcttagctagctcctccgtggtcgtggaggcagcggagtagtagcagacgctgtgaatattgtaaaaattgcttgatcgctgtgttaagtttctgtgttgcgactacaagttcaaacaattctatgatgatttt

SEQ ID NO: 100732 - DNA, 1353 bp, Zea Mays
gttggctcccctttgcccgtcctcgccgctccgtttggtacgaacctcgcctaatttagtgctcgatttggggtttcgccgcagattccttatgaagctaaacaatgagacggtcaccatcgagctcaagaacggcacggttgtccacggcaccatcaccggtgttgacataagcatgaacactcatctgaagacagtgaagcttacactgaaagggaagaaccctgtaacgctggaccacctcagcgtgcgaggaaacaacatccgctattacattcttcctgacagcttaaacttggagactttgctggtagaggaaacccctagggttaagcctaagaagccgactacaggaaagcctttggggcgtgggcgcggccgtggtcgtggacgtggtcggggacgggggccgccacgctgacaggtttcccctgctgtgggctctcttgcctgacaagttccctgtacgatgtaacctctttcccccgcacgctgtgtgaaagaaccgttgcattgttacccttctgatgaacgtggactgaaatatctcaatctcaagtggttcttgtgaaatcaaccatgtctatttggtctaccattcgtgtgtgtcttagggtttacactgtagttaactcgtgatgtctttcccctggcatacataaatggtgccgcagaacttcggatgttctaggttgtatgcttgtttcacatggggattgttgatctggagatatgccttgcagtcgtgtctgcctctatttgatcttttagctctgcttgaagctgaattcccgtcgaccggagatactgattttgctgaagatctacagcttgctctcatacgacgccctgttggcatgcattgtgttttctgatgtgctgacaaacatgctcggtaaaggatgttttgtttgccggagatactgatcatctggagctgccgattctttttgtctcaggatgttttgtttgcaacgtttatagagttggtcaaaatagacaagatcagcttacgaacagagatgaagatattagtggcgtgatattgatgtgattgtacatagtaaacagtcacctgtagctccctgtgctgtgtatactctgggcccatcttccaccttgatttctcccactttggtcggcgtcacctagcgatatagatggccaaacgggccggcacggcccgacccgacacggcccgacaggcccggctagcgaagcgtgccgtgcccagatgggccggcgtgccgcggcccaggcacggcccgtgagcctgttagtcgtgccgggccggcccggtggcactatggcctatctgagtatattgtagaatttagcaaaaaatgtgtagtt

SEQ ID NO: 100733 - DNA, 2248 bp, Zea Mays
cttcctctgcctgtagatcttctagagtcccgtatacggtttcgtctttcgtgtcccacttccatggcggcggcggcgcagctgcacggatcggctgcggccacggtggcatatcgcgggactcgagcctactcagttccatcctcatgccggtggccgcagtctggttccccgaagctttcgatttctacaagtggagtcagtatgaagccatttggctttgctgctaaactttcaacaaaatgtgcaaatgagaatgctcgagttgaagaattagatttgaggtcagaccagatgaaggaattacaggtggaggagcaggttattccccagaagaggagtgctaaaatccatgacttctgccttgggatcccttttggtggtcttttattctctatggggcttctaggatacatcttctccagaagcaccataagtcttgtcttgggcattgcaccagggctagccactctgctacttggcactctcagtctgaagttctggaggagcggcagatccagcttcctgcttatcttggctcaggcagcaatttctgctttcctggcatggaaatactctcatgcttacttcttgacaaatagactccttccttggggcttctacgcgtcactgagcactgcaatgggttgtttctacgcctatgtgctacttgcgggaggaaatcccccgcctaagaagttggcagccattccaccgcagtaggaagagccgaagagggattcggtttaggatcagctaggttttcattaaagttcagtacaactgggccgacaaaggcccaactaagccgctcgaaccgcttcggcgcctcccacccctcggacagaccagccttcaaactagggtttactcctcccgctccgagaaagcaaacaagcgtcagctccgccggcggcctcgcgctctctcccccgccgcaccttctctacgccaggactgccaagatgaagctcgtcagattccttatgaagctaaacaatgagacggtcaccatcgagctcaagaacggcacggttgtccacggcaccatcaccggtgttgacataagcatgaacactcatctgaagacagtgaagcttacactgaaagggaagaaccctgtaacgctggaccacctcagcgtgcgaggaaacaacatccgctattacattcttcctgacagcttaaacttggagactttgctggtagaggaaacccctagggttaagcctaagaagccgactacaggaaagcctttggggcgtgggcgcggccgtggtcgtggacgtggtcggggacgggggccgccacgctgacaggtttcccctgctgtgggctctcttgcctgacaagttccctgtacgatgtaacctctttcccccgcacgctgtgtgaaagaaccgttgcattgttacccttctgatgaacgtggactgaaatatctcaatctcaagtggttcttgtgaaatcaaccatgtctatttggtctaccattcgtgtgtgtcttagggtttacactgtagttaactcgtgatgtctttcccctggcatacataaatggtgccgcagaacttcggatgttctaggttgtatgcttgtttcacatggggattgttgatctggagatatgccttgcagtcgtgtctgcctctatttgatcttttagctctgcttgaagctgaattcccgtcgaccggagatactgattttgctgaagatctacagcttgctctcatacgacgccctgttggcatgcattgtgttttctgatgtgctgacaaacatgctcggtaaaggatgttttgtttgccggagatactgatcatctggagctgccgattctttttgtctcaggatgttttgtttgcaacgtttatagagttggtcaaaatagacaagatcagcttacgaacagagatgaagatattagtggcgtgatattgatgtgattgtacatagtaaacagtcacctgtagctccctgtgctgtgtatactctgggcccatcttccaccttgatttctcccactttggtcggcgtcacctagcgatatagatggccaaacgggccggcacggcccgacccgacacggcccgacaggcccggctagcgaagcgtgccgtgcccagatgggccggcgtgccgcggcccaggcacggcccgtgagcctgttagtcgtgccgggccggcccggtggcactatggcctatctgagtatattgtagaatttagcaaaaaatgtgtagtt

SEQ ID NO: 100734 - DNA, 1023 bp, Zea Mays
actcccaagttcaccttcctctgcctgtagatcttctagagtcccgtatacggtttcgtctttcgtgtcccacttccatggcggcggcggcgcagctgcacggatcggctgcggccacggtggcatatcgcgggactcgagcctactcagttccatcctcatgccggtggccgcagtctggttccccgaagctttcgatttctacaagtggagtcagtatgaagccatttggctttgctgctaaactttcaacaaaatgtgcaaatgagaatgctcgagttgaagaattagatttgaggtcagaccagatgaaggaattacaggtggaggagcaggttattccccagaagaggagtgctaaaatccatgacttctgccttgggatcccttttggtggtcttttattctctatggggcttctaggatacatcttctccagaagcaccataagtcttgtcttgggcattgcaccagggctagccactctgctacttggcactctcagtctgaagttctggaggagcggcagatccagcttcctgcttatcttggctcaggcagcaatttctgctttcctggcatggaaatactctcatgcttacttcttgacaaatagactccttccttggggcttctacgcgtcactgagcactgcaatgggttgtttctacgcctatgtgctacttgcgggaggaaatcccccgcctaagaagttggcagccattccaccgcagtaggaagagccgaagagggattcggtttaggatcagcgtgcgttgacccttcgctccatagtaaaattttgattgtcttcctaagtatattctgcagcctttgtacactgctggctgggcctttgttttttcgatcctggtagcctgaaattttgagcaaataaagatccagaggacaatagccctgcttccagtaacatgctgttttcttgctcatgaatgaacgtgataaatataagcctgctcggcaaactggctgtcacagaaagttgtggcaagcaaaactaaa

SEQ ID NO: 100735 - DNA, 979 bp, Zea Mays
actcccaagttcaccttcctctgcctgtagatcttctagagtcccgtatacggtttcgtctttcgtgtcccacttccatggcggcggcggcgcagctgcacggatcggctgcggccacggtggcatatcgcgggactcgagcctactcagttccatcctcatgccggtggccgcagtctggttccccgaagctttcgatttctacaagtggagtcagtatgaagccatttggctttgctgctaaactttcaacaaaatgtgcaaatgagaatgctcgagttgaagaattagatttgaggtcagaccagatgaaggaattacaggtggaggagcaggttattccccagaagaggagtgctaaaatccatgacttctgccttgggatcccttttggtggtcttttattctctatggggcttctaggatacatcttctccagaagcaccataagtcttgtcttgggcattgcaccagggctagccactctgctacttggcactctcagtctgaagttctggaggagcggcagatccagcttcctgcttatcttggctcagcaatttctgctttcctggcatggaaatactctcatgcttacttcttgacaaatagactccttccttggggcttctacgcgtcactgagcactgcaatgggttgtttctacgcctatgtgctacttgcgggaggaaatcccccgcctaagaagttggcagccattccaccgcagtaggaagagccgaagagggattcggtttaggatcagcgtgcgttgacccttcgctccatagtaaaattttgattgtcttcctaagtatattctgcagcctttgtacactgctggctgggcctttgttttttcgatcctggtagcctgaaattttgagcaaataaagatccagaggacaatagccctgcttccagtaacatgctgttttcttgctcatgaatgaacgtgataaatataagcctgctcggc

SEQ ID NO: 100736 - DNA, 1513 bp, Zea Mays
cgcaatagctggggcactgctcgctcgctcgctacgcggacctgtggcgtacgcgtaccactccgagacagcaggcgcgtgcgagagcagcccggcgaggatggggcggatcccgtgctgcgagaaggacagcgtcaagcgcgggcagtggacgcccgaggaggacaacaagctgctctcctacatcacccagtacggcacgcgcaactggcgcctcatccccaagaatgccggactgcagcgatgcgggaagagctgccggctccggtggaccaactacctgcgtcccgacctcaagcacggtgagttcacggacaccgaggagcagaccatcatcaagctgcactccgtcgttggcaacaggtggtcggtgatcgcggcgcagctgccgggtcggacggacaacgacgtcaagaaccactggaacaccaagctgaagaagaagctgtccgggatgggcatcgaccccatcacgcacaagtccttctcgcacctcatggccgagatcgccaccacgctggcgccgccgcaggtggcccacctcgccgaggccgcgctggggtgcttcaaggacgagatgctccacctcctcaccaagaagcgccccaccgacttcccgtcgcccgcggtgcccgacatgtcggcgatcgcgggcggctccggcgtcgcggcgccctgcggcttcccggcgccgccccagaccgacgacaccatcgagcgcatcaagctgggcctgtcccgcgccatcatgagcgagcccgccgcgccccccggcaagcaggagcagccctgggcgccggccgacttgccggaggggctgccggggatgtacgccacgtacaatcccgcctcgcacggacacgaagagttccgctacgacaacgggacagtgccggagtacgtcctcggcggcggcggcggcgcggaccagggcacgtcgatgtggagccaccagagcatgtacagcgggagttcggccacggaggccgcgcccaggccggcggaggtgttgccggagaaaggcaacgacagcgtcgggagcagcggcggcggcgaggaggcggacgacgtcaaggacggcgggaaaggcggctccgatatgtccggcctgtttggatccgactgcgtactttgggacttgcccgacgagctgaccaatcacatggtgtgatcaataccgttcgtgcgaagtcgccgggatcaaagagcgtttcatcaaaggagaagaagaagaagcaccagaacaaaatattgccaaaaggtttcataaactcgaataaggaatacggaaatcatgtatataattttgtcatttgattagaagaaatgtgcatgtagaaccgaggagaccattcaattttagtttggactcctctgtttcaggagcaagtgctcagagtaacgacagtaacagtgcaaaaaaaccgcaaaatgttgtctccaattcaactcgagttgtctaatcatgtcactatacaaaggaatttcccccattttccctggattcctttga

SEQ ID NO: 100737 - DNA, 2017 bp, Zea Mays
acgaaacgctaaagccactttcttctcctgccaacacaagccgttttttcctccccaagtgatctagccagccacggagccaccactcgccaggtgcttcaaatagtcgccccggacaggcaggcgcacgcaacgcaactagtctccttcaccgtccgtccattcctccgatccgcaggaggattaggaacttaggatcggggaccggcggagcccgacgaccttctcggtccacccgcccggcgatcgaaccatggcgctcggcgagggcggggatcacggcgccgccctgcccctcatcgcggaccaggcgaaacatgccgccgccggtggcatcgtccgaagcggtagcaacagctcgtgggtgtgcatgcttctgcagcacacggccctgttcggctatggcatcgcctacaccatcacggcctccatcagctgcaggcaagaagcatacctgggcttgcggctcgctgcagtacgtgagcctgtacggctgcggcgtcgcctaccatcaccaccgccactagcataaggtagccgctgctggccggtaacaaaatttcccagtctctctctctctctctcaaaacttcctcacagctcaagctgcctgcagtcgtgtgcttccttccctctctttttagcgagcagggcgctgacgatggttgcttctgttgtccttctgccggttaaatttctctgaatatttttgttcttaactgcgcgtgctttgcttgtgtgttccatacgtgtcgggctgctctgctgttggatgtcgcagggcgatcctgaaggcgaactgctaccacgagcatgggcatgacgcgcactgcgactacgatggcaactactacatgctcatcttcggcggcgtccagctcctcctctccttcatacctgacttccacgacatggcgtggctctccgtcgtcgccgcggccatgtcgttctcgtacgccttcatcggcctcggcctcggcctcgcaagaaccattgctaacgggacgatcaaaggaagcataacaggtgttcggatgaggacgcctatgcagaaggtttggcgcgtctcgcaggccatcggcgacattgccttcgcgtacccctactccttgatcctcctggaaatacaggacaccctgaagtcaccgccggccgagaacaagacgatgaagagggcgtcgatgatctcgatcctcgtcacgacattcttctacctctgctgcggctgcttgggctacgccgccttcggcagcgacgcgccgggcaacctccttaccggcttcggcttgtacggtccgtactggctcatcgacttcgccaacgcgtgcatcatcctccacctgctgggcgggtaccaggtgtacagccagccgatattccagttcgcggagcggctcttggcggagcggttcccggacagcgggttcgtgaacggcggctcctacaccgtccggttcgcgtgcctgcgggcgtgccgggtgaacccgctgcgcgtgtgcctccggacgctgtacgtggcctccacgacggcggtggccgtggcgttaccctacttcaacgaggtgctggcgctgctgggcgcgctcagcttctggccgctggccatctacttccccgtggagatgtacttcatccagcggaacgtgcgccggtggtccgcccgctgggtcgtcctgcagaccttcagcgtcgtctgcctgctcgtcagcgccttcgcgctcgtcggctccatcgaggggctaatcagcaagaagctaggctaggctaggctagtccgatccagtggaacaccctatctgcaggtctgtcagagagtggcagcgggctcggttattttcacagtgttgccttcctcctgcatcgggttgtaagttgtaacatatatgtcgtattgatactggcgagttcagatgttcagaagaagtagaacgcgtgtgacgattctgtgttgctgaatgccgcctatgtagtttcagttccagaatttgagggtttccatatctgcagcagtttcctc

SEQ ID NO: 100738 - DNA, 1815 bp, Zea Mays
acgaaacgctaaagccactttcttctcctgccaacacaagccgttttttcctccccaagtgatctagccagccacggagccaccactcgccaggtgcttcaaatagtcgccccggacaggcaggcgcacgcaacgcaactagtctccttcaccgtccgtccattcctccgatccgcaggaggattaggaacttaggatcggggaccggcggagcccgacgaccttctcggtccacccgcccggcgatcgaaccatggcgctcggcgagggcggggatcacggcgccgccctgcccctcatcgcggaccaggcgaaacatgccgccgccggtggcatcgtccgaagcgggagcatgtggacggcagcggcacacgtgatcacggcggtgatcgggtccggcgtgctgtcgctggcgtggagcatcgcgcagctggggtgggtggccgggccggccgccatgctcgtcttcgcggccgtgacggcgctccagtccacgctcttcgccgactgctaccggtcgccggaccccgagcacggccctcaccgcaaccgcacctacgccaaagccgtggaccgcaacctaggtagcaacagctcgtgggtgtgcatgcttctgcagcacacggccctgttcggctatggcatcgcctacaccatcacggcctccatcagctgcagggcgatcctgaaggcgaactgctaccacgagcatgggcatgacgcgcactgcgactacgatggcaactactacatgctcatcttcggcggcgtccagctcctcctctccttcatacctgacttccacgacatggcgtggctctccgtcgtcgccgcggccatgtcgttctcgtacgccttcatcggcctcggcctcggcctcgcaagaaccattgctaacgggacgatcaaaggaagcataacaggtgttcggatgaggacgcctatgcagaaggtttggcgcgtctcgcaggccatcggcgacattgccttcgcgtacccctactccttgatcctcctggaaatacaggacaccctgaagtcaccgccggccgagaacaagacgatgaagagggcgtcgatgatctcgatcctcgtcacgacattcttctacctctgctgcggctgcttgggctacgccgccttcggcagcgacgcgccgggcaacctccttaccggcttcggcttgtacggtccgtactggctcatcgacttcgccaacgcgtgcatcatcctccacctgctgggcgggtaccaggtgtacagccagccgatattccagttcgcggagcggctcttggcggagcggttcccggacagcgggttcgtgaacggcggctcctacaccgtccggttcgcgtgcctgcgggcgtgccgggtgaacccgctgcgcgtgtgcctccggacgctgtacgtggcctccacgacggcggtggccgtggcgttaccctacttcaacgaggtgctggcgctgctgggcgcgctcagcttctggccgctggccatctacttccccgtggagatgtacttcatccagcggaacgtgcgccggtggtccgcccgctgggtcgtcctgcagaccttcagcgtcgtctgcctgctcgtcagcgccttcgcgctcgtcggctccatcgaggggctaatcagcaagaagctaggctaggctaggctagtccgatccagtggaacaccctatctgcaggtctgtcagagagtggcagcgggctcggttattttcacagtgttgccttcctcctgcatcgggttgtaagttgtaacatatatgtcgtattgatactggcgagttcagatgttcag

SEQ ID NO: 100739 - DNA, 971 bp, Zea Mays
acgaaacgctaaagccactttcttctcctgccaacacaagccgttttttcctccccaagtgatctagccagccacggagccaccactcgccaggtgcttcaaatagtcgccccggacaggcaggcgcacgcaacgcaactagtctccttcaccgtccgtccattcctccgatccgcaggaggattaggaacttaggatcggggaccggcggagcccgacgaccttctcggtccacccgcccggcgatcgaaccatggcgctcggcgagggcggggatcacggcgccgccctgcccctcatcgcggaccaggcgaaacatgccgccgccggtggcatcgtccgaagcgggagcatgtggacggcagcggcacacgtgatcacggcggtgatcgggtccggcgtgctgtcgctggcgtggagcatcgcgcagctggggtgggtggccgggccggccgccatgctcgtcttcgcggccgtgacggcgctccagtccacgctcttcgccgactgctaccggtcgccggaccccgagcacggccctcaccgcaaccgcacctacgccaaagccgtggaccgcaacctaggtagcaacagctcgtgggtgtgcatgcttctgcagcacacggccctgttcggctatggcatcgcctacaccatcacggcctccatcagctgcaggcaagaagcatacctgggcttgcggctcgctgcagtacgtgagcctgtacggctgcggcgtcgcctaccatcaccaccgccactagcataaggtagccgctgctggccggtaacaaaatttcccagtctctctctctctctctcaaaacttcctcacagctcaagctgcctgcagtcgtgtgcttccttccctctctttttagcgagcagggcgctgacgatggttgcttctgttgtccttctgccggttaaatttctctgaatatttttgttcttaactgcgcgtgctttgc

SEQ ID NO: 100740 - DNA, 1898 bp, Zea Mays
ctgaactcagttctcgtcatcttcttcgttttccctttcctctcctccacgaaacaacaagctactacctctctctctacctgttatctctctagaagtatcagtgacgctaacagtaagacgctgccctctcctcctatcctcgcgttacttctgcgtcgcgtgcctgcgcgagcgcctccacagtctcgaggcatccgccgccgccgcctccgcaccggggcgcaagtccacatcggccatctggtccctgatgtgttgcgaaacgcggcagatcttggggctactttggaggtcaaactcaaacctgttgcggtgtcggtgaatccaaggaaacgcctaggacgggttgcttgcagattgcaagcacgatatgcgaccgactgattccctccccgtgtttctgctgaattctaaagtacttgcgttgtgccatagccatagcccgagccctgaactctgacctgcttagctgactcccatgattatattccagcgttccttcttctcttgatgggacaacatgcagaaatatgtcatgtaaatggaagacccatatggttggctcttgcagagttgcgggtccaatttaatttgttgctttgctgttgtacgaaattatgcagttattaataatggagtgattaagtgtatactttatgatcatgtatgccagctccttatttgagttgttacatatagatccctacaacaccaattatagttggggaaggtgaacctcctccctcttgggatccggtaccaactccaaaagttctacaatgagtatgtcattgcgagatcatattagaaagaggagggaagaagaagatgatgacatgattgtttattttccctgtcttatatctgatgggttcaactagaagtgggggacaaaagaagaaacaccatacatcagatgagacatgcgaggttaaggttcgaagactccttgagggacatgtcaagaactgtcaagttacatttaggatggaaccacacatctttagagagctggcaacttatcttagaaggagaagaatcatcgttgatacaaggatcacggtcgaggagaagttggggttcttcttatacatgctaagtcacaatgcctcatatcaagatcttcaagtgtactttgggcatagtaatgataccttccatcatcacatcaaccacttctttacgaaggtcattcctatcctctctcgtcgtttcattcaaccttctgatcctagtcaagtgcatcaaaaaattcaagataatcctatattctatccattcttcaagaattgtctcggtgctattgatggaactcatattcctatttccatatctcctaagaaaatatgatgggcaaatacctagaaatgaggagcaagcaggtagaatatgaatctacaagagaaaaggaagcaagagaaaaggaggcaagagaaatggaggtaactcaaagtgatgatttctccatcaaaaggtgcatatcagttatgaacacaatagaagaagtgaccaaattggagaaggcaaaagcatattcaatcttcgccaagagcaaagagaatagagaaactttcatatgtgcttgtgaagcagatcaaaaatcagctttgatttggctaagaaatgagatgccctagcagctttgatatggatattatttggaagtcaaacatgtgttaatgtgagttgctgtcaaacaagtgaattgctaatgtgtattgtcgagtattgggaagtcaaactttgatgtcttagcagctttgaattgctgttcttagcagctatgttatgtcttagcaactttgttatgtgtattgtcaagtattgggaagacaactccgtatgtgtgaccattgttattattgtatttgcttatatagctgattacttatata

SEQ ID NO: 100741 - DNA, 86 bp, Zea Mays
ctccgttcatgcatcacctatatttatactcatctagccaacaaaacatataatttttgtgttttacattctataaaaaaataaaa

SEQ ID NO: 100742 - DNA, 1449 bp, Zea Mays
tctctcttcttccttgacgaacaccctttccttcctcggcttcgtttcgtgctttcctcaacctccccacttccgtggcgcgcagtttgtccgctgcttcacggaaattcctacgggacctgtatatattcgctgcgcaggcggccccgcctccggccgttgttgtctccgctcaccccgccagtatcccggcgtcccaattccaggaactttcgtcgcgtcaggtgatgcttttagcaactacaagcatagaacaatgttgatgcactatgatgtggatagaagtgaggaccggcaaagtgaggaggttcagtcagcatacagaagggacagtgacattggtgaggaaatgataataagtagcgaagagcaaaatgatgaaaatgaatggagctgggtgaatcaagatagagatggtggtcctcttgctgaatcggtttcttcacttcatatgacacagcaagtccttgaaaatgagatacaaaaattatcagaacttggcaaagaacttgaggcggaggaatccacttctggtaacaaagaccaagatgtgatcgttttgccgtatgcagaggtcgatatgttgaaattgaatgagaagatggagcatcttgaacaaaaagtgaaagaagtgtcaaacaccatcagagagaaagacttaaggctttccaagcttcaaatactgatcggtactgcagatagggcaacggtggaggaggcagcagctagcatcgaccagctagagacagagttcgagcaccatctccaggagatactggaagctgaaatccagtatctggtgatgatgaaagcgaggcagaactggcaggtccgggcagaagaccagatggccttggaggagcacagggcgtctgctgccggggacaacaccaggatgctgctcaagctacgagagacggagagcaagatcgtgatgttgaaagagcaggtggacaagctggaggtccgggagaaggatctctaccggacgaccgaggtcctgaagatgcagagcaggaccttcaaagtgtccctctttggcctcgtccagctgataatgatgtgcctgtccctgaagatgttcttcgcgcaggtctcggcgccgtttgacgaggttgtgccgacatgatgatgccctgcctcgtttggatgcattcgtatccacatggattgacgtgctcagttggtgttctcttccgtctgtaacttcgttcgccgggtttgtgatgtcttaacgtgtatcttactgtagctgtaggcctgtagccagcacccagtaggtagtatagtttcttagtcgtacatgcacttgtgatgatatacgtcagaagctacgcgtgttctgtaaaaactaataatgtaggtctgtgcataaattgggttcgattgacaactaggctagctgacggtctgcagctaccaaatcatggattaattaggcaaactaaa

SEQ ID NO: 100743 - DNA, 363 bp, Zea Mays
atggctccagggaagaggtccgcatggacctcacagaaacccgaagaacctatgccaactgattacgagaaaataagggctatgaatatgatgaagaacaatcaattgtttcaacggctaggccttggacaactgaaatcactgatgactgctacagctgcaaacaacaaagacgactctcctcagcaatcagagagtttatatgatggtgaaaacactgacaattctaatgaagagttttgggttcgcaatgaatttgatatgcatatccttattgtattctacatattcaggaatcccaatgtcgtaacaatggtcgtgccaacttatccaatgatggtgatcagatctcaacaaaagtaa

SEQ ID NO: 100744 - DNA, 610 bp, Zea Mays
cgattaccacactatgatcgtgagaaaaataggaagacacaaatagcggtgtaatggcagaaggcacacatacagtgaagatattgaattttatggttccttgagagaaataattcagttgcaatataatgcagacaagagcggacatcggtcagtggttatttttcgatgtgattgtttcgacacagaaagcaagaagggaagaataaaagatgatggattattcaaaagcatcaaccattccatatgttggtacaaaaatgatcctttcattcttgccccacaggcaacaatggttttttatttgcaagacaccagatatgggggtagctggagggtagttcaaaaatttgtgcataggcatctttggaatgttgatgaaacttgtagtgatgaaatacccaatggtgtgtcgctttcttaccaagatgatgagtgtgtagcttgtaatattcaacatactgaagtgaatgtgaacaatgatacacctagggtagaaaatgttgatattatagatgcaagtgtagttgaagatctacatagacaaagggaaatggaacagcaccaagattatttcgaagatgaagaagatgaaacaggatggcaatat

SEQ ID NO: 100745 - DNA, 4344 bp, Zea Mays
atggccaaatataccctcgcgaagagcgattgttgcgtggaaaatatagacaaggccatcgatgacaacagagagaagaataaattggaaacacaaggcgtgaccgagtgcctgatgagaattgagatagtgggcggccaaggaagcgaagtttctcgcactccacctgttgaatttaccaacttggtatgctggagtgtaaggataagagcagacccaattgcttcacagctcttgggttcttagtgccgactgtagcagcagcagatctggggcgagcagcgaaggcgttcatcagatgttatccagtgagcagccttcaggcccctcatgttccttcaagtctactggcccgggtgtgagcactgatccggcaacctccgtggccgaggggccgccgagccaggatcccagagatctggtccaaccttatcccaagttctccataagagattatgtgtttgcttcaagaagcaaaggcatcaagagaagctggcctttccatccacattcattgcagctttgcctagagcgcggtgtgaaggatccattgcctccatttgagtctcccgatttgatccggtcacagccattaaatatttccactgactttgagcaatctgctgcttgcttagaactcaatagtgttggtctggtgaagaatagagatgctagttccttaaacgagtatacaggcaatatcaacttccagtcatgccaaccagtagatgagtcacttggacctttgccatacacatcgccagaggatgggaaatctggtatcaaccaagtgggaagtacaaatgaatcagatcatcctgatgaggttataccaatagatctacaagataatagctgtacaaaagcaagtcagcaaattgaggttgatgtgcccttgcggcggttgagaaatcttgacttatcatgcgagccatctgaaaagaagtgcaaatttgtagtcaagttaggtgccacgacggatattcggcgagcagaggatatagcatctaactctagctcagtttcagatccgatggcttcaaagacttgtcctgtttgcaaagtatttgcttcgacttcaaacaccacattgaatgcccacatagatcagtgcctttctgcagagtctaatactgagcttgttgaaacggtccttgtgaaacctaaagtgaagccaaggaagaagcgattgatggtggacatatacaagactgctcttccatgcacacttgaggatcttgatcagaggaatggcactaattgggcagttgagttgtctatgtctccagtgagcagagaggtttgcactgagaaccgaagcccagaaatggtatcatttgacagaagagatgatgaaagagaaggagatgtctatgttgattctaacggcataaaaattagaattttgtccaagtgtaatgatgtacctttggtgttgagggatgaccttggttcgaggaaagttgcgaagcatggaactggaaaaggtatactgatgagcaaaaagatgctgaagtcaaagcttttgaagaataagaagctcaagatgcatggaaagaagtacaacaagacaagccctttgaactcccaggttcaagcatatccacatgatgatattaacgaggaaacctccgaggaggagtggcatgcgcggaatccttttgaaagcaccagcaattgttgttccaggactatgcagcagtgggtgtgctccaaacgctcagatatcgccaagagtttaagcagaaaccatagtggtaaagcatttgataaagtgatacctggagcacagaaatcggataggaacaacatgcttggctttaatgattctcaagttccagaaagtcctgctggggcgttttcttcggagtcaccagaatacatggccacaacttcagaagccattggtgttgagcagagcaatggtccttcaaaagtgcttagatcgattcctacatggtcttcaaaaactcaccgtcttcagagcagtgtcatgccaaaaacacctagatcagctgctgctcttgcaaagagaaaaattaaggagattgggaggagagaagctaccaaattagataattacaatatagtgaggaatcccacttcagtgaaaagatctgaaactaggactctttccttcactgcagggccaagcaatggatcaaacaggttagcatctacctcaaagaagatccggaagcatcgatctctgttgaggaccggcaagcgtgcattttcaccttttagtactagagtagttcatggttttggtgaagagcgtgaacttgataccagacatgtaaataagaaattccggattactagtaatgaggttcccaagaagtttttgaagcatactgaagaggatactgcagataatgacttctctcttgcaagtgacatgacagtatcaggacaacagaatgatcaatatgatgttgcacaggaaacagagggtacacaaatggattgtgaaggtgaagatgctgaaactgatgtgccatatgattctgtatccagaagtgatcctgctgactgttgcaaccaaataagtgatgtttctctgagtcctgaaaataacagaacaacagatgatgatgttttagttgaaggctatagtgtagctgtggaggatccaaactccagtgagaaattagcacatgggcatgaatccaactgtgctaccaataatgaaatggatgaatggcagatggatccgacttcaacaaaggaatctagtccctgcttagttagtaacagggacatgggtcctggaggtcctcaggataactcatcaataacatcaaatggagaaaactttaatcaagagcatggtctgccactcggacaggactcactagattctcctgtatcaactgcctcaactatgtcccctccagctgctttgaaggattcaaggattaacgatgaagaacctggcccatctactggtagaactgttgaagagcaaatcactgggtgcttgaatcaagaagccaagtcaatacctatggccagagaaggtgaacttcccaaagagaagccttttcgatgttcttgccaggagaacatttccagagagtctcatcaaagtgttgttgccagaccaacgctgaattttactggaaagcaggttccgcaattgcacattggttcgagggcatcatcatctttcagcatgtaccaaagaaccagcgcaaagcccaacccctgcttagattcacatgaacatctttcagcggctaaggttgcagcggaatctgctgtcagcctcccttcttactcaacagattgcataagcccctcattacaaactcagcttccttcgccatcaaatcctatcttgaggctgatgggtaaggatttgatggtgatgaacaacgaagagagtgtgcatcctcaagcaccaagttcagactacatcttgagagggaattacgaggcacctgttggttttatgcctccaagctaccaacatctcggtaattctggatttatcagcatgccaccaaccgcagccagtcaccagattcctctaccaagtgttcaagctagcggccttgttgctcctccgttgcacagcgtttccatgatgcaacctgaacatcattcccagcagaagtcctacagaaatattatgcctgccatgcatcatccaacctacatgatgaaagaagtgattgtgatcaaggactctcctgagcgtagtagaactgagccacaagctagcatgcttttcccccctgctccacctcccgcactctcgataccaaacaatacgccaccacgtccattttactgccttccaccgcaaatcccaatcttgccaagggagagggctgctggatccatgcctgtgtacgcaaactttggcgcattggctggtgtcagtccatcaagtcaagaaagccaaacgggagtaaccaatccttacatgccgaatccgttcttcgtccagtcccgaactggttacatgaaccacccgccagtgtactactcacagaatctggggtgatgatttctcagtagctcaaatgaccagaactccatttaacttgccggtcgtcgctgtcgaagtttgtgggggatgagagtttcgtgatgggtcaaaaacatgctgagatcaatgaacctgcatgagatgtgtctgactttcatgaggattttcacataggttgctttagatttttccccctttctttctcccttaaagctacagcatgtttgccgtcaaaagtatcttaattactctctgcaaagctgcagtagtaaattacagtgtgcaattcccaatagctctgcaaaggaatatatctcagtatttatcgaaaaagctggcatttg

SEQ ID NO: 100746 - DNA, 243 bp, Zea Mays
ggaaattgggagtacacctccaacaagtacaagaccaagggaggattcaacaaggaggcgctcaagaagaagtacctccagaaggccaagatcaaggagtgtgccttccttgcctccctcagtgacctcgaccacgacaccgatgacacaacatcatccttgagcgatgaggagaccgacaagcgggtcaaggacaagctgaatggactctgcttcctcaccaacaccgcagacagactttga

SEQ ID NO: 100747 - DNA, 1270 bp, Zea Mays
attcgttggatcatgatcagtgtagagcatgctgcgttcatggcaggggaacttgggttcgacatggtggataaagttatcaaagcccttgacgacgctggttaccatgaccaaactgcccagaaagttatggtccagtcaaccgacagttcggttctggagaagttcaaggagcaaacgaagtacgaccttgtgtacatggtcaacaaaaaggtcggggacgctgcgtcgtcctcgcttgtggacattaaaaggttcgctagcgccgtgtccgttgataccggctccgtcttccctgagacccactacttcacagtgtacgaaaccaaccttgtccagacactgcagacggctggcctctcggtctacgtctacactcttatgaacgagtttctgtctcagccatacgacttcttctcggatgctacagcgcagatcaatgcctatgttaagggtgctctggtggatgggctaatcacagatttccctgctacggctcgaaggtacaaggtgaacagctgcatgaacatggggaacagcacaccgaatttcatggcccctgctcgtccgggtgatctcatgcaaagcatcagcaagagcgcgcagccaccagctttggctcccgttccacccttgactggttccgacgtggcggagccgcctttacctcctgcgagatcgaacagcagcacagctccgacgcaatcactcgcgagcaggacgcgtgcttgcgctgctcacatcccagccctggcctcactggcaatgctttgcgcctggctttccctggtatgagcttgcagtgcaggccgccctagctccgtcgctcgactgctcgagctggaccgccgatccactcatcggatgttcttctccacccatagcagtagctcatttgttcagtgaatttgcatctacgggcttgtgcggaatgcgtacgacacttctgtgtgagctatcactattcactactgacgtttcagtacatatatgttggattggatgggtaatatattgcctacttctcaaggctattgattatgtattcacaaagaaaaggctatgatcaaggtgtaagcgactcatattgcattgttctatgcaagatgagcctatggccgtgactttctgttttgaaaggctgagaaatatgaaagccatccctgaattatgatagcggtggcacatgagatggatgtgttttcggatgtatctgtgggcgaccaagtagtttggctctgtttactgatcacaataggtgttttctttc

SEQ ID NO: 100748 - DNA, 944 bp, Zea Mays
accttcctctgctgtatgttcagtgcctgcctggtttctgggtttctccccttccctcctcgacctctcttccagcttccaacgcagctcatcaccagacaccactacttccccagttcccctcaccgtccctgcgctccatcgtctttggtgtccatagctttaaatacgaccacgaagccggtgcggcgactcggcgatctctccatcactgctgcggtgctgcctagctaccttctcggcctcgggtgggggcggcattgtcggtccagactccagagcgcgctgcttccggagctggccgcttgcgctgagccctctgccggaggcaatgaggagcggccgtgcctgctccgctctcgcgtcgctcctgctgctgtggctgggcgtcgccgccgcgcagaaggcctcgtcctggaagacattgagcggcaaggctccagcaatcgtagccaagggtggattctccgggttattccctgattcaagcgaatacgcttatcaatttgcgctgctcgctagctcgccggatacgatactgtactgcgatgtgcggctgaccaaggatgagattggcatttgcctgccggacatcaagatggataactgcacgaacattccagatttctatgcgcagggtcagaagagctacctcgtcaatggcgtgcctacttcgggatggttctcggtggactacaatggcactgagcttgaacaagtgactctcaagcaatcaatcaattctcggacacccagatttgattcaagtttctttccactacttgctgttgaagatgtgcagtccaaattcaaaccttctggaatttggctcaatgttcaggtacaagaatctcattccgtacagtagattacgctgggctcttttctgctgtcaccataacctcctcttgacgcaattgcagcatgacagtttctacagccag

SEQ ID NO: 100749 - DNA, 79 bp, Zea Mays
gaggtcgaggttgagtccgagccctgtggtcgggcgaggtggagtccgtcttccgaggtcgaggttgagtccgagccct

SEQ ID NO: 100750 - DNA, 1024 bp, Zea Mays
gttcctggacctgtccatgaatgacttaattttaatagattagatatcattcatttttctcaacttcgagagaaccattggctttcgttgcgatctaatacagcaaaacacctcattcctatacagttttcttggttcaaaatttgggcattcagaatgcattatggtgatgttcgtagaccctgaatacatttgttgttgtatttcacaggaaaagaatgaagtaatacaaaagcaacttgaaaccctttcattactcgacaaaagaaaggctacaacagtacaacgccaaagctggacattgagagtgatgatgaggaccttgatgatgaggttgatgatggagctgaggatgaggacctttgcttatattataccgaatccttctacaaggaatgggaattcatggccaacatcagtggtccttgcaggtttattagcaacactcaagatggttcgtggtaccctgacagagcagacttatttgttccttagtgctggggagtcgtatctgatgtacttatgtataaacagtgacacaaggcatacagaaatacagtacctacccctaggcattggtctcaaaagtggaagttcttgcagagtcattgagggtgtgggcgtgtgggagtgcaatgtcaatatggtttcatacctcttatacaaatacccaaatcttgtagggatggttataacaactaggatgaaaaagtctttagcctcctcatctcgtgttgatgatgtagaagttagtttggttgatatctctggtgttaatgtagagaagtttgatgacaagtactttgtaagggagaagaagaaggcaacgaagactgggggtgaacttttatacacaggtgcaaccaaggacctgccacagctcaagaaggacgaccagaaggcggtggacgctaagctgatcaaagctattgaggttgtgccggatctgaaaacctaccttggtgcatggttctctctcagggacgacaacaagcccatgagattgttttctatatttgcctga

SEQ ID NO: 100751 - DNA, 105 bp, Zea Mays
gtatgactgtattgatacaactttgtttgctttctctgcattttcagtttatgaaaatattggatggttttagccatttggtctacatacgaaatatactcctac

SEQ ID NO: 100752 - DNA, 1811 bp, Zea Mays
ctgccttggtgtttttcttctcccgttcaagtcgcgtgccactttcttctctcgttcacctcgcgtgcgcgaaccaactagggcgaccgctgccgccctacggcctacgcccagctgctcaggtcttattcgggcctttggcggcgagaaccgaccccgccaggataatggctcaccgtggacacctagatggactgactgcccaagctccagcactgatgcgccatggttccttcgctgcaggcagcctttctagccactcacctttggagtcttcatctacactggagatgctggagaacaagcttgccatgcagactgcagaagtggaaaagcttatcatggagaatcagcggttagcatcaagccatgtggtcttgaggcaggacattgttgatacagagaaagagatgcaaataatccgcacccacctaggtgaagttcagacagagactgatttgcatattagagatttattggagagaattagattaatggaggcagacatacatagtggtgatgcggtgaagaaggagcttcatcaagtgcatatggaggcaaagagacttattactgaaaggcagatgctgacccttgagacagaggatgtgaataaagaattacagaaactctctgcctctggtgacagtaaaagccttcctgaattgctagctgagctagatgggctaaggaaagagcatcttaatttacgatctcaatttgaatttgagaaaaatacaaacatcaagcaagttgagcagatgcggacaatggaaatgaacttgatgaccatgactaaacaagctgagaagttacgaggtgatgtggcaaatgctgaaagacgggcacaggcagctgtggctaaagcaacagggcatgcagctggtgcacaggtgacagcttcacagcctgggacagctcaagctacagcggttccagcagcagctacagacccatatgcaggtgcatatgccagttacccccctgcatatcagcagggagcccaggctggggcatatcagcagggagcccaggctgggacgtaccagcagggagcgggaacccaggctggggggtaccagcaaggagcccaggctggggcgtaccagcagggagcgggagcccaggctggggcgtaccagcagggagcccaggctggggcgtaccaacagggagcccaagctggggcgtaccaacagggagcccaagctgggacatatcagcaaggaaaccaggctggagcatatccctatgcttatgatgctgccacggcttacacatatgcaggttattctggctatccagttgcaggctatgcgcaaagtgcagtgcccaattattcctatgctgcacctccacagccaataagcagtggtgcagctacagacgccgcaagcctgtatggtgccgttggtagcgccggatatcctactgcgcaagttcagccgagcagtggccctgcaaatgcagcgccaccacctccaccaccaccggcagcaccatatccaagcacatatgaccaaaccagaggagcccagaggtgaaatctgggatgtaaaccagatggctgtttgccatgcacatttgttgagcagacaaatatagactctgtcatgccccatttgtagactgattactggttcagttatgtagatccagttacgggtagattaatttacatcacgacggaagagttgatgtatgcgtaactgtgttggtacttgggttgatcggagcaatgcggcattaaaccacaaaatagtgtagtgtcgttgttctctattcttttataccatttattttcaagtata

SEQ ID NO: 100753 - DNA, 1808 bp, Zea Mays
ctgccttggtgtttttcttctcccgttcaagtcgcgtgccactttcttctctcgttcacctcgcgtgcgcgaaccaactagggcgaccgctgccgccctacggcctacgcccagctgctcaggtcttattcgggcctttggcggcgagaaccgaccccgccaggataatggctcaccgtggacacctagatggactgactgcccaagctccagcactgatgcgccatggttccttcgctgcaggcagcctttctagccactcacctttggagtcttcatctacactggagatgctggagaacaagcttgccatgcagactgcagaagtggaaaagcttatcatggagaatcagcggttagcatcaagccatgtggtcttgaggcaggacattgttgatacagagaaagagatgcaaataatccgcacccacctaggtgaagttcagacagagactgatttgcatattagagatttattggagagaattagattaatggaggcagacatacatagtggtgatgcggtgaagaaggagcttcatcaagtgcatatggaggcaaagagacttattactgaaaggcagatgctgacccttgagacagaggatgtgaataaagaattacagaaactctctgcctctggtgacagtaaaagccttcctgaattgctagctgagctagatgggctaaggaaagagcatcttaatttacgatctcaatttgaatttgagaaaaatacaaacatcaagcaagttgagcagatgcggacaatggaaatgaacttgatgaccatgactaaacaagctgagaagttacgaggtgatgtggcaaatgctgaaagacgggcacaggctgtggctaaagcaacagggcatgcagctggtgcacaggtgacagcttcacagcctgggacagctcaagctacagcggttccagcagcagctacagacccatatgcaggtgcatatgccagttacccccctgcatatcagcagggagcccaggctggggcatatcagcagggagcccaggctgggacgtaccagcagggagcgggaacccaggctggggggtaccagcaaggagcccaggctggggcgtaccagcagggagcgggagcccaggctggggcgtaccagcagggagcccaggctggggcgtaccaacagggagcccaagctggggcgtaccaacagggagcccaagctgggacatatcagcaaggaaaccaggctggagcatatccctatgcttatgatgctgccacggcttacacatatgcaggttattctggctatccagttgcaggctatgcgcaaagtgcagtgcccaattattcctatgctgcacctccacagccaataagcagtggtgcagctacagacgccgcaagcctgtatggtgccgttggtagcgccggatatcctactgcgcaagttcagccgagcagtggccctgcaaatgcagcgccaccacctccaccaccaccggcagcaccatatccaagcacatatgaccaaaccagaggagcccagaggtgaaatctgggatgtaaaccagatggctgtttgccatgcacatttgttgagcagacaaatatagactctgtcatgccccatttgtagactgattactggttcagttatgtagatccagttacgggtagattaatttacatcacgacggaagagttgatgtatgcgtaactgtgttggtacttgggttgatcggagcaatgcggcattaaaccacaaaatagtgtagtgtcgttgttctctattcttttataccatttattttcaagtata

SEQ ID NO: 100754 - DNA, 1936 bp, Zea Mays
gcccccacagccaaaaaaagcacgtcaagggctgatgtgacaattaaactagagaaaagctacttttttgaaagtacgttagtaaaaaattatccctttagttgtatttgggcttttctggaagtaaaagtaagtttggaagtccaaccaaaggcacccaaatcaagttcgcttcaatgtgggcccacttatcagggaccttaattattcttgggaaacaagccgaatcagggtcaattagtgacaaatgcctagaaacgcgagggctaaatcgtaaaacaacttgagtatccatctccaccttccctttctcctcctctctcccggattcccggcgacctcccttttccttccctcccgagtcgcggccgcccgcccgcctccgtgatcgcaattcgcacctgcccgcgcggccccgacccctagtcctccccacccatggcgcggcgatccgcccctctcctgcgccgcctcgtctccgcctcctcaccgcccgcgctgcagtccctcacggaccacgtcggcgtcctcgcgcggcgcacggtgacctacatgccccggcccggggacggcgcaccgcgcgccgtcacgctcatcccaggcgacggcatcggccccctagtcacgggcgccgtgcggcaggtcatggaggcgatgcacgcgcccgtctacttcgagacctacgacgtccacggagacatgcccacggtcccgccagccatcatcgaatccatccgccgcaacaaggtctgcatcaagggcgggctcgccacgcccgtcggcggcggggtctcctccctcaacatgcagctgcgcaaggagctcgatctctacgcctcactcgtccactgctccaacctccccggcctgcccaccaggcacgagggtgtcgacatcgtcgtaatcagggagaacaccgagggcgagtactcggggctcgagcacgaggtcgtacccggggtcgttgagagcctcaaggtgatcacaaagttttgctctgagaggattgccaaatatgcattcgagtatgcttaccttaacaaccgaaagaaagtcactgcagtgcataaagcaaacattatgaagcttgccgatggtttgttcttggagtcttgccgtgaagttgcttcaaaatatcctggtattcagtacaatgaaatgattgttgacaactgctctatgcaacttgtttcaaagcctgaacaatttgatgtcatggttacgcctaatctttatggcaatttggtggctaacacggctgcaggtattgttggagggacgggcatcatgcctggaggcaatgtgggtcaggactacgccatctttgagcaaggcgcttctgcaggaaatgttgggaatgagaaccttgtggagcagaagaaagcaaaccctgtcgcgctgcttctgtcatctgctatgatgttgaggcatttgcagttcccgtcatttgcggaccggctcgagacggcagtgaagcgtgtcgttgctgaaggcacgtacagaacaaaggatctgggcggtagcagcaccacccaggaagttaccgatgctgtggttgccaatctggattagattccaggtgtacacggctaaaaaaggctaattctttggggtgactagttgtctagtcttgactcctgagtgttatttatcttcttacatagattttagattgcttcacatcttcaagagggattacaaggtatcccttgtttcagattttctttagaaataatattgaggaacccacgacgattcttgttcacgtgatactttgtacttatcaaggtagaggaccttgagttgcaaagccgaagggaatggatggcagtctgaaaataacatgaattgagagttgattcagattggagctttggccctgattgccactgcatactgtcactttggattattccctgagacttactgttatgga

SEQ ID NO: 100755 - DNA, 1924 bp, Zea Mays
gcccccacagccaaaaaaagcacgtcaagggctgatgtgacaattaaactagagaaaagctacttttttgaaagtacgttagtaaaaaattatccctttagttgtatttgggcttttctggaagtaaaagtaagtttggaagtccaaccaaaggcacccaaatcaagttcgcttcaatgtgggcccacttatcagggaccttaattattcttgggaaacaagccgaatcagggtcaattagtgacaaatgcctagaaacgcgagggctaaatcgtaaaacaacttgagtatccatctccaccttccctttctcctcctctctcccggattcccggcgacctcccttttccttccctcccgagtcgcggccgcccgcccgcctccgtgatcgcaattcgcacctgcccgcgcggccccgacccctagtcctccccacccatggcgcggcgatccgcccctctcctgcgccgcctcgtctccgcctcctcaccgcccgcgctgcagtccctcacggaccacgtcggcgtcctcgcgcggcgcacggtgacctacatgccccggcccggggacggcgcaccgcgcgccgtcacgctcatcccaggcgacggcatcggccccctagtcacgggcgccgtgcggcaggtcatggaggcgatgcacgcgcccgtctacttcgagacctacgacgtccacggagacatgcccacggtcccgccagccatcatcgaatccatccgccgcaacaaggtctgcatcaagggcgggctcgccacgcccgtcggcggcggggtctcctccctcaacatgcagctgcgcaaggagctcgatctctacgcctcactcgtccactgctccaacctccccggcctgcccaccaggcacgagggtgtcgacatcgtcgtaatcagggagaacaccgagggcgagtactcggggctcgagcacgaggtcgtacccggggtcgttgagagcctcaagttttgctctgagaggattgccaaatatgcattcgagtatgcttaccttaacaaccgaaagaaagtcactgcagtgcataaagcaaacattatgaagcttgccgatggtttgttcttggagtcttgccgtgaagttgcttcaaaatatcctggtattcagtacaatgaaatgattgttgacaactgctctatgcaacttgtttcaaagcctgaacaatttgatgtcatggttacgcctaatctttatggcaatttggtggctaacacggctgcaggtattgttggagggacgggcatcatgcctggaggcaatgtgggtcaggactacgccatctttgagcaaggcgcttctgcaggaaatgttgggaatgagaaccttgtggagcagaagaaagcaaaccctgtcgcgctgcttctgtcatctgctatgatgttgaggcatttgcagttcccgtcatttgcggaccggctcgagacggcagtgaagcgtgtcgttgctgaaggcacgtacagaacaaaggatctgggcggtagcagcaccacccaggaagttaccgatgctgtggttgccaatctggattagattccaggtgtacacggctaaaaaaggctaattctttggggtgactagttgtctagtcttgactcctgagtgttatttatcttcttacatagattttagattgcttcacatcttcaagagggattacaaggtatcccttgtttcagattttctttagaaataatattgaggaacccacgacgattcttgttcacgtgatactttgtacttatcaaggtagaggaccttgagttgcaaagccgaagggaatggatggcagtctgaaaataacatgaattgagagttgattcagattggagctttggccctgattgccactgcatactgtcactttggattattccctgagacttactgttatgga

SEQ ID NO: 100756 - DNA, 560 bp, Zea Mays
atggccgggtctcccacacccgcgccgtggccggggccgaggacgctgcgccagccgcgggcggtcgcgcccgtgctgtcgcaggggttggccggagagacgctctcgtcgggcacatgggagagtgcgaaggcgaggttgaccgtgaccggctcccccggctcgcagcacagcctggacgcatgcacgaggggagccagggcgaggagatttcggatcggaaatgggggaggagatcacgatggtcatgtggatgacttctgggatggcgccgatgaggtttcctggtgctcaccgttaactcattccacagatggctccaggaatgaattcaagttgcatccctgcaacacagggcctaagtcagatgccaagattatcatacatgaaccacaccctgccaaatcatatccctctgaagtctgaactcatctccaggtatgaatctactgaacgctgcgaacccggtgcaaatcggtcatctcagcaaggcaagtagtcccttccttcacctagatggtgggcgagcagaggtggacatcaaggtgcttgggtctcca

SEQ ID NO: 100757 - DNA, 2770 bp, Zea Mays
ttagtcgaaagaagaaatagaatctcgattaaaccaacaatcctggttcttgagcaataactaaatacaaatttgagtgctccactgagcgggaaaaaaacacgtacccggaacacgtcgatgaggggcaggtcgaggagcgcggggttgttgactctgacgccggcgacggactccagcatgcctaggcgctccagcgaccaccgcagcggcagcgaagctagcgtggcgttggtgacgaggtaggtcggccaggtgagcctgacgcagttgaaccccatcgctgccacgcgcgctgcgatgtccgacacggggcgccgcgccaggccctccgcggctgcgggctccaggtgcgaagcccagttcgcgcacgccagcttcacgcgccgcccatccacacctacaatccaccgcgacgccgtcgagagcggcagcgccaggagcgaggccgctgccgtgagcgcgggtaggaggagaagggcgaggaggagtggagaggtggaggccgccatggtgattagttgttgtgcggagacgccggagactagaggcggatccggaatttaaatggaggacaggtatctctatcgtgtgggcccagatatcagtgtctcacgcagaggcagagaccacttggataataataaccaacgataagcagttaaacccaagcaaggcatctcgaatggccaccgccgtccccacggcggctctccccacaccgggccgcgccgggccggcgccgccacgtgctccactccgcgcagatcctagctacttgccacagctccacgcggcactaatcaagtccggagagctcaccgggtcggccaaatccttccactccctcctcgaggcggccgcggcctctccgacgctgctcccctacgcggtcagcctgttccgcttgggcccgcggccgcccctttcgacgccgtgctacaacgtccttatgcgagctttccttcacgcgggccacccggaggacgccctgcacctgttcatcgaaatgctccacgcggcttcggcctgccccgctgatcagcacaccgccgcctgtgccctcaagtcgtgctccaggatgtgcgccctggacgtagggcgcggcgtccaggcgtacgccgtcaagcgtgggctcgtggccgatcggttcgttctgagcagcttgattcatatgtacgcgagctgtggcgacgttgcggcggcacggcttgtgttcgacgcggcggaggagagtggcgtggtgatgtggaacgcgatcgtcgcggcgtacttgaagaacggagattggatggaggtggtggagatgtttaagggcatgcttgaggttggtgtggcctttgatgaggtcacattggtgagtgtggtcacggcatgcggaaggataggtgacgcgaagcttggcaagtgggttgctggacatgtggacgaggaggggctggcgaggaacccgaaattggtgaccgcactgatggacatgtatgccaagtgcggagagattggtaaggcacggaggctgttcgatgggatgcagtccagggatgtggttgcttggagcgcaatgatctcaggctacacgcaggcagatcaatgccgagaggcgctcggtcttttcagtgagatgcagcttgcaagagttgagccgaacgatgtgaccatggtaagcgtgctctctgcctgtgctgtcctgggtgcacttgagacagggaagtgggtgcattcctacgtaagaaggaagcgcctatctctgacaactattctcggcactgcactggtggacttctacgcgaagtgtggatgcattgacgatgcggttgaagcgtttgagtcaatgcctgtgaagaactcgtggacgtggacagccttgataaagggcatggcaaccaatgggaggggcagggaagcgttggaactcttctcgtcaatgcgcgaggccgggatcgagcccacagacgtgacattcattggtgtcctcatggcttgcagccacagctgcctggttgaagagggccgccggcattttgatagcatggctcgggactatggcattaagccaagggttgagcactatggatgtatggtggatctgttggggcgggccggtttggtagatgaggcgtaccagtttatcaggaccatgcccatcgagccaaacgctgttatctggagggcgctactgtcttcctgcgcagttcacagaaatgttgggatcggggaagaagcactgaagcagatcatctccttgaaccccagtcacagtggtgattacgtgctcctgtcaaacatatatgcatcggcgggacagtggaaggacgcagcgatggttcgaaaggaaatgaaggatagagggatcgagaaaactccaggctgcagcctcattgagctggacggggttgtcttcgagttctttgccgaagacagcgaccaccccgagttgagggagatataccagaaagtcgaggagatgattggcaggatcaaggtggctgggtatgtcccaaacacagctgatgtgaggctagaggttgaagagcgtgagaaggaagtatccgtttcccatcacagcgagaagctggccattgcgtttggcctcatgaagctggaccctggtgcaacaattcgcttgtcgaagaatctaagggtctgcgcagactgccactcggccacaaagttgatttcgaaggtgtacgatagggagattgttgttcgagaccggaatatatttcatcattttaaggatggtacttgctcctgcaatgattactggtga

SEQ ID NO: 100758 - DNA, 910 bp, Zea Mays
attttcttgagttgtgcacttaactggaagacttgaaatattaagggttgaaaactattcaaactcaaagatgaaatttgaaaatttaaaataaggaaaaggtaaaaaaactaggaaattataaaagaaaagggagtagttctggcactgggccgcgtcccctcattttccccttcatcagccggatgggccaaatacctcctagtggcccatcagctcgccttgtattttttttcctgtgcggctgacacggtgggacctgatcgaagggcgcccatcatggcttggaaaccagctcactcgcgtcgttgtcccgctgctgctggtgggccaccttggcagggtcgtcatcttccttgaaccgaacaccggagaaacgcaacagaataccgtattgcgcgctgagatcccgattcaccgcaacaacctcgtcgatccggccggaaccaaactgctgcttcccctacgcatataagtgaatgtctgtaaccccattgtcatgcacggtcgatagaatccgcgggaatgcgagaacctgagagcgcgtaacgaagaagagagagaagagattgggggatcactgcttggtgttccttctgcgcgcgcagacggatctgtgggcttcatcgggtccccgggaatgtactcatagcttcgggaggaaggattggacctgggtgtgccctgagatgctcatcgtcgtgagactgtcgccgccggtagctccacgccgtgggcagctccactgccccgccatgtacggtaagaccagtgatctcaagttcaccatagcctctttttcgggtagagacttctgggataaagtatcgcgctccaggaggctggtctggtggggctcatcggtcgccgccgtgggagttttggcgccgccgcctgtgctgactggggg

SEQ ID NO: 100759 - DNA, 483 bp, Zea Mays
tcatcaattgttgataccagtgatagtgaaccagaagtcactcagatcgatgttaaggaagtgggcaatgagggtacattggagaaagaagagaaagctactgatggccttaagactgatgggtctgggattgttaataccatggttgaagttcaactgatggagaaaaactctaacaatgccactctggatggtgttatacatgccaattcagagattgccgttgaaagctattttttagttctggatgcaaaaaattcattagaaagcatagaagatcgacgcaaacaaaaaactgatacaatttctgtgaaagaacaagaccaacttgaggaggctcagggatcgttaaaaagtgatgtcaagactggccagtcaaaagaagctaggttagctcgggtttgtgctggactttcatcctgcctccaagagtataagtctaaaaatgcacagctggaggaacttcttgttcaagaggtctag

SEQ ID NO: 100760 - DNA, 100 bp, Zea Mays
ggcatgcatgatgagccgccgagacggccaggatcagtatggccttgctgccctcaaaaccaagtattagcactactgggttttgtaaacaagtacacac

SEQ ID NO: 100761 - DNA, 1955 bp, Zea Mays
tggaggaagcgcacgttacccggccgttcatcacatcgcacattgacacgacagcgcctccagcttccgacgggttacatcaggtcgatctggatcgtccaaggtctctcctcagtcctcagacacgtgctgccgcgcccccgggccgtcggatgcccggtgccggggcacccgcgccttgtcttgtacaaatagactagcattgcagtcgagcctcggctgacccgtcgctcactcattctactcgacgtctcgagctgtgtgccacgcacaaccagaccacagggagtcagggacagagtggtagcccgtcacggtccaaatgaagcttcttccgcgcctctgcatggccaccggcaccggcaccggcgacggagacggggaggggagcgcaagcagcagcaccaagcgggccacagcggtgtcgtcctcctcgtcgaccgtctccacgtcgtccgcggcggcggcggccgtgtcggagtcgtcgtcctcgacgtccctcccttcgctctcctcagcgacgagcgctagcctcgccgcgtcgttcgtccacgtcgccacgctcctccctctgtccgcgcgcccctcgccgtgcgccgccgtcgtcgcggcgacggggggctccctgcccggcctcgtcgtcgcgcggccgtcgtgcgtggcgctccacgacctgtcgacgctggaggcgacctccacctccgacgccgccgcgggcgcgggcgcgggctcggtcaagtgcgtggcgcgcctccccggcggcggcggcggcggcgcggccgtgacggggcaccaggacgggcgcctgcgcctgtggcgggtgtcctcgcgatcgcctggcaggatccgcctcgccgcggcgctccccacggtctccgaccgcctccgccggttccccgtcccgtccaaccacgtcgccgtccgccggcaccaccggcggctctggatcgagcacgccgacgccgtgtcgggcgtggcggcgtccgccgacgggcgcctcctcttctccgtgtcctgggacaagacgctcaaggtgtgggcggcgccgtcgctgcggtgcctgcagtcgctggcggcgcacgacgacgccgtgaacgccgtggctgtggcgcccgacggcaccgtgtacacgggctccgccgacaggcgcgtccgcgtgtgggcgccccgtccccgcccccgccccgccgcgcgcggcaagaagcagcccgtctaccacctggtcgccacgctgtcccgccacacggcggcggtgaacgccctggccgtcgggcgcgggggccaggcgctgtactcgggcggcaacgaccgctgcgtcctggtgtgggagcgcgaggacagcgccagccacatggccgcggtcggggccctcaggggccaccgcaaggccgtgctctccgtcgcgtgcgcgcccggcgggctggtcgtcagcgggtccgcggaccagacggtgcgggcctggcgccgcgccgcggacggcaggggttacgcctgcgtcgccgtgatcgacggccacggcaccgccgtccggtcggtcgcggcggcgcccctgccggtcctccagaagcggtcccgggcaggcggtgtagacggcggcggcggcgacgaggagtggagggtgtgcagcgcgagcttcgacggccaggtgcgggtctggtcgctgcgcgtgtcgtgtttgtagccggtacgagttggcgcgcagaagagagctagtacatttttttatgtttttccagatttgttgagaaaattatacattttgtttttcgtttttagtttttttgaccgacaaaagtgggcaaggcagcaaggaaacatctcggtccggttgcttgtttaagtcgatgttctctgctgcggatcgttcctttttccaaagcagaaggaaagaactattcgacggccaacttgaccagtcaccatttttacgtaaaaatgtaaagtgtgaaacgcac

SEQ ID NO: 100762 - DNA, 108 bp, Zea Mays
cgacattcacagctcttccagttttttcttatgaccacttccatatcgattcaacatctatttgaaggactggtcagattagaaaacattcaaaaaaataaaaggaaa

SEQ ID NO: 100763 - DNA, 741 bp, Zea Mays
atggataaagcaaaggaaggcggtgttcatgtctcatccagttcaaatgaagtggcaggaaccattccagatacgaatggaggcgatcatcatatacctggaagctcttttcatgtctatgacatgtctgatagtcaaatgaagctaaatgattttatttcaagccctgttgttgaggatggtcaagatgaatttgagaagggtgactttatagtggacgacgaggaagaagtggaaggagaggaagaggaacaaaagagtgacgatgagaaaataaatgtagcagagacaagatatctgaatgctagcaatcgggagcttggtgatcattttcagacaaaacgtgatggtaaaaatggtgttgatgcatcaattgaaaagagaacactcaagctacttcagtttacctttcaagagttgaaatccgccacgcttaacttcaggccagacaatattcttggggagggtgggttcgattatgtattcaaggggtggactgagccaaacagcactgctcctgcaaaacctggcacgggggttactgtggcagtcaaaagtttgaagccagatgcacttcaaggtcatagagaatgggtggagtacaacgcaaaactatctgatttcggtttagcaaaagttggtcatcagggtgataaaacttatgtatctactcgggttgttggcacccatggttatgctgcaccagagtatgtaatgacagtaaaggttgtaaggctctag

SEQ ID NO: 100764 - DNA, 1236 bp, Zea Mays
aaattctcaatctggttcgggctcctggatcggacccgaaaaactggtgagatttgacctacagcggagatggccaccggcgacctgcgcagcctcgccaccgtcgcggccgcggtgatcgcgtgcatgggctacgcccgcttcgccgcgcggcgactccgcccggtcctgtcccgccttgcagcgttcctcccggtgctcgccgtcttgcctttcctcccgctcgccttccgtgcgctccacccgcgcggcatctccggcttcttcctcgcctgggccgccgaattcaaactcctgctcctcgcatgcggccagcgcccgctcgatccgagcctcccgctgccctccttcaccgccatcgccaccttccccgtcacactacgggatcccaagagctccgcctcgaggccgggcctggggctcgtggagtccgcctccatggccgcgctgctcgcggccatcgtgtcgctgtaccggtacgaggagcggatgaacggttacgtcctgctcacgctctactccgtgcacgtgtacctcgcgctcgagctcgtcctggcggcggccgcggcggcgtcgcgcgcgctgatgggcctggaactggagccccagttcgaccggccctacctctcgtcctcgctgcgggacttctggggccggaggtggaacctctccgttccggcgctgctccgccagtgcgtgttccgccccgtgcgcgcgcgcctcggcgccgccgcgggtgtgctagctgcgttcgtcgtctcgggcctcatgcacgaggccatgttctcctacctcacgctgctgcggccgacgggggaggcggccgcgttcttcacgctgcacggggcgtgcgcggtggcggaggggtggtgggccgcgcacgaggggtggccgcggccgccgcgcgccatggccacgccgctgacactggcgttcgtgggcgtgacggccttctggctcttctttcctccgctcacaaggcccggcgcggacaagcaggccatcgcggagtgcgaggccatggtcgcttttctgcgggacaccgcagcttgggcggtcgactccgcctggtcagtcttgtcaagctggtcgtaaattgtggtccgccgtccgcaacaggcgtgcgctgcgcctgcgcctgcgcctgcgcgtgccgtgtgctttgtcgccgtggcatctgtttgcacttttgttttgggatggtgataatttcagaaatattctagatgaggaaaa

SEQ ID NO: 100765 - DNA, 2247 bp, Zea Mays
atctgacaggtaggctctttctactcccgatccatccgcagcgggcggcggccgcctcctcggctcctcccccgcggccgagctcgctcctcgccccgccgcctcaactcgtctcgcccgcgaccgatttcctccctccgctcgccgcgccgcaacccggagataaggccgcgctcgatcgagaaccacctggggtccagcgtcatcgcgaccagctccggcgaggcgtccgccctttgcagcccggtgtctctgcgaccggcacacagctccagagggtgtcttggactgaagaagatatcagcaaagcttgaaaaggactgagagatgtcattgggctatgctgagaagctgtcctaccgggaggatgtgggtactgtgggaatgcctgagatctttgagacccctgagctagtccagaataagatagaagagcttgctgccatggtgcaaaagagtaagcatttagtggtgtttaccggggcagggatatcaacttcatcaggcatacctgattttcgagggcccatgggtgtctggaccttgcagcgtgcaggaaaaggtattcctaatgcatcacttcccttccatcatgctgttccaagcttgacacatatggcactagtcgaacttgaaagagcaggatttctaaagtttgtcataagccagaatgttgacagcctacatctccgttctggtttcccaagggagaagttggctgaattacatggcaattctttcaaggagatctgcccatgctgtaaaactgagtaccttcgtgattttgagattgagacaattggactgaaggatactccaagacgttgttctgataagaattgtggagctagattaaaggatacagttcttgactgggatgatgctttaccccctgaggagatgaatttggccacggagcattgtcgatcagctgatcttgttctatgtctaggaactagtttgcagattactcctgcatgtaatatgcctctgatgtcaatcaagaatggggggagggtggccattgtaaatcttcaggcaactccaaaggataaaaaggcaagccttgtcatccatggacttgttgataaggtcattgctggagtcatgagcaaagaaatgtgttagatggactcttcgagtaacaagtattcatggcctccgagcaccattgccatttcttcagtctgtcaaggtttcctttccagaaagacctgatctgaagtctgtagtgcttaaagagcaaccattctctttgcagagggaaacatcgatgaacaaaccatttttcatgctgttgacattaaatttcagtgatggttgcagctgtttgagctcctcaattggatggcctgttgattttcagaagcgaaaagacagcttcgtcagagatagagctctagtcctacgggagttgtactctgctgcacagcgcgagtcttgcattgggcaacaagaaattctggaaagagagaacctaccaagagctgagacgtctattcatggaatcgtgacaaacatcgttaggtatgacactgaagatgaaaagttggctccacccaagaatgatttgatgaatcacagccgcagcaaccctgcaaaacggcacgtggaaggcactgattgccactcgtcattgccaaagaaactgaagtactttttgaaagacaagaagctgaactgctaaaagtgtaaaaccgtagaaggtagatagagaatgctgtaggtttgtttattttggttattagacgagttatacgtagcatagatgcatgggaagttcgcatgctaaggttgaactcttctgctgcataggaaagttggctgacttcttatattatgcgagcctagcttaggtacctcctgtggggagaagcgattgcaatacatggtagcatgttgtagagctcctcaccccagttagtcagtgactgatgatggtatcctcttaccagtcctctggtggtatcatcttttgttcacggaggtcgatgaagtactgcctccgataaaaaaaagacgcttttgacattattgctccccaaattcttattttgacggctatactttgcccagcgagtaatatctaataaatatacgttttaacgcaattacatttttttttgtccaagaaaaatatttttggaagctgttgaaggtcaagtgtcaaaattttggatagacgttgacgtagtaggttgagagcaggtacttgcgtgcttcccctgtgaagttttgtttcataat

SEQ ID NO: 100766 - DNA, 2186 bp, Zea Mays
atctgacaggtaggctctttctactcccgatccatccgcagcgggcggcggccgcctcctcggctcctcccccgcggccgagctcgctcctcgccccgccgcctcaactcgtctcgcccgcgaccgatttcctccctccgctcgccgcgccgcaacccggagataaggccgcgctcgatcgagaaccacctggggtccagcgtcatcgcgaccagctccggcgaggcgtccgccctttgcagcccggtgtctctgcgaccggcacacagctccagagggtgtcttggactgaagaagatatcagcaaagcttgaaaaggactgagagatgtcattgggctatgctgagaagctgtcctaccgggaggatgtgggtactgtgggaatgcctgagatctttgagacccctgagctagtccagaataagatagaagagcttgctgccatggtgcaaaagagtaagcatttagtggtgtttaccggggcagggatatcaacttcatcaggcatacctgattttcgagggcccatgggtgtctggaccttgcagcgtgcaggaaaaggtattcctaatgcatcacttcccttccatcatgctgttccaagcttgacacatatggcactagtcgaacttgaaagagcaggatttctaaagtttgtcataagccagaatgttgacagcctacatctccgttctggtttcccaagggagaagttggctgaattacatggcaattctttcaaggagatctgcccatgctgtaaaactgagtaccttcgtgattttgagattgagacaattggactgaaggatactccaagacgttgttctgataagaattgtggagctagattaaaggatacagttcttgactgggatgatgctttaccccctgaggagatgaatttggccacggagcattgtcgatcagctgatcttgttctatgtctaggaactagtttgcagattactcctgcatgtaatatgcctctgatgtcaatcaagaatggggggagggtggccattgtaaatcttcaggcaactccaaaggataaaaaggcaagccttgtcatccatggacttgttgataaggtcattgctggagtcatgagcaagttgagtctgcgaattcctccatacatacgtactgactttgttcagctcactctcaggcactcactgaaaaagaaatgtgttagatggactcttcgagtaacaagtattcatggcctccgagcaccattgccatttcttcagtctgtcaaggtttcctttccagaaagacctgatctgaagtctgtagtgcttaaagagcaaccattctctttgcagagggaaacatcgatgaacaaaccatttttcatgctgttgacattaaatttcagtgatggttgcagctgtttgagctcctcaattggatggcctgttgattttcagaagcgaaaagacagcttcgtcagagatagagctctagtcctacgggagttgtactctgctgcacagcgcgagtcttgcattgggcaacaagaaattctggaaagagagaacctaccaagagctgagacgtctattcatggaatcgtgacaaacatcgttaggtatgacactgaagatgaaaagttggctccacccaagaatgatttgatgaatcacagccgcagcaaccctgcaaaacggcacgtggaaggcactgattgccactcgtcattgccaaagaaactgaagtactttttgaaagacaagaagctgaactgctaaaagtgtaaaaccgtagaaggtagatagagaatgctgtaggtttgtttattttggttattagacgagttatacgtagcatagatgcatgggaagttcgcatgctaaggttgaactcttctgctgcataggaaagttggctgacttcttatattatgcgagcctagcttaggtacctcctgtggggagaagcgattgcaatacatggtagcatgttgtagagctcctcaccccagttagtcagtgactgatgatggtatcctcttaccagtcctctggtggtatcatcttttgttcacggaggtcgatgaagtactgcctccgataaaaaaaagacgcttttgacattattgctccccaaattcttattttgacggctatactttgcccagcgagtaatatctaataaatatacgttttaacgcaattac

SEQ ID NO: 100767 - DNA, 2144 bp, Zea Mays
atctgacaggtaggctctttctactcccgatccatccgcagcgggcggcggccgcctcctcggctcctcccccgcggccgagctcgctcctcgccccgccgcctcaactcgtctcgcccgcgaccgatttcctccctccgctcgccgcgccgcaacccggagataaggccgcgctcgatcgagaaccacctggggtccagcgtcatcgcgaccagctccggcgaggcgtccgccctttgcagcccggtgtctctgcgaccggcacacagctccagagggtgtcttggactgaagaagatatcagcaaagcttgaaaaggactgagagatgtcattgggctatgctgagaagctgtcctaccgggaggatgtgggtactgtgggaatgcctgagatctttgagacccctgagctagtccagaataagatagaagagcttgctgccatggtgcaaaagagtaagcatttagtggtgtttaccggggcagggatatcaacttcatcaggcatacctgattttcgagggcccatgggtgtctggaccttgcagcgtgcaggaaaaggtattcctaatgcatcacttcccttccatcatgctgttccaagcttgacacatatggcactagtcgaacttgaaagagcaggatttctaaagtttgtcataagccagaatgttgacagcctacatctccgttctggtttcccaagggagaagttggctgaattacatggcaattctttcaaggagatctgcccatgctgtaaaactgagtaccttcgtgattttgagattgagacaattggactgaaggatactccaagacgttgttctgataagaattgtggagctagattaaaggatacagttcttgactgggatgatgctttaccccctgaggagatgaatttggccacggagcattgtcgatcagctgatcttgttctatgtctaggaactagtttgcagattactcctgcatgtaatatgcctctgatgtcaatcaagaatggggggagggtggccattgtaaatcttcaggcaactccaaaggataaaaaggcaagccttgtcatccatggacttgttgataaggtcattgctggagtcatgagcaagttgagtctgcgaattcctccatacatacagaaatgtgttagatggactcttcgagtaacaagtattcatggcctccgagcaccattgccatttcttcagtctgtcaaggtttcctttccagaaagacctgatctgaagtctgtagtgcttaaagagcaaccattctctttgcagagggaaacatcgatgaacaaaccatttttcatgctgttgacattaaatttcagtgatggttgcagctgtttgagctcctcaattggatggcctgttgattttcagaagcgaaaagacagcttcgtcagagatagagctctagtcctacgggagttgtactctgctgcacagcgcgagtcttgcattgggcaacaagaaattctggaaagagagaacctaccaagagctgagacgtctattcatggaatcgtgacaaacatcgttaggtatgacactgaagatgaaaagttggctccacccaagaatgatttgatgaatcacagccgcagcaaccctgcaaaacggcacgtggaaggcactgattgccactcgtcattgccaaagaaactgaagtactttttgaaagacaagaagctgaactgctaaaagtgtaaaaccgtagaaggtagatagagaatgctgtaggtttgtttattttggttattagacgagttatacgtagcatagatgcatgggaagttcgcatgctaaggttgaactcttctgctgcataggaaagttggctgacttcttatattatgcgagcctagcttaggtacctcctgtggggagaagcgattgcaatacatggtagcatgttgtagagctcctcaccccagttagtcagtgactgatgatggtatcctcttaccagtcctctggtggtatcatcttttgttcacggaggtcgatgaagtactgcctccgataaaaaaaagacgcttttgacattattgctccccaaattcttattttgacggctatactttgcccagcgagtaatatctaataaatatacgttttaacgcaattac

SEQ ID NO: 100768 - DNA, 1607 bp, Zea Mays
gtcttgcaaaccatttgtgttgtaataaatttttagtagggttctatacttttatgtctctaaaaggtgttggtggcttaatccgcaacaatccactggctttggggttgcattttcggttttcaggtatatgtaggagcaatgtgtgttacctgagtgtttttcctgttggaaaagattgttcatcactgttaagttctacttgtcgtcgactctgttgcttctcaagtatcagaattctagtataatggcatgcttagtgaaatatttatttagaagtgtcattggttttcaggtatgagtagcatcactacttgagtgtttttccttgtggcttaagattatccattggtacaagttctgtttgtagttgactgtgttgctccaaaggatcagaacctagaataccacatgtttagtaatatttttaggagtatcaatctattttctgtggattctgtatatgttcccttttaagaagcgatgttttttgcgtgagctggtatgctgcgccaagtagtagatggacttgtgtcattttagtgatggttgctgaatgccatcttatatacaacagcaaaacctttttagtcccaggcaagttggggtaggctagagttgaaacccaacagaagccacaaatcaaggtttaggaataccatcttatgtattattggaatttatgatttcatcaatggtgtcagattatcgaacacatttttttgcaggatgctttaccccctgaggagatgaatttggccacggagcattgtcgatcagctgatcttgttctatgtctaggaactagtttgcagattactcctgcatgtaatatgcctctgatgtcaatcaagaatggggggagggtggccattgtaaatcttcaggcaactccaaaggataaaaaggcaagccttgtcatccatggacttgttgataaggtcattgctggagtcatgagcaagttgagtctgcgaattcctccatacatacgtactgactttgttcagctcactctcaggcactcactgaaaaagaaatgtgttagatggactcttcgagtaacaagtattcatggcctccgagcaccattgccatttcttcagtctgtcaaggtttcctttccagaaagacctgatctgaagtctgtagtgcttaaagagcaaccattctctttgcagagggaaacatcgatgaacaaaccatttttcatgctgttgacattaaatttcagtgatggttgcagctgtttgagctcctcaattggatggcctgttgattttcagaagcgaaaagacagcttcgtcagagatagagctctagtcctacgggagttgtactctgctgcacagcgcgagtcttgcattgggcaacaagaaattctggaaagagagaacctaccaagagctgagacgtctattcatggaatcgtgacaaacatcgttaggtatgacactgaagatgaaaagttggctccacccaagaatgatttgatgaatcacagccgcagcaaccctgcaaaacggcacgtggaaggcactgattgccactcgtcattgccaaagaaactgaagtactttttgaaagacaagaagctgaactgctaa

SEQ ID NO: 100769 - DNA, 1287 bp, Zea Mays
aaaacatagttttcaataattaatacctgctattccccataggaggaaactactttcctgatgaacaattattgaataaacactatcagttttataattttacatgttatagcgtgcaggaaaaggtattcctaatgcatcacttcccttccatcatgctgttccaagcttgacacatatggcactagtcgaacttgaaagagcaggatttctaaagtttgtcataagccagaatgttgacagcctacatctccgttctggtttcccaagggagaagttggctgaattacatggcaattctttcaaggagatctgcccatgctgtaaaactgagtaccttcgtgattttgagattgagacaattggactgaaggatactccaagacgttgttctgataagaattgtggagctagattaaaggatacagttcttgactgggatgatgctttaccccctgaggagatgaatttggccacggagcattgtcgatcagctgatcttgttctatgtctaggaactagtttgcagattactcctgcatgtaatatgcctctgatgtcaatcaagaatggggggagggtggccattgtaaatcttcaggcaactccaaaggataaaaaggcaagccttgtcatccatggacttgttgataaggtcattgctggagtcatgagcaagttgagtctgcgaattcctccatacatacgtactgactttgttcagctcactctcaggcactcactgaaaaagaaatgtgttagatggactcttcgagtaacaagtattcatggcctccgagcaccattgccatttcttcagtctgtcaaggtttcctttccagaaagacctgatctgaagtctgtagtgcttaaagagcaaccattctctttgcagagggaaacatcgatgaacaaaccatttttcatgctgttgacattaaatttcagtgatggttgcagctgtttgagctcctcaattggatggcctgttgattttcagaagcgaaaagacagcttcgtcagagatagagctctagtcctacgggagttgtactctgctgcacagcgcgagtcttgcattgggcaacaagaaattctggaaagagagaacctaccaagagctgagacgtctattcatggaatcgtgacaaacatcgttaggtatgacactgaagatgaaaagttggctccacccaagaatgatttgatgaatcacagccgcagcaaccctgcaaaacggcacgtggaaggcactgattgccactcgtcattgccaaagaaactgaa

SEQ ID NO: 100770 - DNA, 735 bp, Zea Mays
atctgacaggtaggctctttctactcccgatccatccgcagcgggcggcggccgcctcctcggctcctcccccgcggccgagctcgctcctcgccccgccgcctcaactcgtctcgcccgcgaccgatttcctccctccgctcgccgcgccgcaacccggagataaggccgcgctcgatcgagaaccacctggggtccagcgtcatcgcgaccagctccggcgaggcgtccgccctttgcagcccggtgtctctgcgaccggcacacagctccagagggtgtcttggactgaagaagatatcagcaaagcttgaaaaggactgagagatgtcattgggctatgctgagaagctgtcctaccgggaggatgtgggtactgtgggaatgcctgagatctttgagacccctgagctagtccagaataaggtttatctctggtctatttaaatttgtttattagatacaaatgcttcaatctgccttgaagccagcaaaatcctcctagtgattagggctgtggtagattgggctgatctgtctatcagttggccgctccctattttctttttggcagcttgttaagaggataagttttatttctggttgctgtcatggtctagtttttttctttgtctgtttttttgccttgtttgggcattgtatttggtccattttggacttttctttctcttaatacaatgatgcgcagctctcctgcgcattcgagaaaaaaga

SEQ ID NO: 100771 - DNA, 125 bp, Zea Mays
ggtttatgaaaactaagctggttcgaaacataccagtttatgtcttagtttatagaaattggattcacagtttcttaaaaaccatgaaactagcatgtagcctctcctagctaaaaaataaaaaa

SEQ ID NO: 100772 - DNA, 1017 bp, Zea Mays
atggcagctctcgcgccgtggatcctacggcggcgacccgtccgctctgtcgcttctctggtctccattcgtgattcatggcatcgaaggtgtgggtcctcttcctcatatccttcagcatcgttcaagtgtttgtggggatggtttggaccagaggcacacgggcggaggaggccgtggtttcagcagcccgtgaggtgcgggagcacgacgatcacacttgatacagatggcaagtttgcgaggtttggagtcggcgatatgggtgtcaccaagcagaagtggaggcagcagccgcctccaaagaagaagatgtcgagaaaggccaaggtcaaccagctcaagtggtaccgcctgaaggccaagaagaagatgaagtcacccaaccccgaagttaggatcagatacaagcttgaaaaggctaagaggaaggaggaatggttgattgagaagctgaggaagtatgaggtcccgaggacaccggagccagttcatgaccctgagattcttactgaggaggaaaagttttatctcaagcgaacgggggagaagaagaagaattatgttcctgttgggaggagaggggtatttggtggtgtggttctcaacatgcacctccattggaagaagcatgagaccgtgaaggtggtttgcaagccttgtcggcctggccaagtttacgagtatgctgaggaattgacaaggctcagcaaaggcacagtcattgatattaaacctaataatacgattatgttttatcgcgggaagaactatgtgcaaccaaaggtgatgtcacctcctgaaactctttcgaagcagaaggccttagagaaatatagatatctacaatcccttgagcataccagccagtttattgagaagctggagaaggagcttgaagattacaagaagcatgttgctttattcaagaaccataataagggggttgctattgagaaaatcagcaatgaagataccactgttgatgatcctgcaactacctcagattctaaatga

SEQ ID NO: 100773 - DNA, 1248 bp, Zea Mays
ccgaggccggccggggagggggacaggacggaggtacggtattaaaactcgcaaccctgcagtgtgcctgccgccgcctagagccaaatctcctgtgtcttttgacttgcgagctgcctttgacgagccttgccggttgcctctatatatgcacgcacacgctcgcagatgcaaggaggggtaggtgtgggagtgtggtgagaacgaacgcaggtgaggtgagatagagaagaagaatcagcagcagctagcggcagaagcatggtgtcacttgggattgcgaggctggtcgccttcgtgctcctggtagtcttagtcttcggttcatcgctgcatcaacaagagggagctggtgctactaggctgcacgagagaaggcagcagcacgcgcagcagtgggcggaggagaggaaccagctgaggtcctacatgaccatggactacgccccgtggcgccgccgcgtgcccaagcacaactgacccagctactagcacagggcgcccaggcagatctcggaaagccagatgcatgcttcgcgctggaagtcagtcagtccattgttcaggctcctccagcacggaggaaagcgccaaggacatcagcaccggcagcagagcatccatcgatgcacgcgtgcatgacgacgttgagaggccgagctttctgacgctctcagtctcagctgactgcccgttcttgtggctccagcctccagcacaagcagcatctcccggagcaagcatgatggcagacagggagagaagttgatatagtaggtgcggttcctttttctttctttcgttgtagtcgtatgtgtatctacgtgctgcccacagcgtgcagatgtacgcacgcagatttttccccctgatcacctagtggtgtcgctaagataaatatatatatatacgcagtttatttatagtactagcagtactgatcagtgtcgcgtcttactcagtttctgtagtaataagagtggtgtggtcttgtggtttggtttagctagagtttctgcttaattcttctgtaagtgcaataggatggactactagagtggaaagttcagactcggaaatgcgtgtatgtaccgagtactgaacatgtcggccataatgacggaatcagtacgctgaaggagcatttgcaacatcatatatatgactctggccatttccgtcggttctttgttttccttcaactggaggacgacatcccatcagcttatttttcttgccctcttcttt

SEQ ID NO: 100774 - DNA, 219 bp, Zea Mays
atggtgtcacttgggattgcgaggctggtcgccttcgtgctcctggtagtcttagtcttcggttcatcgctgcatcaacaagagggagctggtgctactaggctgcacgagagaaggcagcagcacgcgcagcagtgggcggaggagaggaaccagctgaggtcctacatgaccatggactacgccccgtggcgccgccgcgtgcccaagcacaactga

SEQ ID NO: 100775 - DNA, 222 bp, Zea Mays
atggggctggcggagctagggggcggcggcgggcggcgctacgggggcggcggcgggcggcgctacgacccggggcggtggcggttgggggcggcgctcccggggcggcggcgggcgcgctctaggccgcgggcgggcggcggtggtgagcggcggccggcgtcgagaggtggtgagcggcggcggcgtgaaaacgacagaggcaagcgagcgagaaaatga

SEQ ID NO: 100776 - DNA, 878 bp, Zea Mays
agcacagaatcaaaaatatctgcctgcctacctaccgatggccgccgcgttgtagttgtagtgtaacctagccacacgacgcatccgcggttcatcggcctcgcaggaaacgagcgtcgagcaaaaggtcgaattctcaactctcaagcaccagcaggaatcgagcgagcgagcgagcagtgtccgccccccatggccatggtcgcgtccacctccttcgcgtaccacaagccgcgtttcgcggtggtgtgcaggaagaacagggacggccgggacagggagcgggacggcaaggagcacaagcaccccttcaaggtcgtcgagatcacgccgcctccgcggtgcctcggcgtccgctgcttccccaccaacatccactgcggcgagagcgtgacgatcgaggggcaggcgtacacggtgtcggcggtgacgcaccggtaccagctgcgcaaggggcggtacgagccgagcgagaagcgcctcgacgtcctctccaccggcagatacatcctcaacctctacctccagaacctgctcgaccagtcctagctaccatatctgtatctgtactgtacatcagcatcgcttcactctgtatagatatacatacatatatatgttagctagtagcatcgaacacttgtcccggtgggtggcggacggagatagtgtttccctgcgtgctgctctgtgtaaactgaaaaatgcgagatgaggcataaagttcagtgaaaggttgcatacattttcttgaagaaaaaaaaagttcagtaaacgagtttggattgagtgagattggatgagtttgaatcctaaacgggctcgttcggttagctttcaattcatgtggattgagtgagattggatgagtttgaatc

SEQ ID NO: 100777 - DNA, 1065 bp, Zea Mays
agcacagaatcaaaaatatctgcctgcctacctaccgatggccgccgcgttgtagttgtagtgtaacctagccacacgacgcatccgcggttcatcggcctcgcaggaaacgagcgtcgagcaaaaggtcgaattctcaactctcaagcaccagcaggaatcgagcgagcgagcgagcagtgtccgccccccatggccatggtcgcgtccacctccttcgcgtaccacaagccgcgtttcgcggtggtgtgcaggaagaacagggacggccgggacagggagcgggacggcaaggagcacaagcaccccttcaaggtcgtcgagatcacgccgcctccgcggtgcctcggcgtccgctgcttccccaccgtacgcgacgtctctctcccgatctgttttctttctgcgtgcccccagcctgcatggcaaattggcatgttcaagaagctgaatgcgctggcatgcgtgcggaaattcacgtctccttgctcagattctgagctcattctgaatggagtattattttctagagttccttctgctgaatattcagcagtaactctgctaaacgccgctgccggttcctagctaacggtgctgttgttcttggttatggacgacgacggacacggacacggacggacgactacggcgagcagaacatccactgcggcgagagcgtgacgatcgaggggcaggcgtacacggtgtcggcggtgacgcaccggtaccagctgcgcaaggggcggtacgagccgagcgagaagcgcctcgacgtcctctccaccggcagatacatcctcaacctctacctccagaacctgctcgaccagtcctagctaccatatctgtatctgtactgtacatcagcatcgcttcactctgtatagatatacatacatatatatgttagctagtagcatcgaacacttgtcccggtgggtggcggacggagatagtgtttccctgcgtgctgctctgtgtaaactgaaaaatgcgagatgaggcataaagttcagtgaaaggttgcatacattttcttgaagaaaaaaaaagttcagtaaa

SEQ ID NO: 100778 - DNA, 4943 bp, Zea Mays
cgcctttgcatctcctaaaacgtaccctgaccctcacggcttccctcgtctttgccctcgcctccctggtagcggcggccgcttgccccgctatgaccaccgccgccccgccgccgctgctaatggcacaccgcgaaggtggagacgtccccatctccctgttccttgacaccgatcttggcacccatctcgccctgctcgtcgccccggacaccgacatccgtggcctcaagtcgcaggtggctgtggaacacgctgtcgccttccccgacctcggccccgtcaccgtgaagtccttccaggtccggcggaagggtgtactgtatcgcctctctgattcaatgacagtgatgagtgccttcaccaaaatcaaaggtgggtgctttcttcatgtcaatatggcagaggctacagcagccacacactgctgccaagatgcgccagcaactgacactagaagattgaatggtgttagtcttggaatttatgaaaagaaccatgttcaggagctgcctgcagtggcaccagatgttgcttgtgatatgctccctagaggccttgaaggttgtaatgatgatgccgtgctgaatactgttcaaacacatgatgtgttgccaaattgtaccttggtgccatcctcatcacagctaaatactgaagtaccgaagaacaatgcagtgggtctggccagttatactgaagcaggaattgctcaagttattgacaaagcaaagagttacagtggccagataaaacatgctaatcaaactgaaggtgcttatattatttccacatcaaaggcatgtgttgataaatctttaaatgagagtaatatgtcacatgctgtggaggagctacatgcaagtcgagaccatggggttggtgatgatgtttctgataaaaagcaagtcatggtagaggagcaactgctggaagagatacaagcaaaggataatctttcacaagcaaaggagcacaaaaaatgtaggactagttcttttgacacatcatgtatggatctactggaaacaggcactacttctcttgtggaatctttaaacacttctaatcatcaagaagtccatgacaccttacatgaggagtccattcagctagaaaatccaagcactgttggaaagaagaagaaaaggaaaaggcgtcaattgtccccttcaaaatctgcttctgctcaagagacaacagaaccgtcagctacagcagttgatttattaatacccacaggtgaagttctgtctaataacagcccagggatacagatccataatatacatgcaatggataatctttcacaagaaaaggagcagaaaaaatctaggactagttctcctgacacatcaaataggcatttactggaaacaaaccctacttctcttagggaaactctaaacacttcaaatcatcaaggccatgacactttagatgaggagttcatccagccagaaaacccaagtgctgctggtaagaagaaaaagaaaaggcgtcaattggtcccttctaaatatgcttctgctcaaataacgacagaaccatcgtctggggcagccccagcggatttatcaaaatccacaggtgacaaagcatataatgctgaattgactagcaaaggtgaaactgtagttgaagcatctggtttgcctctttcatcatatgaacataatgatggaaaccaggggggcaaaagtgttaagtttgtgagcgatgatcaagcatctactgatttaatctctgaacaagagaagtttgatcatgctctcaagggatgtagggatcctttaattgcagatgacatttattctacaggtgaaaatgtagctattgaaggaaagactacaaaaggaagttgtgcccctttaaatggaggggacaggcatgaagaaataaaacacctcaatgagggatgtcataatgcaggtgtacctgaaacaagcaacatggagaaagatggcaaaagtacagatgtctctgacaagaggcaaacaagtcaaaatacctcgcaagtgaagaagcgcaagaaatcaaaggttggttctgttgacatgccttccgtggatgcttctggtgaaaaagatcatcggtatagtgaaaatgcgaccaaacaagatacagcttctactaaaagggagattgtccacgaaccttctatgcaacagatgtcaaacattgtgcatcagggggattcaaatgtaatagaaaatccaagtggtgatggaaagaaaaagaaaaaaagaagacaccattcagaatccttaaagggtatgaatcctagtcaagatctgaccaaatcttctggatttgtaacaaacgaaagctcgatacaatgcacaggtgctgctccaataaatgcaaagcaaacaaacttagtcattatagaaggagaaacagttactgggcacaggaagcttagtgaaaatctagatgtagcggcaacacatgttgttgatgaggtattggcagatctaagatctaaagacggcttaagtaaggatctggatgaaaatctattaccaggacaaactcacctaggcagcaatcagaatggaatagaagttcctgaatccattgctgttaaagttggtagtactactgcagcattacctccgaaatatcctgcaacagttcactctgcttctcctgttaactcacctagacaaaggaagtctaaggggaaaaaattgaaagtgctatccaccatggctgactcttctcatcaatcaagtggtgtacccgaagaagatgctaatagaaaattaaaagagtctgattctttgaggtttgctgataaaacaagtgatcatgaggatatagtaactgcaaatgtggttgctcaagctgatgaaaaacgcaaagccactaagcgtcaaagaaagaaaggttctgtaaagcaggtacttgatacattggacttgaaggaagtgaatgacacagaagaaaatttggttcagggaggttctgtagttgacactcccttgagcactgctgggaacgtagagcagaaagactggtcttctgagactttgagtcctaaagaacaagaaactaattgttctactcatgggctggatagtcacacagctaaggacagccaggatgagtatgtaactgacaccattgggacccatgataatgaaaatgctgcaggaaccccagccttgcatgtagttcagaaagatgccatggccctcaaatccgccagccctaattctcaaaaggagcaggaaacatctttgaactctgaactacaaagtcaggattgtcctctggaacatggttttagtgcagatttggtgaactccaggactgaaaagggagtcaggactacaagttctgctagtgctgttaaatctgattacaacaccatgtttcatcctgctaatggtagaatcaatgtccttgatcattttagccgcagcaatttgaatgatggttcatcaattgtcgcagaaagtaagcaaaacaatgaagatggaagtttaagggaagtgaagaataaaaagaagaaacgaaagcaaggtactggtagcgttgaaccaaatgatgttatagaatctcttccctcagagatagctagcttaactggtcattttggtaccagcaaagctgttgtgtcatctgttgcaacagaaaacatgaatggaggaaatgagaatgtgaataaaggcaaggagaagaagagaaagggcaaatctaatatggaagtacctactgctggaaaggaccatcctaattgtgatactcaattcattgatattggtacccaagaatcacttatttctattgtacaaaaagaaaggacaggtcaagacaatggaaaagagagcaacagtaaagctactcagaatgccagtataatgcaacatgaaccagaagatgccacttggaatcgtagccctgagaagaatcaccaccagagtgttgatgatgatcagaacaagttgctcactgaaaaggatcatgcacatataaataaagaagtgagaaaattcactcctcaaacaaaggcccatgctaagattagaaagcctgatgggtctactatcaaggaaaaggtggctccaaatcctaaacctgtaaccaaccttgtgaaggatttttccatgagcccacgagcatcaagtgacagcacagagggcatgccacaaagtgctaaccgatatagagttgcagtccggaaagtaccaagtaaaaggtatgaagagaccagtggaaactccaataaggcgagtaggaaagtaggctctggtgcaatattcaatgactctatcagcgaaggttctggtgatgaattggacaccaagactgtcatggaaagatcacctaataagtcatctacatctgctgattcaggtatttcatctgcagcctctggtgaaagcgaggttcctgatgatgatggcaccgtatcactatctcagaagagtttcaaaggtctgcacattagctccatcctccgtggctcccgtagctacaagaaggcactaaagaggcaaatggagctgctagacgacgacaccattgtgcctgatagccagcccgcggatggcctttggggctgaacatggttatcgtcaagagaagcgccgaccctgcttcatccttttttgccattgtccacctgatacgctggtgggctttataagttgtctaaaacacatgcccgaatgcgtgatgtcgctgatggcattgccatacgccacacgcagttcccttattttgtcgggcttaagctgtgatctgcctgaggatgaatcgatgatgttcatgatacagcttaccagctatatatatgtgttaatgtatgtaagaatgatacgcacgcttagtctctcacccatgagccatgggtccgttgagtcctgactgaccatcgccagaagttgtggtttgtgacaggaaattccatccttctggcttatctgttgtgt

SEQ ID NO: 100779 - DNA, 784 bp, Zea Mays
tcgtaccagagcttcatgatgaatttgctcttgatattgagaagtgccctctttgtccaaactacaaacttgtttatgattgcccatcaaaggagtgcaagaacagcagacatagtacttgcagagggtgtattgtttgcatctggagatgtttgctatgtgggagatgtatagacattgccaatgtgttccaagagtcgttttgtttggggaaactttgccgtgactgtgtcaaatatgaagacttgctccccacagaaaagtagatgttcgaatctgttatcttcattggatggatacagttttaacttttaacataacatttcttctgttgattgatgctcccatccatcagtatcttgactgagtatttctaacaaggaaaagaaaaaaaagaggtataccaatttgctatcggtgtagttgcaatgactgaaattgtttttgcttacaagaaaaagaaaaaaaacggtataaccagaagacgatcatggtttccctatcaaggtgtcagccgacaactaacaattgcggtatgtttccttttggaataatcaagtgctctgctccggagtttggacaacagtacaaacattctcccagcaggctgcttgatgctgcatcttcctggaacatcagaagttattgatttcatttgccctcaaaatatcagatgtatctatctgtccaatgttacctatctagctgtgtggctgtgtgctatgttacttgacaattgacaagttattggaataaataaagacaaacttctaacttaactaga

SEQ ID NO: 100780 - DNA, 100 bp, Zea Mays
ttacgactagctgatgatcctaagaagtgaaaacacctattgcctgttggacattgagtcctataagcaggtccagttgcaggtgtttacttctctacac

SEQ ID NO: 100781 - DNA, 1364 bp, Zea Mays
gcgcacatccattcagacatccacccaccagagccggtcgatccgttcgaaacgctccgggaaagattccacgacttgggacttctcacattcccacaccgcactgtgccactgccgccggcccgccgcactagccgttgcttctcccttcccgttcccaaggagttgtcctcgccggcggatccggggcgccgctgcaagaggaggaaggaggaggagaggataccagaatggcgtcgcgctcggcgtccaaggatatcatcacgctgcgaggctctgccgccatcgtcagcgagttcttcggtacgcacgcgcatcctctacaaccgcgctgtgtacccggaggagagcttcagcaaggtgaagaagtacgggcttaccatgctgctcacgcaggacgagggcgtgaagaacttcatcgccagcctcacctcccagctctcagaatggctggaggccgggaagctgcagcgtatcgtgctggtcataatgagcaaagccaccagcgaggtgctcgagcgctggaacttcaacatcgtcaccgacgccgaggtcgtcgagaagggggccatcaaggagaagagcgacaaggagatcatgagggagatccaggccatcatgcgccagatcgcgtcttgcatcacctacctcccctgcctcgacgagccatgcgtgttcgacgtgctggcctacacggacacggacgtcgacgctccgggcacctgggtcgagagtgacgccaagctcatcgacaacccgcagatggttaagctgcactccttcgacaccaagattcataaggtggacacgctggtgtcgtacaagaaggacgagtgggacgaggaggagtagagtttgcaccaaaagttaccctgctgctgctagagcttggcgtgaaggctgtgtgaatcgttcattcacgtctatcgtgtactgcactaatagtatactgctactttggggggaagaaaagtgtgagacgctcctaccatttagaatttcgagattgaaatgccggttttaatataacatgagtcagcgcctttaagatctggctgcgaatgctacagtattttgtctctatatattgcagtagattatatattgcagtagattgcagctgcagcagttcgaacagctgcagctgataacaactatcttgccgacttgaatgtcaatgccctggacacaaagtggaaattgagtaaacaagtacagtgttgcaagagtacatttgcttcacttgccacattcagatttactgcaaggaatggtagaacaagctccaattgcacatttttacaagtacaatattgcagggtacatttgcttcacttgccacattttacattagctggaggatc

SEQ ID NO: 100782 - DNA, 1322 bp, Zea Mays
cagtgcgcggcccccacacccacacgaccgttgggcgcgccggtccggcccacctttaaaagcccccgcaccagtccaccaccgtgcgcgcacatccattcagacatccacccaccagagccggtcgatccgttcgaaacgctccgggaaagattccacgacttgggacttctcacattcccacaccgcactgtgccactgccgccggcccgccgcactagccgttgcttctcccttcccgttcccaaggagttgtcctcgccggcggatccggggcgccgctgcaagaggaggaaggaggaggagaggataccagaatggcgtcgcgctcggcgtccaaggatatcatcacgctgcgaggctctgccgccatcgtcagcgagttcttcgggtacgcggcgaatagcatcctctacaaccgcgctgtgtacccggaggagagcttcagcaaggtgaagaagtacgggcttaccatgctgctcacgcaggacgagggcgtgaagaacttcatcgccagcctcacctcccagctctcagaatggctggaggccgggaagctgcagcgtatcgtgctggtcataatgagcaaagccaccagcgaggtgctcgagcgctggaacttcaacatcgtcaccgacgccgaggtcgtcgagaagggggccatcaaggagaagagcgacaaggagatcatgagggagatccaggccatcatgcgccagatcgcgtcttgcatcacctacctcccctgcctcgacgagccatgcgtgttcgacgtgctggcctacacggacacggacgtcgacgctccgggcacctgggtcgagagtgacgccaagctcatcgacaacccgcagatggttaagctgcactccttcgacaccaagattcataaggtggacacgctggtgtcgtacaagaaggacgagtgggacgaggaggagtagagtttgcaccaaaagttaccctgctgctgctagagcttggcgtgaaggctgtgtgaatcgttcattcacgtctatcgtgtactgcactaatagtatactgctactttggggggaagaaaagtgtgagacgctcctaccatttagaatttcgagattgaaatgccggttttaatataacatgagtcagcgcctttaagatctggctgcgaatgctacagtattttgtctctatatattgcagtagattatatattgcagtagattgcagctgcagcagttcgaacagctgcagctgataacaactatcttgccgacttgaatgtcaatgccctggacacaaagtggaaattgagtaaacaagtacagtgttgcaagagt

SEQ ID NO: 100783 - DNA, 1258 bp, Zea Mays
gcgcacatccattcagacatccacccaccagagccggtcgatccgttcgaaacgctccgggaaagattccacgacttgggacttctcacattcccacaccgcactgtgccactgccgccggcccgccgcactagccgttgcttctcccttcccgttcccaaggagttgtcctcgccggcggatccggggcgccgctgcaagaggaggaaggaggaggagaggataccagaatggcgtcgcgctcggcgtccaaggatatcatcacgctgcgaggctctgccgccatcgtcagcgagttcttcgggtacgcggcgaatagcatcctctacaaccgcgctgtgtacccggaggagagcttcagcaaggtgaagaagtacgggcttaccatgctgctcacgcaggacgagggcgtgaagaacttcatcgccagcctcacctcccagctctcagaatggctggaggccgggaagctgcagcgtatcgtgctggtcataatgagcaaagccaccagcgaggtgctcgagcgctggaacttcaacatcgtcaccgacgccgaggtcgtcgagaagggggccatcaaggagaagagcgacaaggagatcatgagggagatccaggccatcatgcgccagatcgcgtcttgcatcacctacctcccctgcctcgacgagccatgcgtgttcgacgtgctggcctacacggacacggacgtcgacgctccgggcacctgggtcgagagtgacgccaagctcatcgacaacccgcagatggttaagctgcactccttcgacaccaaggtatagcagagccgctctatctactcggtatcagtatcaccgatctggttctcgattcggttgctaattcacagttcctgtgctggtggagtggcagattcataaggtggacacgctggtgtcgtacaagaaggacgagtgggacgaggaggagtagagtttgcaccaaaagttaccctgctgctgctagagcttggcgtgaaggctgtgtgaatcgttcattcacgtctatcgtgtactgcactaatagtatactgctactttggggggaagaaaagtgtgagacgctcctaccatttagaatttcgagattgaaatgccggttttaatataacatgagtcagcgcctttaagatctggctgcgaatgctacagtattttgtctctatatattgcagtagattatatattgcagtagattgcagctgcagcagttcgaacagctgcagctgataacaact

SEQ ID NO: 100784 - DNA, 1050 bp, Zea Mays
gcacatccattcagacatccacccaccagagccggtcgatccgttcgaaacgctccgggaaagattccacgacttgggacttctcacattcccacaccgcactgtgccactgccgccggcccgccgcactagccgttgcttctcccttcccgttcccaaggagttgtcctcgccggcggatccggggcgccgctgcaagaggaggaaggaggaggagaggataccagaatggcgtcgcgctcggcgtccaaggatatcatcacgctgcgaggctctgccgccatcgtcagcgagttcttcggcatcctctacaaccgcgctgtgtacccggaggagagcttcagcaaggtgaagaagtacgggcttaccatgctgctcacgcaggacgagggcgtgaagaacttcatcgccagcctcacctcccagctctcagaatggctggaggccgggaagctgcagcgtatcgtgctggtcataatgagcaaagccaccagcgaggtgctcgagcgctggaacttcaacatcgtcaccgacgccgaggtcgtcgagaagggggccatcaaggagaagagcgacaaggagatcatgagggagatccaggccatcatgcgccagatcgcgtcttgcatcacctacctcccctgcctcgacgagccatgcgtgttcgacgtgctggcctacacggacacggacgtcgacgctccgggcacctgggtcgagagtgacgccaagctcatcgacaacccgcagatggttaagctgcactccttcgacaccaagattcataaggtggacacgctggtgtcgtacaagaaggacgagtgggacgaggaggagtagagtttgcaccaaaagttaccctgctgctgctagagcttggcgtgaaggctgtgtgaatcgttcattcacgtctatcgtgtactgcactaatagtatactgctactttggggggaagaaaagtgtgagacgctcctaccatttagaatttcgagattgaaatgccggttttaatataacatgagtcagcgcctttaagatctggctgcgaa

SEQ ID NO: 100785 - DNA, 3075 bp, Zea Mays
gttacaagtaacacccaaaccctggctgtaaggggtcatgaaccattttggctatcagatatcaaatcagatcgtcttcctcgctgttatcttcttcttcaacccttcttctacctctcttctctccgatattcccttctaggtgctaacatttggtatcagactagcgcaatcctgattgtcatccgcgttcgattgctgtggtcggaatggaatccgcgatgcagcagattttggaagctttgggccagatggaggagcgattgacggcaacgctgggagccagatgcgacgcgatcgagcaacgcagcacgacaaccgtggcaaatctgaggggcggccgcgtagggctggacgctggcgcacgcgtggtcgtcgacaacttctccttcagagtcggagtcagagtttctcacctcccttgctgcccaggctccctcggccgaggaggccatggtcgcggtcgcggacgcggggagccccgcgaggctcaacccgctccccaacaccgacgcagaggaggaggaggttctcaccatcacgcccaccaagtgttcgacaatatacctcaaccgcggcatctactccgtccgcaacccgatcctccaccgtcagcacctactccgggactgcgacggcaaccacgtcgacatccttcctacctccgagttcgacgagggtcccatcttcgacgaggagccctgcttccaccgtaacctcctggattcagatccagactctccctacgactgggtcgtccccgtcatcgccgtccacagcagcggctacactgagatgtcccacagcgaagccgacaaggtccccgcgaccgccgcgctacccaacctgcgcgagaagatctgctgtcggttcgtcgataggacgaagctgtccagccatgtccgcctcatccacttctccctaccgtcgccggaccaggcgctcggcatccccatcggcacgcatgtcttcgactgcaccagcgttgacgggaagccgtgtatgcgatcgtacacgccgacgagcaaggaggacgaggttctcgccactacgcccatcagaattcatgtgatagaagcggatttaacccaggtctggttaagagaagatgcagttgcttacttcaaaaatatgtttgatggtggcctgaggccaacctcaaatgcatttaacaaagttatagatggctgggtgaaggttgatatgctcaacgaggcccatgggttctttgatatgatgcctgaaaaggacatagatgatgttacagtggtcattttctactttggaggacaacatgtgggctgggaaatgaagacagaatggttgtctaatggttggctatgtttggtatgtggtgcatctgatactcaagagcttcctctacatttcattaaacttgcaaaggatacgtacacatctgactgcatgttcaaaaaaatcggatatggcactgtgagtgaggctttggtttacatgctgtccttactatttgttcgaagagattattgcaacgaggaaccattttttaggaatgtgcttgagcattatcaatgtggcgttgagatgatacggagggatttatttattggccattggaaacattatcttcaaagtgctataccacttcaaccctgctttgatggtctcataaatgttggcaagatttgggtgaattactgactctcaactgccctgctgacagagcaatggtgctgctgatgtaccaaattgagttgagactgctcaattgggcctgggaagacgagtgtgttttcaacctgtgtctacttggattacacagtgctgttcatagcagcctagccaatgcttataaatcctggttgataacaatgattcaccgaacacactcaattggccaagatcatttttggcataacgtggataggtgtgtggtgtgtggaattaaggatagatgctgtgcaagattggcaaagctagttttatctgctacactgacacaagattctggcaagctttctcaacttgaattgcaccatccattgttgttgaatactcagtcaagcggcttgaggacaagccgcatttcaagcagtggggaatgtcagcatatcatcttctcctcaagtcaaagatggtaccagaagaatacggacaatgctgctacgacgacgatgactatacatggagtatatgaagatggaggcatcgcgggaaaaggcacaggcgtgccaggagagcgggctcggtgtctaatgaaaactagcgtccgtctagcttgggctggagtgggccttgtaaatgttggcaggtcgattggtcgtgtggaccgagtggtcgtgtggttacaagtaacacccaaaccctggctgtaaggggtcatgaaccattttggctatcagatatcaaatcagatcgtcttcctcgctgttatcttcttcttcaacccttcttctacctctcttctctccgatattcccttctaggtgctaacaccagcttggctggccgcatcagcatcgcttgaataaataccgccatctgtatgaagtgaggaggtgatgccaagcagatgtgtaaccatttagaatgcttgtggtggaccaactgcggacaagctgggaagaaggcacgaacatgtagcagctctctatcatcgattgcggttgcggcttgcaagcattctactcggcacaggacacgtaccgagtgaaagcaactgttcctattgccgtgccggtaagtactacactgctactctccttttcccacgagtttgaccagctcggccttggcagcttccatgaccactgggaaatcaacctccaaatagcggcccctgccaaccaaaattccagcctgtgagatacataaactggtagcaaggaaaaatatatacatgagagggagagaagtggcgggaagagaccagaagtggttcttggaccaggtggcagatggaaaagccgggcttgatatgccatgcataatcctagcaacggcccttggcgtgaatttcgcaaacgaattgcttttaaggaacacctgtggtacagttaaaagtgttgtcatagacgacaaaaaaatcatgatgga

SEQ ID NO: 100786 - DNA, 1732 bp, Zea Mays
atgatgcattcggtaggatactttggattgccagttatgccagcgacatgtattacaatttcagagattgtgtctggttcaagcgagcaaatatttcctgaaatatttctacaaagcttacatgagtgcagagtttgtcttagtgaaaatactggcagaagtttactccagctcccatgccaccatttgttttgcttgatgtgtatgaagtctaattgcagaattcatgtgatagaagcggatttaacccaggtctggttaagagaagatgcagttgcttacttcaaaaatatgtttgatggtggcctgaggccaacctcaaatgcatttaacaaagttatagatggctgggtgaaggttgatatgctcaacgaggcccatgggttctttgatatgatgcctgaaaaggacatagatgatgttacagtggtcattttctactttggaggacaacatgtgggctgggaaatgaagacagaatggttgtctaatggttggctatgtttggtatgtggtgcatctgatactcaagagcttcctctacatttcattaaacttgcaaaggatacgtacacatctgactgcatgttcaaaaaaatcggatatggcactgtgagtgaggctttggtttacatgctgtccttactatttgttcgaagagattattgcaacgaggaaccattttttaggaatgtgcttgagcattatcaatgtggcgttgagatgatacggagggatttatttattggccattggaaacattatcttcaaagtgctataccacttcaaccctgctttgatggtctcataaatgttggcaaggtagccgcacgtaccctccaagatactgttgtagggaattcttgcattgtgtctagacagcctccatggccacccccaacgcgtcaccatttcagaactatgcatgctgaaactgtggcaaattggaaccacttattcagttggtgttttgcaaattcagatttgggtgaattactgactctcaactgccctgctgacagagcaatggtgctgctgatgtaccaaattgagttgagactgctcaattgggcctgggaagacgagtgtgttttcaacctgtgtctacttggattacacagtgctgttcatagcagcctagccaatgcttataaatcctggttgataacaatgattcaccgaacacactcaattggccaagatcatttttggcataacgtggataggtgtgtggtgtgtggaattaaggatagatgctgtgcaagattggcaaagctagttttatctgctacactgacacaagattctggcaagctttctcaacttgaattgcaccatccattgttgttgaatactcagtcaagcggcttgaggacaagccgcatttcaagcagtggggaatgtcagcatatcatcttctcctcaagtcaaagatggtaccagaagaatacggacaatgctgctacgacgacgatgactatacatggagtatatgaagatggaggcatcgcgggaaaaggcacaggcgtgccaggagagcgggctcggtgtctaatgaaaactagcgtccgtctagcttgggctggagtgggccttgtaaatgttggcaggtcgattggtcgtgtggaccgagtggtcgtgtggttacaagtaacacccaaaccctggctgtaaggggtcatgaaccattttggctatcagatatcaaatcagatcgtcttcctcgctgtta

SEQ ID NO: 100787 - DNA, 1336 bp, Zea Mays
gtagggctggacgctggcgcacgcgtggtcgtcgacaacttctccttcagagtcggagtcagagtttctcacctcccttgctgcccaggctccctcggccgaggaggccatggtcgcggtcgcggacgcggggagccccgcgaggctcaacccgctccccaacaccgacgcagaggaggaggaggttctcaccatcacgcccaccaagtgttcgacaatatacctcaaccgcggcatctactccgtccgcaacccgatcctccaccgtcagcacctactccgggactgcgacggcaaccacgtcgacatccttcctacctccgagttcgacgagggtcccatcttcgacgaggagccctgcttccaccgtaacctcctggattcagatccagactctccctacgactgggtcgtccccgtcatcgccgtccacagcagcggctacactgagatgtcccacagcgaagccgacaaggtccccgcgaccgccgcgctacccaacctgcgcgagaagatctgctgtcggttcgtcgataggacgaagctgtccagccatgtccgcctcatccacttctccctaccgtcgccggaccaggcgctcggcatccccatcggcacgcatgtcttcgactgcaccagcgttgacgggaagccgtgtatgcgatcgtacacgccgacgagcaaggaggacgaggttctcgccactacgcccatcagaattcatgtgatagaagcggatttaacccaggtctggttaagagaagatgcagttgcttacttcaaaaatatgtttgatggtggcctgaggccaacctcaaatgcatttaacaaagttatagatggctgggtgaaggttgatatgctcaacgaggcccatgggttctttgatatgatgcctgaaaaggacatagatgatgttacagtggtcattttctactttggaggacaacatgtgggctgggaaatgaagacagaatggttgtctaatggttggctatgtttggtatgtggtgcatctgatactcaagagcttcctctacatttcattaaacttgcaaaggatacgtacacatctgactgcatgttcaaaaaaatcggatatggcactgtgagtgaggctttggtttacatgctgtccttactatttgttcgaagagattattgcaacgaggaaccattttttaggaatgtgcttgagcattatcaatgtggcgttgagatgatacggagggatttatttattggccattggaaacattatcttcaaagtgctataccacttcaaccctgctttgatggtctcataaatgttggcaagatttgggtgaattactga

SEQ ID NO: 100788 - DNA, 104 bp, Zea Mays
gaggcattggcatcagtcagctagcatttcacaacatggaaaaccttaaaaccaatcttgtgtactttatcaagtccaagatagtttacaaacaaatcactgta

SEQ ID NO: 100789 - DNA, 820 bp, Zea Mays
atgaatccaccttgcttactctgcaaatctgggctgccagtgttgatatccagatgtttgagatcttgttatgcgttggaaataaagcagatcttgtacctggttatagtgtgcaggtatgcaaaagcttgggaagtcaagttctgatccacaccctaattattacaattttgggataaatgaaagtgaggactgtagcttgttatttgaggaagaaccatgcatagatattagaaactctactgcatagtggtgcattgagcagaacatagaatatattgaggtatgtgcttccaatgctgactttgataagtgtcgatcagtggatggtgatagccaaggcttaaagcgactccttggagctatttctgcacatatgtggcctggaatagttctaaaatctagaaccaggataactgccccattctttgttgaaaaacaagatgaatgttatgtggctggcataggcaacatgggtgcttgtttttgtactatcagtatggcaagaatcctatgcatggatgaagtgcaagtcaaggactctggggcagaaattttcctagggctgacgctgtcagtgctggtttatcttttcaacctcaaagaacataagttaggacaaggaaacgttccagaaatgcagcagctcaagatcttggtgaagaagatgacaatgatcagcatgaagatgctacagaaccagctgaacaacaaccaccaacagaaacagcaacaaatgtggaccaggatgaatctgaatcagttggagggggagctgctgctgatgccttttcagttggacaatgatcttctgctctag

SEQ ID NO: 100790 - DNA, 402 bp, Zea Mays
atggggagggcagggaaactggcaggcaggcaggcaggcagcgaaggattgaagagttgtatactgcgtgtgcgctgcgcgctaggctctaccgctagtggcagttggtctgggttttgggacgggctgtgcgtggaccgcgccgcggggtcgccgagatggcggagggaagcgaggcggatcagcggccagcggggcacggggtcggcgcgatggaaacgaatgagtggttgcctgattgggctgggtgaggcggatcatcggctgggccgtacaacccattacccgtataagatctatatcttgggagggggaagggctggtgcttcttgctacccagctaccggacagaatgctcaggtcggtccttccccattcgctctttgggcagcggtggattga

SEQ ID NO: 100791 - DNA, 1899 bp, Zea Mays
ctacatagtgtccgaatcgtccttgttataggccagcgggaactcgtcgaactgctccgtggcgtcgcggccttctccgatgctcttcagggcgtggtagacccggtacatggagtgcctctccctcacgcgaggctgggtgcaggcaaaggctaccttcaagaactcctcgatctctgcctcgtggcccttcccgcgcaaagatttgtcgacagcgtcaccgatccggccagaggccttaagctgataaacccagtccaccagtgtgcccttgaacccttcgcccatcacgtcgacggtgcccaccgcagcggcagcagcctcctgcccgctaacgagctcgaacagtaccaccccaaacgcgtacgcgtcgcctttcgtcgtgccgaccggattgctcgcgcactctggagcaacgtagccgaactcccccaagtctcccttgaggaaagggctagtatcgccgccctcgccgggcgccatccggaccagcctcgtgaggccaacgtctgtgatccgggcctcgtagtcctcgtcaagaagcactgcgctcgagctcaggttctggtgaatctgcggaacctggaacccatggtgcagccacgcaagccccctcgctgcccccacggcgatcctcagccgtgtcgcccagtccagcagcggcgcctcctcccctggcttcttcttcatcaccgacgaaagagccccgctctccatatgcttatacaccagcagcctctcgtcctccacgacgcagaagcccagcagcggcacgatgttgggatgccgcagctgcccgatccgacacatctccgccctgaacgccttctccgagagcgggcacgagtgcaggcgcttgaccgtcagcgcggacccgtcccgtagcacggcgcggtaggccgtccccgcccgcgagctcccggcgaccacgatgtggctgctgctgaagtcctgcgtggcggccatcaggtcggcgagcttcaccttcacgatgggcttctggaacagcgacaccggggccaggcggttgtgcgccgcacgcagcctctcggtccaccagctcccgtcctccccgccgcccgactcgctgccgccgcgcctgtggcggcggcgtcctcccttgcccttcccgctgcaccgccagaagaagtaggcgaggagcaacgacgcggcggctcccaagactcccgcggcgatgacgatcccgaggccggcgctccccagcccgcggccgcagcgcgaggacacggggcggccgcagaggcccgagttcccggagaaggagtccctggggaagcggtcgccgagctggggcgggatctggccggagagctggttccccgagaggtcgagcgacttgagccggtcgagccgcgcgagggaggcggggatctggccggagagctggttcccggagagcgtgagcgagttgaggaagcggcagttggcgagctccgcggggatcgcgccggtgagctggttggaggagaggtcgagggtgacgaggaaggggagccagtcgcagagggccggcaggatcgtgccgacgagcgcgttgctagagaggtccagcgtggtggcggcgctgcagtactggagcgaggaggggatggagccgacgaggccgaagccggagagcgagagcgacagcacgcgggactcctgcaggttccagcagccgatgccgctgtaactgcagacggcgccccccgaagtgttcttgaagtcccagtcggcgaggcgcccgttggggtcggcgaggtcgtgcttgacgccccggaggcagcgcaggccgtcctgctgcggcgccgcctccgatccgggcgcgggctgcggcgccgcgggaggggccaggaggaggaggacgatgatcgggggcaggaggcgaggaggaggcat

SEQ ID NO: 100792 - DNA, 2684 bp, Zea Mays
ggccgccattcgtgtggcccaacgccgtttcgcgtgcctctcaggcagcatgccaagggtaggcgaagggcacggccatggatacattcaagtctcctctttcagcgccaagccgccaaggtttgcctcaggtgagctttgacaaaaagaagaccatggagagaattggggtagacggggactttattgtcgccggcaattggaagctacatggagcactatgcaatgaactttacacagtaatccgtgaagttttggataccattcctccctttgagactacaagctcaggatgcagtcctgggctcctggcattgagttccttgaggatagctgttgagaaatccaagaatttactccagtattgctcagagactagcaagttttacttggctgttacagcagaacacgttctaacaaaatttgagaattcaagacaaggacttctggaaagccttcatcaagtggaagaaacaattccggaagcagtcggttctcagatcacattgattgcacaagaactggaaaaggctgctttcgttttggatcagtctgaaaaggaagttggtgatgaggtgaatcaactaattcagaacgagtcaaaatccaatgggtttcttgatgagaatgagcttgaattgctccaccaaattgctgtccgggttggtattacatcatccgtggcagctctcaccgaaagaagagcacttaggaggcttcttgagagagcccatgcagaggaggacttgaaaaaggaatcgattgcagcctgcctactccaacttattaggaaatactccaacatatttaagagtgaaacaaccgatagcaccaactctttgtgctcaagcactccttgctcctccagatcgaattctggcttgattggtatgcatcgttcactttccagctcaactgatctctacggaaactgtcagagtctcgagaagcaactcccaaaggttggctccttcagttcgaagcagatgaaagggttatcaaggagcatgcccttgccacctgaggagctgaggtgcccaatctccctgcagctcatctatgaccctgttgttattacatccggccagacatatgaacgagcttgcatcgagaagtggttcgacagtggcaacacaacctgcccgaaaactcgcaagcagttgtcccagctcttgaggacgcctaattactgcattaagggtctgatagcatcttggtgtgaacagaacggggttcctgctccatctggaccgccagaatctcccgagctagaccacatgagaatttcatgcctggaaagcagcacatgtgtggggactgatggcgctaacactgttttgttcgaagagacagctgccaaggatgatgccaagtcggacatggagatattctctcgtcagaactccggagaggccacatccaaactacgtgtagatgaggtctcaccggagaactgctttactcttcagagctccaaggaggctgcacctgagacatgtggggttgtagactctctagacaagggcaagggctctcaccaagactccaaagatgatgtgcctgttagtgaaagatgtgaacagtggctccatgtgctgaacaagaacgatgctgagagcatgagtgagagacttaagttggtcgagcagatcaggatcctgttgaagaacgacgacgaacttcgcgactacgcaggtgctaatggtattactgagccactaatccattttctgaagatggctatctacagaggagatgtgcgatctcaggaggttgctacaatggctctgttcaattttgctgtcaacaatgaccggaacaagaggctgctgctgtcagctggagtcatccccttgatcgagcagatgatacaggaacgggaaacctgcgaggctgccatcgcaatgtacctgaacctctcctgcatccccgaggcgcaggcgatcatcggttcgagcgtcgctattcctttcctcgtcaatggcctgggggaaggtggctcccggagcgacacgtgccgcctggacgcgctgctcaccctgtacaatctctccctgcacgcgcccaacatcccgtccctcatggcgtccggcatcatcgagggcctccggggagtgctgacgccgtcgtccccgtggacggacaaggccctcgcggtgctgctgaacctggcgatgacccggaggggcaaggaagagatcgcggccagcgcggccatggtgggcgccatcgtgctcatcctggacaacggtgagccgggggagaaggagaaggccgtgtcgtgtctgtacgtgatctgcagcggcgacgatggcagcagccagacggtgctccaggagggcgtgatcccggcgctggtgtccgtgacggccaacggcacggccagggcccgggacaaggcgcagcggctgctgaggctgttccgggaacagcggcagcgggagttggagctggaggagatgcagccgcgggtggagctgcacgaggtggcgagccaggcggccgcgcggcaggaggaggaggaagaagaagaggaagagatggcgctggccgttacgccggccgccgcggccagtaagccgagaggcggcggcaagaagccgcggttgcgcaggtcaggctccaggaggttcaccaaggccttcacgtgcctgctcaagaagtggagcctgcgctgagcactg

SEQ ID NO: 100793 - DNA, 3247 bp, Zea Mays
tccccgtcccctccgccgccgccgcccctgcaccctttgctcccgttggatcagccccgcgggcggatctcgaccgccgagcacgtccttgccgccgcgtctgcggggatggacgagcctcacctgccacgacagcacgatgccgaagctcgcgcccccgtcctgccgcgagagcgtcggcggcgacttcgtcggtggatgacttcgtccgatgcctctccgcggccatggcgaggcagctcgtattcccgtggagctctagcgcgtcgacgcgtcatccatggaccatggtgattgtcactgggcagacaacgagctcatggagacgctggcgctctgaggtgttgtgttgtgtcagtaaaaatggccaaaacgtaggtaaattacttttttccatgactctgcatttgccattctaaatggcaaacgaagaggtggctattatatcggtgacaaatagttaaaaatcctgttgtatcaggatagtttcgttctattgcatgtgtatataggtttctgtttagatatagaagtgcatcctataagtatcaccagtgtttcaactgaaactttaaaactaccacatcgaatgttcttatctgaatatcatcaaaatgggaagtaggtgacaaataatatgacggtagatatttcatatcgctcccgtttccttctgttttttagattaacattttgagtatccaataatgtacattactgggatggtgggggtagaatcagttgaattattcttttgcttcttttcacagctacatggagcactatgcaatgaactttacacagtaatccgtgaagttttggataccattcctccctttgagactacaagctcaggatgcagtcctgggctcctggcattgagttccttgaggatagctgttgagaaatccaagaatttactccagtattgctcagagactagcaagttttacttggctgttacagcagaacacgttctaacaaaatttgagaattcaagacaaggacttctggaaagccttcatcaagtggaagaaacaattccggaagcagtcggttctcagatcacattgattgcacaagaactggaaaaggctgctttcgttttggatcagtctgaaaaggaagttggtgatgaggtgaatcaactaattcagaacgagtcaaaatccaatgggtttcttgatgagaatgagcttgaattgctccaccaaattgctgtccgggttggtattacatcatccgtggcagctctcaccgaaagaagagcacttaggaggcttcttgagagagcccatgcagaggaggacttgaaaaaggaatcgattgcagcctgcctactccaacttattaggaaatactccaacatatttaagagtgaaacaaccgatagcaccaactctttgtgctcaagcactccttgctcctccagatcgaattctggcttgattggtatgcatcgttcactttccagctcaactgatctctacggaaactgtcagagtctcgagaagcaactcccaaaggttggctccttcagttcgaagcagatgaaagggttatcaaggagcatgcccttgccacctgaggagctgaggtgcccaatctccctgcagctcatctatgaccctgttgttattacatccggccagacatatgaacgagcttgcatcgagaagtggttcgacagtggcaacacaacctgcccgaaaactcgcaagcagttgtcccagctcttgaggacgcctaattactgcattaagggtctgatagcatcttggtgtgaacagaacggggttcctgctccatctggaccgccagaatctcccgagctagaccacatgagaatttcatgcctggaaagcagcacatgtgtggggactgatggcgctaacactgttttgttcgaagagacagctgccaaggatgatgccaagtcggacatggagatattctctcgtcagaactccggagaggccacatccaaactacgtgtagatgaggtctcaccggagaactgctttactcttcagagctccaaggaggctgcacctgagacatgtggggttgtagactctctagacaagggcaagggctctcaccaagactccaaagatgatgtgcctgttagtgaaagatgtgaacagtggctccatgtgctgaacaagaacgatgctgagagcatgagtgagagacttaagttggtcgagcagatcaggatcctgttgaagaacgacgacgaacttcgcgactacgcaggtgctaatggtattactgagccactaatccattttctgaagatggctatctacagaggagatgtgcgatctcaggaggttgctacaatggctctgttcaattttgctgtcaacaatgaccggaacaagaggctgctgctgtcagctggagtcatccccttgatcgagcagatgatacaggaacgggaaacctgcgaggctgccatcgcaatgtacctgaacctctcctgcatccccgaggcgcaggcgatcatcggttcgagcgtcgctattcctttcctcgtcaatggcctgggggaaggtggctcccggagcgacacgtgccgcctggacgcgctgctcaccctgtacaatctctccctgcacgcgcccaacatcccgtccctcatggcgtccggcatcatcgagggcctccggggagtgctgacgccgtcgtccccgtggacggacaaggccctcgcggtgctgctgaacctggcgatgacccggaggggcaaggaagagatcgcggccagcgcggccatggtgggcgccatcgtgctcatcctggacaacggtgagccgggggagaaggagaaggccgtgtcgtgtctgtacgtgatctgcagcggcgacgatggcagcagccagacggtgctccaggagggcgtgatcccggcgctggtgtccgtgacggccaacggcacggccagggcccgggacaaggcgcagcggctgctgaggctgttccgggaacagcggcagcgggagttggagctggaggagatgcagccgcgggtggagctgcacgaggtggcgagccaggcggccgcgcggcaggaggaggaggaagaagaagaggaagagatggcgctggccgttacgccggccgccgcggccagtaagccgagaggcggcggcaagaagccgcggttgcgcaggtcaggctccaggaggttcaccaaggccttcacgtgcctgctcaagaagtggagcctgcgctgagcact

SEQ ID NO: 100794 - DNA, 2851 bp, Zea Mays
tccccgtcccctccgccgccgccgcccctgcaccctttgctcccgttggatcagccccgcgggcggatctcgaccgccgagcacgtccttgccgccgcgtctgcggggatggacgagcctcacctgccacgacagcacgatgccgaagctcgcgcccccgtcctgccgcgagagcgtcggcggcgacttcgtcggtggatgacttcgtccgatgcctctccgcggccatggcgaggcagctcgtattcccgtggagctctagcgcgtcgacgcgtcatccatggaccatggtgattgtcactgggcagacaacgagctcatggagacgctggcgctctgaggtgttgtgttgtgtcagtaaaaatggccaaaacctacatggagcactatgcaatgaactttacacagtaatccgtgaagttttggataccattcctccctttgagactacaagctcaggatgcagtcctgggctcctggcattgagttccttgaggatagctgttgagaaatccaagaatttactccagtattgctcagagactagcaagttttacttggctgttacagcagaacacgttctaacaaaatttgagaattcaagacaaggacttctggaaagccttcatcaagtggaagaaacaattccggaagcagtcggttctcagatcacattgattgcacaagaactggaaaaggctgctttcgttttggatcagtctgaaaaggaagttggtgatgaggtgaatcaactaattcagaacgagtcaaaatccaatgggtttcttgatgagaatgagcttgaattgctccaccaaattgctgtccgggttggtattacatcatccgtggcagctctcaccgaaagaagagcacttaggaggcttcttgagagagcccatgcagaggaggacttgaaaaaggaatcgattgcagcctgcctactccaacttattaggaaatactccaacatatttaagagtgaaacaaccgatagcaccaactctttgtgctcaagcactccttgctcctccagatcgaattctggcttgattggtatgcatcgttcactttccagctcaactgatctctacggaaactgtcagagtctcgagaagcaactcccaaaggttggctccttcagttcgaagcagatgaaagggttatcaaggagcatgcccttgccacctgaggagctgaggtgcccaatctccctgcagctcatctatgaccctgttgttattacatccggccagacatatgaacgagcttgcatcgagaagtggttcgacagtggcaacacaacctgcccgaaaactcgcaagcagttgtcccagctcttgaggacgcctaattactgcattaagggtctgatagcatcttggtgtgaacagaacggggttcctgctccatctggaccgccagaatctcccgagctagaccacatgagaatttcatgcctggaaagcagcacatgtgtggggactgatggcgctaacactgttttgttcgaagagacagctgccaaggatgatgccaagtcggacatggagatattctctcgtcagaactccggagaggccacatccaaactacgtgtagatgaggtctcaccggagaactgctttactcttcagagctccaaggaggctgcacctgagacatgtggggttgtagactctctagacaagggcaagggctctcaccaagactccaaagatgatgtgcctgttagtgaaagatgtgaacagtggctccatgtgctgaacaagaacgatgctgagagcatgagtgagagacttaagttggtcgagcagatcaggatcctgttgaagaacgacgacgaacttcgcgactacgcaggtgctaatggtattactgagccactaatccattttctgaagatggctatctacagaggagatgtgcgatctcaggaggttgctacaatggctctgttcaattttgctgtcaacaatgaccggaacaagaggctgctgctgtcagctggagtcatccccttgatcgagcagatgatacaggaacgggaaacctgcgaggctgccatcgcaatgtacctgaacctctcctgcatccccgaggcgcaggcgatcatcggttcgagcgtcgctattcctttcctcgtcaatggcctgggggaaggtggctcccggagcgacacgtgccgcctggacgcgctgctcaccctgtacaatctctccctgcacgcgcccaacatcccgtccctcatggcgtccggcatcatcgagggcctccggggagtgctgacgccgtcgtccccgtggacggacaaggccctcgcggtgctgctgaacctggcgatgacccggaggggcaaggaagagatcgcggccagcgcggccatggtgggcgccatcgtgctcatcctggacaacggtgagccgggggagaaggagaaggccgtgtcgtgtctgtacgtgatctgcagcggcgacgatggcagcagccagacggtgctccaggagggcgtgatcccggcgctggtgtccgtgacggccaacggcacggccagggcccgggacaaggcgcagcggctgctgaggctgttccgggaacagcggcagcgggagttggagctggaggagatgcagccgcgggtggagctgcacgaggtggcgagccaggcggccgcgcggcaggaggaggaggaagaagaagaggaagagatggcgctggccgttacgccggccgccgcggccagtaagccgagaggcggcggcaagaagccgcggttgcgcaggtcaggctccaggaggttcaccaaggccttcacgtgcctgctcaagaagtggagcctgcgctgagcact

SEQ ID NO: 100795 - DNA, 910 bp, Zea Mays
atgaagaaccgagtaatgggtggttttccaagtgatagggttgaagttggtggtgaggttcaccatgcaacgagggactatcacaagaagatgaagtcccccctgaacttgtccaaacaaggagccctctctcaattctctgagcatggattttcggatgatctcaccaataatgtgcatggaattggacactccaaagagaacatcaccaccaacaacgtgtcacgtcccttcacaagtgggttctcaattggatcatgggaggattcaaattctattgagttttccaacctagcaaacaaaacaggaatacacaataatgatgacatcatagacaatattagtaactcttatgaactacagtttggtgtggcaaaggaaatggcaggcctactacagatgcaacaagaccaggttccatttagagtacgagcaaagcgtggatgtgccacacatcctaggagcatcgcagagcgagagcgaagaacgaggatcagcgagaagctcaggaagttgcaggcccttgtgcctaacatggacaagcaaactagcacagcggacatgctggatttagcagttgatcacatcagaggactccagaacgagctgcaggctctcaagaaagacaaggagaagtgcagctgccgcggcaatcgtccagcggggagataacgcacgtacgtaggctaaaaacaatgggttctcggcaacacattatagaacggcattgcagacattgttgtcagacagcagcatcagaaggtggctgctgtggcatattggcttcagcagaccggtcgagatatttcatattcgttaaaaacttagtattttagtttgttcgatggttttaattcgtaccgtcttctactacttttacaatattttgtctatatattgcagctgtagc

SEQ ID NO: 100796 - DNA, 715 bp, Zea Mays
cgcgctatggcccggcgtcggcgcagcagcagcactacccgttcgtcgtagttgaccccacggaggcggcgggggcggcggcagtgagggccttcttcccggcgccgggggccggggaaccgccgccgtcgtcatcgtccgccgcggtgcgggcgctgccgacggcgatgcaccagggacacgggtacggcggcggggcccccgagatctcgctggcgcacggcgcccatggccaccaccaccaccacgggatccatcaccggtaccatcagttcggcgtggaggggaggcaggacggcggcccgtcgtcgtcggcgtcgctgccgccgcatagcagctcgccgccgggcttcttctccagccccgtcatggataacggtaagtgccaatgctactcgcgcctcgtctccctttcttaacatgtgcatatgctagttcttcccgacccaaagcctgtccaaactccagtcctcaccgctgctagctcttcaagcttcaatcctgttcgatcttttagtactccatccgcatgtatttaggcagagatttgagctgccgttcttctgctaataatcgttctctcgggtacaagtagtggcgccaatcgcagctagcaagcgctctttgccgatttagtgggcaaaaggctgacgactgacgttattagcgcatgatggatagtaatacgactttctgttactttgtccaatttggt

SEQ ID NO: 100797 - DNA, 165 bp, Zea Mays
atggcgtcatggtgccaaggaaagatcctaccgatagcctacccatctactgatgcggactatgaagcaaggtataaaagattacaaaaattgaggtggggccatggcccccgttgccccacccctggatacgcccctggctgggagggctcaaagcatgagtaa

SEQ ID NO: 100798 - DNA, 774 bp, Zea Mays
actcacagctttccattcagagtatccagcttggtaagcaatacaatcacatcttgaccgtcacttgccattgccagccagtcagtctatagctaatcctgctttgctgaattatgtacaccataactaggcaccaattaaaaaaatggggaatcgacgcggctgcacaacaatgattcaatcgatgaattacttaattgaagagaacaatcgatgaattaattaattgacgcgcaggttgccagggtgagtagactgattagatactgtttggtgtacagtaaccagtgatcatgtctcggtggcctctgactgtcaataagctcgtcacgattttgggtctgtcacggacatattctggctgcctgaaggactgaaatatgcctccagcggtccagcctgcaataaaccatgctgctaaatgtgatcatcataattttctgtccttcacgcaattctgtacatgggcagcagttttgtcctggtcagaccaaatgttgttgtacgggtggatcggaatgcgcacgtctcataggcgtttgagcttcaacaatcttctgcatagcaaagtggcacctgaaatcgcaaatgcataggtgatgaagccagtttttttttttaaaaaaatgcctggctactgaatttgctgcttttacattcagctaagggcatgttatgtagaagactataagcaaatagtagttagctgttcaagtgaagaaaaatggcatattacaaacggaagtgcagtatattgacatgttaaatgctgta

SEQ ID NO: 100799 - DNA, 587 bp, Zea Mays
tgcaggtttgcagaattcaaccaggactaggaaaatagccagtatcctccatcagctattcctggatcagaagagaaaggagggaactactactttgagtctcagtcaagtccttgaagggacaaagaggaaaattgcagcattattcttctatgaaactctggttctgaagaaccgtgggcttgtagaagttaaacaagaacatcattatgatgatatcatactctcagagactccaaaacttaaagcagagcttcagcgctgtaggaactgattgtcagcttaacttagcatgttcctttgtttaaggagagttttatggccagacctaactctaggtgcccagcatttcaccttgttattatctatctcatgtaggcatcttttcgatggcgattcgaattcagatgtatatacaagttactcatggtcacatgatgtgtacgagtgttagctggttaggagcataggatatgttttgagttaatgatttagttctaactgaataacagatgtatatcacggttcttatctttagcgttgaatgttgatgtcatttgctagtatcgctcgtaccatttgaatat

SEQ ID NO: 100800 - DNA, 1118 bp, Zea Mays
atggtccactccaacgccctgctgtggaagaagggaccggtccacacggtgtggaaggcgtcgttctgcaaagagtcagagctcagccgggacaaggtcgcgggcacggacatcgtcgcctccgttggtaacgactccgtgtccactcccgcaatgcgagagaaaccgccgttttttgcgagattatgttggatgtccgcagcccccatggacttcaccttgcagtactggcaaagcttctgtttggaattgttaggatattctccaagaagatggagttcctcctccatgatttcaatgagctttctcggtcatttcgactaagtcaacttgctgaacctactttgccaagtggaaggttgacactcggagttttgaagcaagcgaataaagatgtccgtgtaggaaggttagtggtaggccagcaaaacacctgcaaagtacaaaaaactgttcatgctgtgagaacaactgaagtctctagtgcaatatcaagtgaaggccactctgtaagggtagaaacagaagttactctagggatatctgtggtaatcaaagaaacacgtttgccagatggtctgccaaccttcacaattccaagatcatttgagcttgactctttcaatttggggattgctgaagatatagatgatgaaggtgatgaccaccatcagttggcacaccaagatattttattgagagatgagagacatcatgccccctatttttatgagccttatcaaagagtgtcatgttcatatgctgttgattctgctggttttctgccggaatacattgctcttccaaataatattctagacttcaccgaagggggtaaatctgaaatagaaaacaagaatgccgattctgcttggttcacaccattgaaggatgttcttccacctgagatgatgggtatggtggctgaagcaaaggatcttgcaaaggaaagcaaaactggggataattccgtaagacaagtgaacatgaatgagaataacaggggttctgattgtactatgatttctatccctctgcaagaaagtcaagaactgcaatgctctgataatgctctggagaatatggcttgtggaagtaggagtgcaaattacaccaca

SEQ ID NO: 100801 - DNA, 3031 bp, Zea Mays
gaggcgacccgtaacaacgcggagcgtcagcctatagccgtcgctcccgtgtcccgtccgccgtcccccttcctctcgtattcgcttcgccgcccaacccactgtgcaccgctgccttcccgaccgttctcgccgccgccgtctccgcgcctgccaccccgcgcgctcggccaccggcgcccacggtgcggctcgatcaaggccagatcagaacccgccccggtccgcgtcacgccgatattttctgttttttggtacggatctagggttttcctgctgcggattcgttcgattcgctcatggccgctgggcgccatgggggttacagggactacgaggcgagggagcgggagctcgacgcggaggcctccaggaggagcaaggagcagcaccaccatctcggcggccgccaccgcgacgtggaccgccaccgcgatggcgggcgcagcaggggtggcagagactttgccaacggctacggtcgccgacgctcgccgccaccccggagccggctggcgggaaggcttggtgaccgtgagcctggcgaggtgctgagcggtagtgcatctgatgactccggtgggaggccgcatagagggagggagaatggcgtgctcagttccggcagggagggtgatgtgatggcagtcactgatgactccggtgggaggtcgcataggaggagggagaatggcgtgctcagttccggcagggatggtgatgtgatggcagtcacagggatatcttcgccgagcaagaagaggaaattctcaccgataatttgggacagggatagcccaaagccaccacattctgatgcagccagggacaagaaagctgtagaacctgtgccttctgagctccctccgcccccgccgttgcctccacaagaccacatcacactgaggttggctgtggagaagtcacttatggatatagaacctactgttggtacagagagtgctgtgcagttgctggaacatgaggtgaataaggtgacagagcaggaagaggagtatgcaacaatgaggaacatatcgacttcaagatgggctggtgctaatgatgatgatgatgatggggcagctccagtgaagaagaaaagtctgtctcctgcagactcctctgtggcagggcagtggaaaagagcaagtccagaacctggtgaagtatctggaggaaggacaatgtctaggtcatctgactctgggaaaatgagtaatgatgagaaagaagactttgaagcaaatgaagatgactatatggatgtcgacaagggacatgctagtgacagtgatacagaaaaccgtatgtcagatactgactcagacaatgaaatacacagacctgaaacccctgaaagagagaaggcaccacacaggtgtatcaatatgcttcaagattgcagaagtgttgatgagtttgagaggctcaacaaaattaacgagggcacatatggtgttgtatacagagcaagggataagaagacaagtgagattgttgcattgaagaaggtaaagatggagaaggagcgagaaggtttcccattaacctctcttagggaaataaatatcctcttgtctttccacaatccttcaattgtggatgttaaggaagtagtagttggaagtagtctagatagtatttttatggttatggagtacatggaacatgatcttaaaggtgtcatggagaccatgaaacaaccatatacccaaagcgaggtaaagtgtttgatgcttcagctgctagaaggtgtaaaatatctacatgacaattgggtgcttcatagggatctgaagacctcaaatcttttgttgaataaccgtggtgagttaaaaatatgtgattttggactgtctcgtcaatatggaagcccattaaaaccttatactcaactggttgtgactttgtggtacagggccccagaattgttgttaggaacaaaggagtattctactgctattgatatgtggtctgtgggctgtataatggctgagcttcttgccaaagaaccgttattcaatggaaaaacagagtttgaacagctagataagatttttagaacactcggcacacctaatgagaagatttggcctggctatgctaaattaccaggtgtgaaagtaaattttgttaaacaaccgtataatagactaagggataagttcccagccgcttctttttctgggcgaccaatcctgtctgaagctggttttgatctattgaacagactgctgacttatgaccctgataagcgcatatcagcagacgatgctcttaagcacaaatggttctctgaagttcctctgcctaaatcaaaggacttcatgccaacattccctgctcttaatgaacttgacaggcgttccagaaggtatctgaagagtcctgatcctctggaagagcaacgtttgaaagaactgcaagggaacataggcaaccatgggctttttgggtgaactagaagcacttgattgggtctgcaagggaacataggcaaccgtgggctttttggctgaactagaagcacttgattgggtcctgtccgtcctaactgttatgcttcacactgaaatcctgagttcatgaggttagatatcttctgaggcttggtaccggtttaaatggataaggtttctccttgtggcccatcatagaaattttgttgcaggattaacgcttcatccagatcgatcataaaagcaaatataatctacctgcatcataagaagcgcaggggaaggatgccttttgctttcatcaggaaatcaatggcattaatacaacttagaagctaagctgtggctgcttcaagataggaagcttgatggctgtcagcttattgtacctaagtgactaaattttgtggagggccttcaaaagtgttcatctcttactagtgaaccatggtgggattgccgagccgttcggctaaccgggctagccgataattggtggtggtcggctccaccttatcactgttttggattttgaatttggtaaagtttgtaaattttgaaaacttttg

SEQ ID NO: 100802 - DNA, 3135 bp, Zea Mays
gaggcgacccgtaacaacgcggagcgtcagcctatagccgtcgctcccgtgtcccgtccgccgtcccccttcctctcgtattcgcttcgccgcccaacccactgtgcaccgctgccttcccgaccgttctcgccgccgccgtctccgcgcctgccaccccgcgcgctcggccaccggcgcccacggtgcggctcgatcaaggccagatcagaacccgccccggtccgcgtcacgccgatattttctgttttttggtacggatctagggttttcctgctgcggattcgttcgattcgctcatggccgctgggcgccatgggggttacagggactacgaggcgagggagcgggagctcgacgcggaggcctccaggaggagcaaggagcagcaccaccatctcggcggccgccaccgcgacgtggaccgccaccgcgatggcgggcgcagcaggggtggcagagactttgccaacggctacggtcgccgacgctcgccgccaccccggagccggctggcgggaaggcttggtgaccgtgagcctggcgaggtgctgagcggtagtgcatctgatgactccggtgggaggccgcatagagggagggagaatggcgtgctcagttccggcagggagggtgatgtgatggcagtcactgatgactccggtgggaggtcgcataggaggagggagaatggcgtgctcagttccggcagggatggtgatgtgatggcagtcacagggatatcttcgccgagcaagaagaggaaattctcaccgataatttgggacagggatagcccaaagccaccacattctgatgcagccagggacaagaaagctgtagaacctgtgccttctgagctccctccgcccccgccgttgcctccacaagaccacatcacactgaggttggctgtggagaagtcacttatggatatagaacctactgttggtacagagagtgctgtgcagttgctggaacatgaggtgaataaggtgacagagcaggaagaggagtatgcaacaatgaggaacatatcgacttcaagatgggctggtgctaatgatgatgatgatgatggggcagctccagtgaagaagaaaagtctgtctcctgcagactcctctgtggcagggcagtggaaaagagcaagtccagaacctggtgaagtatctggaggaaggacaatgtctaggtcatctgactctgggaaaatgagtaatgatgagaaagaagactttgaagcaaatgaagatgactatatggatgtcgacaagggacatgctagtgacagtgatacagaaaaccgtatgtcagatactgactcagacaatgaaatacacagacctgaaacccctgaaagagagaaggcaccacacaggtgtatcaatatgcttcaagattgcagaagtgttgatgagtttgagaggctcaacaaaattaacgagggcacatatggtgttgtatacagagcaagggataagaagacaagtgagattgttgcattgaagaaggtaaagatggagaaggagcgagaaggtttcccattaacctctcttagggaaataaatatcctcttgtctttccacaatccttcaattgtggatgttaaggaagtagtagttggaagtagtctagatagtatttttatggttatggagtacatggaacatgatcttaaaggtgtcatggagaccatgaaacaaccatatacccaaagcgaggtaaagtgtttgatgcttcagctgctagaaggtgtaaaatatctacatgacaattgggtgcttcatagggatctgaagacctcaaatcttttgttgaataaccgtggtgagttaaaaatatgtgattttggactgtctcgtcaatatggaagcccattaaaaccttatactcaactggttgtgactttgtggtacagggccccagaattgttgttaggaacaaaggagtattctactgctattgatatgtggtctgtgggctgtataatggctgagcttcttgccaaagaaccgttattcaatggaaaaacagagtttgaacagctagataagatttttagaacactcggcacacctaatgagaagatttggcctggctatgctaaattaccaggtgtgaaagtaaattttgttaaacaaccgtataatagactaagggataagttcccagccgcttctttttctgggcgaccaatcctgtctgaagctggttttgatctattgaacagactgctgacttatgaccctgataagcgcatatcagcagacgatgctcttaagcacaaatggttctctgaagttcctctgcctaaatcaaaggacttcatgccaacattccctgctcttaatgaacttgacaggcgttccagaaggtatctgaagagtcctgatcctctggaagagcaacgtttgaaagaactgcaagggaacataggcaaccatgggctttttgggtgaactagaagcacttgattgggtctgcaagggaacataggcaaccgtgggctttttggctgaactagaagcacttgattgggtcctgtccgtcctaactgttatgcttcacactgaaatcctgagttcatgaggttagatatcttctgaggcttggtaccggtttaaatggataaggtttctccttgtggcccatcatagaaattttgttgcaggattaacgcttcatccagatcgatcataaaagcaaatataatctacctgcatcataaggtgtggcgtgttggcttttattggttacaccagtttcacctttggaacttctctatgtaaaatattccagattggtacgttgtaaacaatgtccagtgtgttggatttaaatttaaaacgaaacatcatcattattagttttctttatgctccttgtgccttttcttttgatctttgcgttttgtttgcaagagacaaaagaagcgcaggggaaggatgccttttgctttcatcaggaaatcaatggcattaatacaacttagaaggtaatctaagctgtggctgcttcaagataggaagcttgatggctgtcagcttattgtacctaagtgactaaattttgtggagggccttcaaaagtgttcatctcttactagtgaaccatggtggtcagtgtactatc

SEQ ID NO: 100803 - DNA, 3173 bp, Zea Mays
gaggcgacccgtaacaacgcggagcgtcagcctatagccgtcgctcccgtgtcccgtccgccgtcccccttcctctcgtattcgcttcgccgcccaacccactgtgcaccgctgccttcccgaccgttctcgccgccgccgtctccgcgcctgccaccccgcgcgctcggccaccggcgcccacggtgcggctcgatcaaggccagatcagaacccgccccggtccgcgtcacgccgatattttctgttttttggtacggatctagggttttcctgctgcggattcgttcgattcgctcatggccgctgggcgccatgggggttacagggactacgaggcgagggagcgggagctcgacgcggaggcctccaggaggagcaaggagcagcaccaccatctcggcggccgccaccgcgacgtggaccgccaccgcgatggcgggcgcagcaggggtggcagagactttgccaacggctacggtcgccgacgctcgccgccaccccggagccggctggcgggaaggcttggtgaccgtgagcctggcgaggtgctgagcggtagtgcatctgatgactccggtgggaggccgcatagagggagggagaatggcgtgctcagttccggcagggagggtgatgtgatggcagtcactgatgactccggtgggaggtcgcataggaggagggagaatggcgtgctcagttccggcagggatggtgatgtgatggcagtcacagggatatcttcgccgagcaagaagaggaaattctcaccgataatttgggacagggatagcccaaagccaccacattctgatgcagccagggacaagaaagctgtagaacctgtgccttctgagctccctccgcccccgccgttgcctccacaagaccacatcacactgaggttggctgtggagaagtcacttatggatatagaacctactgttggtacagagagtgctgtgcagttgctggaacatgaggtgaataaggtgacagagcaggaagaggagtatgcaacaatgaggaacatatcgacttcaagatgggctggtgctaatgatgatgatgatgatggggcagctccagtgaagaagaaaagtctgtctcctgcagactcctctgtggcagggcagtggaaaagagcaagtccagaacctggtgaagtatctggaggaaggacaatgtctaggtcatctgactctgggaaaatgagtaatgatgagaaagaagactttgaagcaaatgaagatgactatatggatgtcgacaagggacatgctagtgacagtgatacagaaaaccgtatgtcagatactgactcagacaatgaaatacacagacctgaaacccctgaaagagagaaggcaccacacaggtgtatcaatatgcttcaagattgcagaagtgttgatgagtttgagaggctcaacaaaattaacgagggcacatatggtgttgtatacagagcaagggataagaagacaagtgagattgttgcattgaagaaggtaaagatggagaaggagcgagaaggtttcccattaacctctcttagggaaataaatatcctcttgtctttccacaatccttcaattgtggatgttaaggaagtagtagttggaagtagtctagatagtatttttatggttatggagtacatggaacatgatcttaaaggtgtcatggagaccatgaaacaaccatatacccaaagcgaggtaaagtgtttgatgcttcagctgctagaaggtgtaaaatatctacatgacaattgggtgcttcatagggatctgaagacctcaaatcttttgttgaataaccgtggtgagttaaaaatatgtgattttggactgtctcgtcaatatggaagcccattaaaaccttatactcaactggttgtgactttgtggtacagggccccagaattgttgttaggaacaaaggagtattctactgctattgatatgtggtctgtgggctgtataatggctgagcttcttgccaaagaaccgttattcaatggaaaaacagagtttgaacagctagataagatttttagaacactcggcacacctaatgagaagatttggcctggctatgctaaattaccaggtgtgaaagtaaattttgttaaacaaccgtataatagactaagggataagttcccagccgcttctttttctgggcgaccaatcctgtctgaagctggttttgatctattgaacagactgctgacttatgaccctgataagcgcatatcagcagacgatgctcttaagcacaaatggttctctgaagttcctctgcctaaatcaaaggacttcatgccaacattccctgctcttaatgaacttgacaggcgttccagaaggtatctgaagagtcctgatcctctggaagagcaacgtttgaaagaactgcaagggaacataggcaaccatgggctttttgggtgaactagaagcacttgattgggtctgcaagggaacataggcaaccgtgggctttttggctgaactagaagcacttgattgggtcctgtccgtcctaactgttatgcttcacactgaaatcctgagttcatgaggttagatatcttctgaggtgaggtgccatggacatgaagtatcacatcttctcggtgtctagcagcaactgatagtgttctttagcaggcttggtaccggtttaaatggataaggtttctccttgtggcccatcatagaaattttgttgcaggattaacgcttcatccagatcgatcataaaagcaaatataatctacctgcatcataaggtgtggcgtgttggcttttattggttacaccagtttcacctttggaacttctctatgtaaaatattccagattggtacgttgtaaacaatgtccagtgtgttggatttaaatttaaaacgaaacatcatcattattagttttctttatgctccttgtgccttttcttttgatctttgcgttttgtttgcaagagacaaaagaagcgcaggggaaggatgccttttgctttcatcaggaaatcaatggcattaatacaacttagaagctaagctgtggctgcttcaagataggaagcttgatggctgtcagcttattgtacctaagtgactaaattttgtggagggccttcaaaagtgttcatctcttact

SEQ ID NO: 100804 - DNA, 3116 bp, Zea Mays
gaggcgacccgtaacaacgcggagcgtcagcctatagccgtcgctcccgtgtcccgtccgccgtcccccttcctctcgtattcgcttcgccgcccaacccactgtgcaccgctgccttcccgaccgttctcgccgccgccgtctccgcgcctgccaccccgcgcgctcggccaccggcgcccacggtgcggctcgatcaaggccagatcagaacccgccccggtccgcgtcacgccgatattttctgttttttggtacggatctagggttttcctgctgcggattcgttcgattcgctcatggccgctgggcgccatgggggttacagggactacgaggcgagggagcgggagctcgacgcggaggcctccaggaggagcaaggagcagcaccaccatctcggcggccgccaccgcgacgtggaccgccaccgcgatggcgggcgcagcaggggtggcagagactttgccaacggctacggtcgccgacgctcgccgccaccccggagccggctggcgggaaggcttggtgaccgtgagcctggcgaggtgctgagcggtagtgcatctgatgactccggtgggaggccgcatagagggagggagaatggcgtgctcagttccggcagggagggtgatgtgatggcagtcactgatgactccggtgggaggtcgcataggaggagggagaatggcgtgctcagttccggcagggatggtgatgtgatggcagtcacagggatatcttcgccgagcaagaagaggaaattctcaccgataatttgggacagggatagcccaaagccaccacattctgatgcagccagggacaagaaagctgtagaacctgtgccttctgagctccctccgcccccgccgttgcctccacaagaccacatcacactgaggttggctgtggagaagtcacttatggatatagaacctactgttggtacagagagtgctgtgcagttgctggaacatgaggtgaataaggtgacagagcaggaagaggagtatgcaacaatgaggaacatatcgacttcaagatgggctggtgctaatgatgatgatgatgatggggcagctccagtgaagaagaaaagtctgtctcctgcagactcctctgtggcagggcagtggaaaagagcaagtccagaacctggtgaagtatctggaggaaggacaatgtctaggtcatctgactctgggaaaatgagtaatgatgagaaagaagactttgaagcaaatgaagatgactatatggatgtcgacaagggacatgctagtgacagtgatacagaaaaccgtatgtcagatactgactcagacaatgaaatacacagacctgaaacccctgaaagagagaaggcaccacacaggtgtatcaatatgcttcaagattgcagaagtgttgatgagtttgagaggctcaacaaaattaacgagggcacatatggtgttgtatacagagcaagggataagaagacaagtgagattgttgcattgaagaaggtaaagatggagaaggagcgagaaggtttcccattaacctctcttagggaaataaatatcctcttgtctttccacaatccttcaattgtggatgttaaggaagtagtagttggaagtagtctagatagtatttttatggttatggagtacatggaacatgatcttaaaggtgtcatggagaccatgaaacaaccatatacccaaagcgaggtaaagtgtttgatgcttcagctgctagaaggtgtaaaatatctacatgacaattgggtgcttcatagggatctgaagacctcaaatcttttgttgaataaccgtggtgagttaaaaatatgtgattttggactgtctcgtcaatatggaagcccattaaaaccttatactcaactggttgtgactttgtggtacagggccccagaattgttgttaggaacaaaggagtattctactgctattgatatgtggtctgtgggctgtataatggctgagcttcttgccaaagaaccgttattcaatggaaaaacagagtttgaacagctagataagatttttagaacactcggcacacctaatgagaagatttggcctggctatgctaaattaccaggtgtgaaagtaaattttgttaaacaaccgtataatagactaagggataagttcccagccgcttctttttctgggcgaccaatcctgtctgaagctggttttgatctattgaacagactgctgacttatgaccctgataagcgcatatcagcagacgatgctcttaagcacaaatggttctctgaagttcctctgcctaaatcaaaggacttcatgccaacattccctgctcttaatgaacttgacaggcgttccagaaggtatctgaagagtcctgatcctctggaagagcaacgtttgaaagaactgcaagggaacataggcaaccatgggctttttgggtgaactagaagcacttgattgggtctgcaagggaacataggcaaccgtgggctttttggctgaactagaagcacttgattgggtcctgtccgtcctaactgttatgcttcacactgaaatcctgagttcatgaggttagatatcttctgaggcttggtaccggtttaaatggataaggtttctccttgtggcccatcatagaaattttgttgcaggattaacgcttcatccagatcgatcataaaagcaaatataatctacctgcatcataaggtgtggcgtgttggcttttattggttacaccagtttcacctttggaacttctctatgtaaaatattccagattggtacgttgtaaacaatgtccagtgtgttggatttaaatttaaaacgaaacatcatcattattagttttctttatgctccttgtgccttttcttttgatctttgcgttttgtttgcaagagacaaaagaagcgcaggggaaggatgccttttgctttcatcaggaaatcaatggcattaatacaacttagaaggtaatgtatgaaaagccaattgctgcaagtgatgtgttgctaactaaaaactagtgagtgtgggagttcttcactgaaagatcagctgcacgaaatgcatgatatcatatcactattt

SEQ ID NO: 100805 - DNA, 3107 bp, Zea Mays
gaggcgacccgtaacaacgcggagcgtcagcctatagccgtcgctcccgtgtcccgtccgccgtcccccttcctctcgtattcgcttcgccgcccaacccactgtgcaccgctgccttcccgaccgttctcgccgccgccgtctccgcgcctgccaccccgcgcgctcggccaccggcgcccacggtgcggctcgatcaaggccagatcagaacccgccccggtccgcgtcacgccgatattttctgttttttggtacggatctagggttttcctgctgcggattcgttcgattcgctcatggccgctgggcgccatgggggttacagggactacgaggcgagggagcgggagctcgacgcggaggcctccaggaggagcaaggagcagcaccaccatctcggcggccgccaccgcgacgtggaccgccaccgcgatggcgggcgcagcaggggtggcagagactttgccaacggctacggtcgccgacgctcgccgccaccccggagccggctggcgggaaggcttggtgaccgtgagcctggcgaggtgctgagcggtagtgcatctgatgactccggtgggaggccgcatagagggagggagaatggcgtgctcagttccggcagggagggtgatgtgatggcagtcactgatgactccggtgggaggtcgcataggaggagggagaatggcgtgctcagttccggcagggatggtgatgtgatggcagtcacagggatatcttcgccgagcaagaagaggaaattctcaccgataatttgggacagggatagcccaaagccaccacattctgatgcagccagggacaagaaagctgtagaacctgtgccttctgagctccctccgcccccgccgttgcctccacaagaccacatcacactgaggttggctgtggagaagtcacttatggatatagaacctactgttggtacagagagtgctgtgcagttgctggaacatgaggtgaataaggtgacagagcaggaagaggagtatgcaacaatgaggaacatatcgacttcaagatgggctggtgctaatgatgatgatgatgatggggcagctccagtgaagaagaaaagtctgtctcctgcagactcctctgtggcagggcagtggaaaagagcaagtccagaacctggtgaagtatctggaggaaggacaatgtctaggtcatctgactctgggaaaatgagtaatgatgagaaagaagactttgaagcaaatgaagatgactatatggatgtcgacaagggacatgctagtgacagtgatacagaaaaccgtatgtcagatactgactcagacaatgaaatacacagacctgaaacccctgaaagagagaaggcaccacacaggtgtatcaatatgcttcaagattgcagaagtgttgatgagtttgagaggctcaacaaaattaacgagggcacatatggtgttgtatacagagcaagggataagaagacaagtgagattgttgcattgaagaaggtaaagatggagaaggagcgagaaggtttcccattaacctctcttagggaaataaatatcctcttgtctttccacaatccttcaattgtggatgttaaggaagtagtagttggaagtagtctagatagtatttttatggttatggagtacatggaacatgatcttaaaggtgtcatggagaccatgaaacaaccatatacccaaagcgaggtaaagtgtttgatgcttcagctgctagaaggtgtaaaatatctacatgacaattgggtgcttcatagggatctgaagacctcaaatcttttgttgaataaccgtggtgagttaaaaatatgtgattttggactgtctcgtcaatatggaagcccattaaaaccttatactcaactggttgtgactttgtggtacagggccccagaattgttgttaggaacaaaggagtattctactgctattgatatgtggtctgtgggctgtataatggctgagcttcttgccaaagaaccgttattcaatggaaaaacagagtttgaacagctagataagatttttagaacactcggcacacctaatgagaagatttggcctggctatgctaaattaccaggtgtgaaagtaaattttgttaaacaaccactaagggataagttcccagccgcttctttttctgggcgaccaatcctgtctgaagctggttttgatctattgaacagactgctgacttatgaccctgataagcgcatatcagcagacgatgctcttaagcacaaatggttctctgaagttcctctgcctaaatcaaaggacttcatgccaacattccctgctcttaatgaacttgacaggcgttccagaaggtatctgaagagtcctgatcctctggaagagcaacgtttgaaagaactgcaagggaacataggcaaccatgggctttttgggtgaactagaagcacttgattgggtctgcaagggaacataggcaaccgtgggctttttggctgaactagaagcacttgattgggtcctgtccgtcctaactgttatgcttcacactgaaatcctgagttcatgaggttagatatcttctgaggcttggtaccggtttaaatggataaggtttctccttgtggcccatcatagaaattttgttgcaggattaacgcttcatccagatcgatcataaaagcaaatataatctacctgcatcataaggtgtggcgtgttggcttttattggttacaccagtttcacctttggaacttctctatgtaaaatattccagattggtacgttgtaaacaatgtccagtgtgttggatttaaatttaaaacgaaacatcatcattattagttttctttatgctccttgtgccttttcttttgatctttgcgttttgtttgcaagagacaaaagaagcgcaggggaaggatgccttttgctttcatcaggaaatcaatggcattaatacaacttagaaggtaatgtatgaaaagccaattgctgcaagtgatgtgttgctaactaaaaactagtgagtgtgggagttcttcactgaaagatcagctgcacgaaatgcatgatatcatatcactattt

SEQ ID NO: 100806 - DNA, 3039 bp, Zea Mays
gaggcgacccgtaacaacgcggagcgtcagcctatagccgtcgctcccgtgtcccgtccgccgtcccccttcctctcgtattcgcttcgccgcccaacccactgtgcaccgctgccttcccgaccgttctcgccgccgccgtctccgcgcctgccaccccgcgcgctcggccaccggcgcccacggtgcggctcgatcaaggccagatcagaacccgccccggtccgcgtcacgccgatattttctgttttttggtacggatctagggttttcctgctgcggattcgttcgattcgctcatggccgctgggcgccatgggggttacagggactacgaggcgagggagcgggagctcgacgcggaggcctccaggaggagcaaggagcagcaccaccatctcggcggccgccaccgcgacgtggaccgccaccgcgatggcgggcgcagcaggggtggcagagactttgccaacggctacggtcgccgacgctcgccgccaccccggagccggctggcgggaaggcttggtgaccgtgagcctggcgaggtgctgagcggtagtgcatctgatgactccggtgggaggccgcatagagggagggagaatggcgtgctcagttccggcagggagggtgatgtgatggcagtcactgatgactccggtgggaggtcgcataggaggagggagaatggcgtgctcagttccggcagggatggtgatgtgatggcagtcacagggatatcttcgccgagcaagaagaggaaattctcaccgataatttgggacagggatagcccaaagccaccacattctgatgcagccagggacaagaaagctgtagaacctgtgccttctgagctccctccgcccccgccgttgcctccacaagaccacatcacactgaggttggctgtggagaagtcacttatggatatagaacctactgttggtacagagagtgctgtgcagttgctggaacatgaggtgaataaggtgacagagcaggaagaggagtatgcaacaatgaggaacatatcgacttcaagatgggctggtgctaatgatgatgatgatgatggggcagctccagtgaagaagaaaagtctgtctcctgcagactcctctgtggcagggcagtggaaaagagcaagtccagaacctggtgaagtatctggaggaaggacaatgtctaggtcatctgactctgggaaaatgagtaatgatgagaaagaagactttgaagcaaatgaagatgactatatggatgtcgacaagggacatgctagtgacagtgatacagaaaaccgtatgtcagatactgactcagacaatgaaatacacagacctgaaacccctgaaagagagaaggcaccacacaggtgtatcaatatgcttcaagattgcagaagtgttgatgagtttgagaggctcaacaaaattaacgagggcacatatggtgttgtatacagagcaagggataagaagacaagtgagattgttgcattgaagaaggtaaagatggagaaggagcgagaaggtttcccattaacctctcttagggaaataaatatcctcttgtctttccacaatccttcaattgtggatgttaaggaagtagtagttggaagtagtctagatagtatttttatggttatggagtacatggaacatgatcttaaaggtgtcatggagaccatgaaacaaccatatacccaaagcgaggtaaagtgtttgatgcttcagctgctagaaggtgtaaaatatctacatgacaattgggtgcttcatagggatctgaagacctcaaatcttttgttgaataaccgtggtgagttaaaaatatgtgattttggactgtctcgtcaatatggaagcccattaaaaccttatactcaactggttgtgactttgtggtacagggccccagaattgttgttaggaacaaaggagtattctactgctattgatatgtggtctgtgggctgtataatggctgagcttcttgccaaagaaccgttattcaatggaaaaacagagtttgaacagctagataagatttttagaacactcggcacacctaatgagaagatttggcctggctatgctaaattaccaggtgtgaaagtaaattttgttaaacaaccgtataatagactaagggataagttcccagccgcttctttttctgggcgaccaatcctgtctgaagctggttttgatctattgaacagactgctgacttatgaccctgataaggtgcagtttttactcaaattggtatttgtttttagatttttattatcatcatgcataccagactgagcacacttttttctctcgtacagcgcatatcagcagacgatgctcttaagcacaaatggttctctgaagttcctctgcctaaatcaaaggacttcatgccaacattccctgctcttaatgaacttgacaggcgttccagaaggtatctgaagagtcctgatcctctggaagagcaacgtttgaaagaactgcaagggaacataggcaaccatgggctttttgggtgaactagaagcacttgattgggtctgcaagggaacataggcaaccgtgggctttttggctgaactagaagcacttgattgggtcctgtccgtcctaactgttatgcttcacactgaaatcctgagttcatgaggttagatatcttctgaggtgaggtgccatggacatgaagtatcacatcttctcggtgtctagcagcaactgatagtgttctttagcaggcttggtaccggtttaaatggataaggtttctccttgtggcccatcatagaaattttgttgcaggattaacgcttcatccagatcgatcataaaagcaaatataatctacctgcatcataaggtgtggcgtgttggcttttattggttacaccagtttcacctttggaacttctctatgtaaaatattccagattggtacgttgtaaacaatgtccagtgtgttggatttaaatttaaaacgaaacatcatcattattagttttcttta

SEQ ID NO: 100807 - DNA, 2859 bp, Zea Mays
gaggcgacccgtaacaacgcggagcgtcagcctatagccgtcgctcccgtgtcccgtccgccgtcccccttcctctcgtattcgcttcgccgcccaacccactgtgcaccgctgccttcccgaccgttctcgccgccgccgtctccgcgcctgccaccccgcgcgctcggccaccggcgcccacggtgcggctcgatcaaggccagatcagaacccgccccggtccgcgtcacgccgatattttctgttttttggtacggatctagggttttcctgctgcggattcgttcgattcgctcatggccgctgggcgccatgggggttacagggactacgaggcgagggagcgggagctcgacgcggaggcctccaggaggagcaaggagcagcaccaccatctcggcggccgccaccgcgacgtggaccgccaccgcgatggcgggcgcagcaggggtggcagagactttgccaacggctacggtcgccgacgctcgccgccaccccggagccggctggcgggaaggcttggtgaccgtgagcctggcgaggtgctgagcggtagtgcatctgatgactccggtgggaggccgcatagagggagggagaatggcgtgctcagttccggcagggagggtgatgtgatggcagtcactgatgactccggtgggaggtcgcataggaggagggagaatggcgtgctcagttccggcagggatggtgatgtgatggcagtcacagggatatcttcgccgagcaagaagaggaaattctcaccgataatttgggacagggatagcccaaagccaccacattctgatgcagccagggacaagaaagctgtagaacctgtgccttctgagctccctccgcccccgccgttgcctccacaagaccacatcacactgaggttggctgtggagaagtcacttatggatatagaacctactgttggtacagagagtgctgtgcagttgctggaacatgaggtgaataaggtgacagagcaggaagaggagtatgcaacaatgaggaacatatcgacttcaagatgggctggtgctaatgatgatgatgatgatggggcagctccagtgaagaagaaaagtctgtctcctgcagactcctctgtggcagggcagtggaaaagagcaagtccagaacctggtgaagtatctggaggaaggacaatgtctaggtcatctgactctgggaaaatgagtaatgatgagaaagaagactttgaagcaaatgaagatgactatatggatgtcgacaagggacatgctagtgacagtgatacagaaaaccgtatgtcagatactgactcagacaatgaaatacacagacctgaaacccctgaaagagagaaggcaccacacaggtgtatcaatatgcttcaagattgcagaagtgttgatgagtttgagaggctcaacaaaattaacgagggcacatatggtgttgtatacagagcaagggataagaagacaagtgagattgttgcattgaagaaggtaaagatggagaaggagcgagaaggtttcccattaacctctcttagggaaataaatatcctcttgtctttccacaatccttcaattgtggatgttaaggaagtagtagttggaagtagtctagatagtatttttatggttatggagtacatggaacatgatcttaaaggtgtcatggagaccatgaaacaaccatatacccaaagcgaggtaaagtgtttgatgcttcagctgctagaaggtgtaaaatatctacatgacaattgggtgcttcatagggatctgaagacctcaaatcttttgttgaataaccgtgggccccagaattgttgttaggaacaaaggagtattctactgctattgatatgtggtctgtgggctgtataatggctgagcttcttgccaaagaaccgttattcaatggaaaaacagagtttgaacagctagataagatttttagaacactcggcacacctaatgagaagatttggcctggctatgctaaattaccaggtgtgaaagtaaattttgttaaacaaccgtataatagactaagggataagttcccagccgcttctttttctgggcgaccaatcctgtctgaagctggttttgatctattgaacagactgctgacttatgaccctgataagcgcatatcagcagacgatgctcttaagcacaaatggttctctgaagttcctctgcctaaatcaaaggacttcatgccaacattccctgctcttaatgaacttgacaggcgttccagaaggtatctgaagagtcctgatcctctggaagagcaacgtttgaaagaactgcaagggaacataggcaaccatgggctttttgggtgaactagaagcacttgattgggtctgcaagggaacataggcaaccgtgggctttttggctgaactagaagcacttgattgggtcctgtccgtcctaactgttatgcttcacactgaaatcctgagttcatgaggttagatatcttctgaggtgaggtgccatggacatgaagtatcacatcttctcggtgtctagcagcaactgatagtgttctttagcaggcttggtaccggtttaaatggataaggtttctccttgtggcccatcatagaaattttgttgcaggattaacgcttcatccagatcgatcataaaagcaaatataatctacctgcatcataaggtgtggcgtgttggcttttattggttacaccagtttcacctttggaacttctctatgtaaaatattccagattggtacgttgtaaacaatgtccagtgtgttggatttaaatttaaaacgaaacatcatcattattagttttcttta

SEQ ID NO: 100808 - DNA, 2657 bp, Zea Mays
gaggcgacccgtaacaacgcggagcgtcagcctatagccgtcgctcccgtgtcccgtccgccgtcccccttcctctcgtattcgcttcgccgcccaacccactgtgcaccgctgccttcccgaccgttctcgccgccgccgtctccgcgcctgccaccccgcgcgctcggccaccggcgcccacggtgcggctcgatcaaggccagatcagaacccgccccggtccgcgtcacgccgatattttctgttttttggtacggatctagggttttcctgctgcggattcgttcgattcgctcatggccgctgggcgccatgggggttacagggactacgaggcgagggagcgggagctcgacgcggaggcctccaggaggagcaaggagcagcaccaccatctcggcggccgccaccgcgacgtggaccgccaccgcgatggcgggcgcagcaggggtggcagagactttgccaacggctacggtcgccgacgctcgccgccaccccggagccggctggcgggaaggcttggtgaccgtgagcctggcgaggtgctgagcggtagtgcatctgatgactccggtgggaggccgcatagagggagggagaatggcgtgctcagttccggcagggagggtgatgtgatggcagtcactgatgactccggtgggaggtcgcataggaggagggagaatggcgtgctcagttccggcagggatggtgatgtgatggcagtcacagggatatcttcgccgagcaagaagaggaaattctcaccgataatttgggacagggatagcccaaagccaccacattctgatgcagccagggacaagaaagctgtagaacctgtgccttctgagctccctccgcccccgccgttgcctccacaagaccacatcacactgaggttggctgtggagaagtcacttatggatatagaacctactgttggtacagagagtgctgtgcagttgctggaacatgaggtgaataaggtgacagagcaggaagaggagtatgcaacaatgaggaacatatcgacttcaagatgggctggtgctaatgatgatgatgatgatggggcagctccagtgaagaagaaaagtctgtctcctgcagactcctctgtggcagggcagtggaaaagagcaagtccagaacctggtgaagtatctggaggaaggacaatgtctaggtcatctgactctgggaaaatgagtaatgatgagaaagaagactttgaagcaaatgaagatgactatatggatgtcgacaagggacatgctagtgacagtgatacagaaaaccgtatgtcagatactgactcagacaatgaaatacacagacctgaaacccctgaaagagagaaggcaccacacaggtgtatcaatatgcttcaagattgcagaagtgttgatgagtttgagaggctcaacaaaattaacgagggcacatatggtgttgtatacagagcaagggataagaagacaagtgagattgttgcattgaagaaggtaaagatggagaaggagcgagaaggtttcccattaacctctcttagggaaataaatatcctcttgtctttccacaatccttcaattgtggatgttaaggaagtagtagttggaagtagtctagatagtatttttatggttatggagtacatggaacatgatcttaaaggtgtcatggagaccatgaaacaaccatatacccaaagcgaggtaaagtgtttgatgcttcagctgctagaaggtgtaaaatatctacatgacaattgggtgcttcatagggatctgaagacctcaaatcttttgttgaataaccgtggtgagttaaaaatatgtgattttggactgtctcgtcaatatggaagcccattaaaaccttatactcaactggttgtgactttgtggtacagggccccagaattgttgttaggaacaaaggagtattctactgctattgatatgtggtctgtgggctgtataatggctgagcttcttgccaaagaaccgttattcaatggaaaaacagagtttgaacagctagataagatttttagaacactcggcacacctaatgagaagatttggcctggctatgctaaattaccaggtgtgaaagtaaattttgttaaacaaccgtataatagactaagggataagttcccagccgcttctttttctgggcgaccaatcctgtctgaagctggttttgatctattgaacagactgctgacttatgaccctgataagcgcatatcagcagacgatgctcttaagcacaaatggttctctgaagttcctctgcctaaatcaaaggacttcatgccaacattccctgctcttaatgaacttgacaggcgttccagaaggtatctgaagagtcctgatcctctggaagagcaacgtttgaaagaactgcaagggaacataggcaaccatgggctttttgggtgaactagaagcacttgattgggtctgcaagggaacataggcaaccgtgggctttttggctgaactagaagcacttgattgggtcctgtccgtcctaactgttatgcttcacactgaaatcctgagttcatgaggttagatatcttctgaggattaacgcttcatccagatcgatcataaaagcaaatataatctacc

SEQ ID NO: 100809 - DNA, 366 bp, Zea Mays
atggctgcgaaagcagaaagcaaatcggactggcaccgaagcccgattcacccgcggcgtggtcgcagggtcgctcctaccttcaccaacaacatgaaagaagcaaaggcaaggctggtggactatcagggggcatggctcatctcgcagtggcgagatctgacggcacacgacttgatccaatgcttcttaggcggtttggcctactccttgctattgctgtcgtccccagccaggtcatccgcccttgacgcagccgtcaaagtactgttgggggagtggggcttagcggtagtgctgctctcgggtcggctgcgagaggttgacgacgagcttgagattgcacctacgacagttggaagctga

SEQ ID NO: 100810 - DNA, 96 bp, Zea Mays
ttattcagtttttttgttaaatacagtaaggtttaacattactagtaaggatacaatatttctgtttcagcttttattagtggaactagaataaaa

SEQ ID NO: 100811 - DNA, 1453 bp, Zea Mays
gcttgaccagtgctggcaacgggtagcctacggcgcagcagcagtacccgccaaaaggctctcgcagttgccgccgctgttcccccacgctctctccctccacatctgctccacctgctcaaaagtcaggcccttcgtctccggcacgtacgtggccacgaagacgaaggccagcaccgcgatcccggcgacgatcaggaacgtcgggccggtcccgaccagccccacgatcgacaggaacgtctgtgccacgacgaggttagagacccagttcacggtggccgacatgccgccgcacgtcccacggtacgcctcggggtagatctccgagttcacggcccacggcacgggccccatgcccggggagaagaaggcgatgtacagagcgaggccggccaccgcgaaccagcctagcgcgccctggcacgtgccgctggcggcgctcatgcagaggccggatgatgactgcagtatgaaggccgtggcgaggatggccagggagaccacgaccccggccaagcttgtgagggccagacggcggcggccgcaacggtcgattaggtagatcccgacgatggttccggcggcgttcatggccgcgacgatcagggagaggagcaaggccagcctgttggaggagaaaccagccatctggactatcgtggggctgtaatacatcacggtgttgatcccggtaaattgctggaaggcctgcatggttttgataagcctagatgagaaaaaaggtaccgcccagttgcctgcttgatgcgtcaactgaatctagacaacagaacatgtagccaagtggaatatctgcttcactggcaactgaaagaaaatagagcacgaacgaaccaacgaacgagtaagcaggctgaagaacatacctgaaggccagccccagcaaagaaagctagcctcaattctttcgacttgaagacatccagatagcttccggtattgttggactggaattcatgcatggaggatgtagcaagcagctctacctcttcctccaagcggtcggattcatagatcctctcaaggacggcaatagcttttgccttctcatcctggaaggaaaaaaaagtaaagataagaacaggataccataccgaaggagacagcgcagaactggaccaagaggcaataattaaccttccagtaaagccaacgcggagattctggcaggaatagcatcagcacaaactgtataatggcaggaacagcagcaacaccaagcatccagcgccatgttccaggcacctgttccatgtagcgtgcatattagtaattaccacaatggcaacaactaatatgcaatattcctattggccatcgttataaatgtttcacatcaacttgccattacaaataaaaaccatgaaaatcaaacgagtcgtcagttttaatcatctgggcatgtaaacatgtagcaattcatgaacag

SEQ ID NO: 100812 - DNA, 1204 bp, Zea Mays
gtacgtggccacgaagacgaaggccagcaccgcgatcccggcgacgatcaggaacgtcgggccggtcccgaccagccccacgatcgacaggaacgtctgtgccacgacgaggttagagacccagttcacggtggccgacatgccgccgcacgtcccacggtacgcctcggggtagatctccgagttcacggcccacggcacgggccccatgcccggggagaagaaggcgatgtacagagcgaggccggccaccgcgaaccagcctagcgcgccctggcacgtgccgctggcggcgctcatgcagaggccggatgatgactgcagtatgaaggccgtggcgaggatggccagggagaccacgaccccggccaagcttgtgagggccagacggcggcggccgcaacggtcgattaggtagatcccgacgatggttccggcggcgttcatggccgcgacgatcagggagaggagcaaggccagcctgttggaggagaaaccagccatctggactatcgtggggctgtaatacatcacggtgttgatcccggtaaattgctggaaggcctgcatggttttgataagcctagatgagaaaaaaggtaccgcccagttgcctgcttgatgcgtcaactgaatctagacaacagaacatgtagccaagtggaatatctgcttcactggcaactgaaagaaaatagagcacgaacgaaccaacgaacgagtaagcaggctgaagaacatacctgaaggccagccccagcaaagaaagctagcctcaattctttcgacttgaagacatccagatagcttccggtattgttggactggaattcatgcatggaggatgtagcaagcagctctacctcttcctccaagcggtcggattcatagatcctctcaaggacggcaatagcttttgccttctcatcctggaaggaaaaaaaagtaaagataagaacaggataccataccgaaggagacagcgcagaactggaccaagaggcaataattaaccttccagtaaagccaacgcggagattctggcaggaatagcatcagcacaaactgtataatggcaggaacagcagcaacaccaagcatccagcgccatgttccaggcacctgttccatgtagcgtgcatattagtaattaccacaatggcaacaactaatatgcaatattcctattggccatcgttataaa

SEQ ID NO: 100813 - DNA, 2001 bp, Zea Mays
atggcgtcggcgctgctctcgtacctgcaggccctgtggccgttctctgccctcctgagggaggaggacgacctacgcgcgtcagcgcggctggtcgggtcgctctctgtgccggaggagacgaagcagttcgtgctcgcgctccgggagcccggcgggtcgccgcacgaccggcaccgggacggcgctggcgtgatctacatcctcgccgcgcagaatctgtcggagcagtccgcctcggacgccgagcgcctgatcagggaggtgcgaccgagggccgtggtcacccaggtcgcgcgtccggccctcgaagacgtccggatcgaagaggattgcctggcaggcaatggaggcgggggcgtgccggtaccggcgtcgccgtttcaggtgatcaagcggtgcgtcaccgagaagaggagcagggaccagtacgtgaaggctgccgcgtgccaggtcctgcaggagattttcggggtcggtttctatggccatctgctcgctgccaagagagccgccgaggagacggggtcgtgttttctattgcttgagtctccctatgagaggaattgtggcggcggtggatcggccagccagaatagtactgcagacgataactcagctcagtcattacaggctagctgctcgctagctcacatcaccatggatgatgcctcaggtttgcaattgcaggctaactgcttgacccccaggagcgccacttcaattgtgagctcccatggtaggagtatatgccttatggatgataatggaggacaactcttgaagtcactggcaccaactcttaatttcttgatgtcccaagcagccccctccaatgctgccactgagtgcaggccatctgaatgcaagttgattgacagatatgaagctccaccatttgctcagtctgtctaccctttacttgctgatctttatcatatatttgctgatattccatcgattggtagggctatggtttctgctcagaagttgcttacacaagttcacaagggggagccaatcagcagtgatatgttgtctgatgtgtatgtatttagaattgcaatagaagccctcaggatgggcttaaacagtgcagccaggtcccaaattgataccggagataaacatggctcaaatgatctggatttttcaaaactccaatctgatgagaagtgccacattcttcttgtgcaagctctcaggagtcaactaagagagtttggttctgtggtggctatagttgacgcgagctgcttagctggaataaggagacattggaacacccctgttccttcagaaatcactcaattagctagcagatgcttcaatcactatggtgctgaaaatgatgataaaattgaggtaccttcagcagacgacactgacaaaaaaagttggatatctgagaaacctgtggttgctgttggtgcaggagggacagcactcctgggcttttcatcattatcgaaatctcttcaggcttctgccttccttaagatggccccttacaaaagtccagcggttctgaagtatggattaatgcagctccaaagacatgctgctattgtattaagcaagatactccctcacggggttgttaccgctggctcgaaggcttctgctttgcagttcacggcttcagcagagaagattcgagcggtcacgcataccgtaatatcatcggccgagagaacaagcttattggttatgcggacttcattctacgaaataatgcagaagaggcacaggcagcctttcagaatatttccttgggcaacatttggctgcagcatggctgcatgtgctggccttgtgatgcatggagatgggatcgagtgcgcagccgaggcagcaccttctgttcccatgattgcttctctgggccgcggcctcgagagcttacgtctgacatcccaggaggtcagacaaacgaagggccaaaacgtgaaagaagctttgcgagcattaatgagcagcttgaagaaatcagcaaaataa

SEQ ID NO: 100814 - DNA, 882 bp, Zea Mays
caaaccgccgtcaggaatggagtgaggtggtgggagccagccggggcgagtaaatatgtatacacacgcagcaggaggggaagttatctgccggtggctcgggtcaactgttgctgtttggttcgcttcgtggcgtcacaggactcgactcaggacagccagtggcactagcagcctcccccaccgtgagtccgtgatgggcacggtgcgtgcgtcggtgcccctgcaggtgatttgacagtctgaacccccagtggccaaaggagtctgagataccggtgccaccatgtgacggctaggggcgaacgatagcccaagagaaggtccgcgtggcacgtagaaaaaaagaacacgctgctctgtcctccatattcgctggtgtcagcatcattacacgggtgccaacaatcctataaacattgtttaaacagcattttacactagatttttttttcgaaattcatcggtagccagatgcacccaacgagtctgaccttcacccgtttgacgtgaagcggatgcggagagagctttcgacaagcgacgacagggcacaggatgatatgggaggagcgtgtgacctgagtggagcatccgcagcttcatatcatatgcgttgctttgttgcttccctccagtttcacgcacggccgcgttcccttgtcaagcaagcgaggaccaagtcggcggtcgcggtcgagtccacgaatggaggagaatcttgacgacgggggcagtaggtctaggtaaggacgcagccttgaccttgtcttttcttttcccatgacacggttggtggtggttagttctcagagtttgagccgagcagccgagctagttgagctagcacgagggcgacaggaagagaattttgcaaacatg

SEQ ID NO: 100815 - DNA, 1814 bp, Zea Mays
ctccactgcactgcgctgcgcccatccatccttaaaccctcctgcgcgcgtaggcctcgtcttgtccttccccagcacaacctctcctcctccttcgccaggtgcctcttcgttctcctctccgggctatcaggacgaaataactggccgcgctgcacgccggccgcctcgagaagaagcgctcgccccgcgcgcgcggctccgggctaccaggacgaaataactggccgcgctgcacgccggccgccgcgagaagaagcgctcgccccgcgcgctctgccgctggttcggccgtgccatcccgacgaggttcccccagctgtgcccgctcgatctccttccgcgcgcacgcgcacgcagtggtccgtcgccgctgattgatcctggaaaaacagggcaaggagctactttgagcccgagactgaactgaagaagatgatgatggccgaggtggccaaccacagcaagaggaaccacacggacagctacttcagtggcaaggccgtcgccgtccccgccgccgcggccaccagctcggaggagttcggcagcatgtcgtcgaagaagccgaggaatgccagccccagactcgcgcccgtatcaccaaaggtacgtacgcacgcacgcaccgtacgatgccagtgtccactgtcccccgtacgtacgtacgtacgtctccggtctcccatggctatctgtttggctcaagttttttttcttgttggtgctgctgctgctgctgcgacgactgtgcaggagaagaaggacaagatcggcgagagggtcgcagcgctccagcagctcgtgtcaccgttcggaaagaccgacacggcttctgtcctgcaggaggcgtcggggtacatcaagttcctgcaccagcagctggaggtcctgagctccccttacatgcgcgctcctccggccgctggcgctgcgcctgaggacccccagcgctacagcctccggagccgcgggctgtgcctggtgccggtggacctgacgctgcagctgacccagagcaacggggccgacctgtgggcgccggcgcacacggccaggcgaaggtgaggactgaggaggagccggtctgtctgtccggagggaaccgcgcaagtgctgccgcgtctgcgtgcgcgccgtggagttgagtttccaggcgcctgactgacccgattcgacctcctagcaagaaactaaagcaagcgtgcgtgtccgtatcagccgccttgtattatactcctagtagtactctcgtgacctgcctggtcaggtctctctctcctagcttgttgtccgccgtttatgtgttgagcggcatgtggattagaagcctgtgtggctggctgtcagcaagcagagcggcagtttgatgcctgttccttgagatggatagtgttatcgagttcagaagaataccatgcgcgtgtgcctgatgtatgctctctctctctcgctcactgtctctctcagctgtgatggaactgaaaccgcacgttcaggcaaggcaaaacctaagtgttacaggctcgttcgccctcacatccgcaggacgaagcaacgcaggcccacactttttgaccggcagcggcaggcccctcgggccaacagagactgttccggggtccaaagaatctaactcatcatgattcatgaaccaaaatgaacaggtacaccggacgaaccttgcggatggaaaaaaacaactcccacgcgtctctctctctctctagtacagtagtaccttcttctcttctgtttcttcgatgaacttcgcacgttctcgaatgaataatagaggagcagggtgaagcaaa

SEQ ID NO: 100816 - DNA, 1899 bp, Zea Mays
gatcccaaatgtgcccggcccggtccctctccactgcactgcgctgcgcccatccatccttaaaccctcctgcgcgcgtaggcctcgtcttgtccttccccagcacaacctctcctcctccttcgccaggtgcctcttcgttctcctctccgggctatcaggacgaaataactggccgcgctgcacgccggccgcctcgagaagaagcgctcgccccgcgcgcgcggctccgggctaccaggacgaaataactggccgcgctgcacgccggccgccgcgagaagaagcgctcgccccgcgcgctctgccgctggttcggccgtgccatcccgacgaggttcccccagctgtgcccgctcgatctccttccgcgcgcacgcgcacgcagtggtccgtcgccgctgattgatcctggaaaaacagggcaaggagctactttgagcccgagactgaactgaagaagatgatgatggccgaggtggccaaccacagcaagaggaaccacacggacagctacttcagtggcaaggccgtcgccgtccccgccgccgcggccaccagctcggaggagttcggcagcatgtcgtcgaagaagccgaggaatgccagccccagactcgcgcccgtatcaccaaaggtacgtacgcacgcacgcaccgtacgatgccagtgtccactgtcccccgtacgtacgtacgtacgtctccggtctcccatggctatctgtttggctcaagttttttttcttgttggtgctgctgctgctgctgcgacgactgtgcaggagaagaaggacaagatcggcgagagggtcgcagcgctccagcagctcgtgtcaccgttcggaaagaccgacacggcttctgtcctgcaggaggcgtcggggtacatcaagttcctgcaccagcagctggaggtcctgagctccccttacatgcgcgctcctccggccgctggcgctgcgcctgaggtgagcttccgccgtccctcgtcttcgtctccactgatgagttcttgacgcaagcctgacccccagcgctacagcctccggagccgcgggctgtgcctggtgccggtggacctgacgctgcagctgacccagagcaacggggccgacctgtgggcgccggcgcacacggccaggcgaaggtgaggactgaggaggagccggtctgtctgtccggagggaaccgcgcaagtgctgccgcgtctgcgtgcgcgccgtggagttgagtttccaggcgcctgactgacccgattcgacctcctagcaagaaactaaagcaagcgtgcgtgtccgtatcagccgccttgtattatactcctagtagtactctcgtgacctgcctggtcaggtctctctctcctagcttgttgtccgccgtttatgtgttgagcggcatgtggattagaagcctgtgtggctggctgtcagcaagcagagcggcagtttgatgcctgttccttgagatggatagtgttatcgagttcagaagaataccatgcgcgtgtgcctgatgtatgctctctctctctcgctcactgtctctctcagctgtgatggaactgaaaccgcacgttcaggcaaggcaaaacctaagtgttacaggctcgttcgccctcacatccgcaggacgaagcaacgcaggcccacactttttgaccggcagcggcaggcccctcgggccaacagagactgttccggggtccaaagaatctaactcatcatgattcatgaaccaaaatgaacaggtacaccggacgaaccttgcggatggaaaaaaacaactcccacgcgtctctctctctctctagtacagtagtaccttcttctcttctgtttcttcgatgaacttcgcacgttctcgaatgaataatagaggagcagggtgaagcaaa

SEQ ID NO: 100817 - DNA, 1772 bp, Zea Mays
gactcgcaatagctagcaactattctcctcttcttctgtatataaacggcgagcgagggccctccgtcttccctgatcccaaatgtgcccggcccggtccctctccactgcactgcgctgcgcccatccatccttaaaccctcctgcgcgcgtaggcctcgtcttgtccttccccagcacaacctctcctcctccttcgccaggtgcctcttcgttctcctctccgggctatcaggacgaaataactggccgcgctgcacgccggccgcctcgagaagaagcgctcgccccgcgcgcgcggctccgggctaccaggacgaaataactggccgcgctgcacgccggccgccgcgagaagaagcgctcgccccgcgcgctctgccgctggttcggccgtgccatcccgacgaggttcccccagctgtgcccgctcgatctccttccgcgcgcacgcgcacgcagtggtccgtcgccgctgattgatcctgcaggaaaaacagggcaaggagctactttgagcccgagactgaactgaagaagatgatgatggccgaggtggccaaccacagcaagaggaaccacacggacagctacttcagtggcaaggccgtcgccgtccccgccgccgcggccaccagctcggaggagttcggcagcatgtcgtcgaagaagccgaggaatgccagccccagactcgcgcccgtatcaccaaaggagaagaaggacaagatcggcgagagggtcgcagcgctccagcagctcgtgtcaccgttcggaaagaccgacacggcttctgtcctgcaggaggcgtcggggtacatcaagttcctgcaccagcagctggaggtcctgagctccccttacatgcgcgctcctccggccgctggcgctgcgcctgaggacccccagcgctacagcctccggagccgcgggctgtgcctggtgccggtggacctgacgctgcagctgacccagagcaacggggccgacctgtgggcgccggcgcacacggccaggcgaaggtgaggactgaggaggagccggtctgtctgtccggagggaaccgcgcaagtgctgccgcgtctgcgtgcgcgccgtggagttgagtttccaggcgcctgactgacccgattcgacctcctagcaagaaactaaagcaagcgtgcgtgtccgtatcagccgccttgtattatactcctagtagtactctcgtgacctgcctggtcaggtctctctctcctagcttgttgtccgccgtttatgtgttgagcggcatgtggattagaagcctgtgtggctggctgtcagcaagcagagcggcagtttgatgcctgttccttgagatggatagtgttatcgagttcagaagaataccatgcgcgtgtgcctgatgtatgctctctctctctcgctcactgtctctctcagctgtgatggaactgaaaccgcacgttcaggcaaggcaaaacctaagtgttacaggctcgttcgccctcacatccgcaggacgaagcaacgcaggcccacactttttgaccggcagcggcaggcccctcgggccaacagagactgttccggggtccaaagaatctaactcatcatgattcatgaaccaaaatgaacaggtacaccggacgaaccttgcggatggaaaaaaacaactcccacgcgtctctctctctctctagtacagtagtaccttcttctcttctgtttcttcgatgaacttcgcacgttctcgaatgaataatagaggagcagggtgaagcaaa

SEQ ID NO: 100818 - DNA, 1769 bp, Zea Mays
gactcgcaatagctagcaactattctcctcttcttctgtatataaacggcgagcgagggccctccgtcttccctgatcccaaatgtgcccggcccggtccctctccactgcactgcgctgcgcccatccatccttaaaccctcctgcgcgcgtaggcctcgtcttgtccttccccagcacaacctctcctcctccttcgccaggtgcctcttcgttctcctctccgggctatcaggacgaaataactggccgcgctgcacgccggccgcctcgagaagaagcgctcgccccgcgcgcgcggctccgggctaccaggacgaaataactggccgcgctgcacgccggccgccgcgagaagaagcgctcgccccgcgcgctctgccgctggttcggccgtgccatcccgacgaggttcccccagctgtgcccgctcgatctccttccgcgcgcacgcgcacgcagtggtccgtcgccgctgattgatcctggaaaaacagggcaaggagctactttgagcccgagactgaactgaagaagatgatgatggccgaggtggccaaccacagcaagaggaaccacacggacagctacttcagtggcaaggccgtcgccgtccccgccgccgcggccaccagctcggaggagttcggcagcatgtcgtcgaagaagccgaggaatgccagccccagactcgcgcccgtatcaccaaaggagaagaaggacaagatcggcgagagggtcgcagcgctccagcagctcgtgtcaccgttcggaaagaccgacacggcttctgtcctgcaggaggcgtcggggtacatcaagttcctgcaccagcagctggaggtcctgagctccccttacatgcgcgctcctccggccgctggcgctgcgcctgaggacccccagcgctacagcctccggagccgcgggctgtgcctggtgccggtggacctgacgctgcagctgacccagagcaacggggccgacctgtgggcgccggcgcacacggccaggcgaaggtgaggactgaggaggagccggtctgtctgtccggagggaaccgcgcaagtgctgccgcgtctgcgtgcgcgccgtggagttgagtttccaggcgcctgactgacccgattcgacctcctagcaagaaactaaagcaagcgtgcgtgtccgtatcagccgccttgtattatactcctagtagtactctcgtgacctgcctggtcaggtctctctctcctagcttgttgtccgccgtttatgtgttgagcggcatgtggattagaagcctgtgtggctggctgtcagcaagcagagcggcagtttgatgcctgttccttgagatggatagtgttatcgagttcagaagaataccatgcgcgtgtgcctgatgtatgctctctctctctcgctcactgtctctctcagctgtgatggaactgaaaccgcacgttcaggcaaggcaaaacctaagtgttacaggctcgttcgccctcacatccgcaggacgaagcaacgcaggcccacactttttgaccggcagcggcaggcccctcgggccaacagagactgttccggggtccaaagaatctaactcatcatgattcatgaaccaaaatgaacaggtacaccggacgaaccttgcggatggaaaaaaacaactcccacgcgtctctctctctctctagtacagtagtaccttcttctcttctgtttcttcgatgaacttcgcacgttctcgaatgaataatagaggagcagggtgaagcaaa

SEQ ID NO: 100819 - DNA, 1945 bp, Zea Mays
gactcgcaatagctagcaactattctcctcttcttctgtatataaacggcgagcgagggccctccgtcttccctgatcccaaatgtgcccggcccggtccctctccactgcactgcgctgcgcccatccatccttaaaccctcctgcgcgcgtaggcctcgtcttgtccttccccagcacaacctctcctcctccttcgccaggtgcctcttcgttctcctctccgggctatcaggacgaaataactggccgcgctgcacgccggccgcctcgagaagaagcgctcgccccgcgcgcgcggctccgggctaccaggacgaaataactggccgcgctgcacgccggccgccgcgagaagaagcgctcgccccgcgcgctctgccgctggttcggccgtgccatcccgacgaggttcccccagctgtgcccgctcgatctccttccgcgcgcacgcgcacgcagtggtccgtcgccgctgattgatcctggaaaaacagggcaaggagctactttgagcccgagactgaactgaagaagatgatgatggccgaggtggccaaccacagcaagaggaaccacacggacagctacttcagtggcaaggccgtcgccgtccccgccgccgcggccaccagctcggaggagttcggcagcatgtcgtcgaagaagccgaggaatgccagccccagactcgcgcccgtatcaccaaaggagaagaaggacaagatcggcgagagggtcgcagcgctccagcagctcgtgtcaccgttcggaaagaccgacacggcttctgtcctgcaggaggcgtcggggtacatcaagttcctgcaccagcagctggaggtcctgagctccccttacatgcgcgctcctccggccgctggcgctgcgcctgaggtgagcttccgccgtccctcgtcttcgtctccactgatgagttcttgacgcaagcctgtagaaccctaaacctcgtctccatacatacatactaacatacaccatctgctatttggtgcaagaaagaaacctagtagcagcacgagatcgttgtgtaacacatgcatgtgatccaggacccccagcgctacagcctccggagccgcgggctgtgcctggtgccggtggacctgacgctgcagctgacccagagcaacggggccgacctgtgggcgccggcgcacacggccaggcgaaggtgaggactgaggaggagccggtctgtctgtccggagggaaccgcgcaagtgctgccgcgtctgcgtgcgcgccgtggagttgagtttccaggcgcctgactgacccgattcgacctcctagcaagaaactaaagcaagcgtgcgtgtccgtatcagccgccttgtattatactcctagtagtactctcgtgacctgcctggtcaggtctctctctcctagcttgttgtccgccgtttatgtgttgagcggcatgtggattagaagcctgtgtggctggctgtcagcaagcagagcggcagtttgatgcctgttccttgagatggatagtgttatcgagttcagaagaataccatgcgcgtgtgcctgatgtatgctctctctctctcgctcactgtctctctcagctgtgatggaactgaaaccgcacgttcaggcaaggcaaaacctaagtgttacaggctcgttcgccctcacatccgcaggacgaagcaacgcaggcccacactttttgaccggcagcggcaggcccctcgggccaacagagactgttccggggtccaaagaatctaactcatcatgattcatgaaccaaaatgaacaggtacaccggacgaaccttgcggatggaaaaaaacaactcccacgcgtctctctctctctctagtacagtagtaccttcttctcttctgtttcttcgatgaacttcgcacgttctcgaatgaataatagaggagcagggtgaagcaaa

SEQ ID NO: 100820 - DNA, 1591 bp, Zea Mays
aatgtggaaagagtcatgccaccggtgcaacggtggactggaccggaacagccactccaccaatgtcttccacgtcgcatgccatgcatcgacaggatgcacgctctgatctctatataaggggcggcaacccttgtgacacctgacatcacctcagtatttgtcagaagctcaaatactgatctcactgatccagtatggctatggcaaaggcaggcgcgccgagggtctcggcggcccagctggtgactctcgggctatcactcctctgcgctgtcgccggcccggccgccgcgcagaactgcggctgccagccaaacgtatgctgcagcaagtttggctactgcggcacgaccgacgagtactgcggcgacgggtgccagtcgggcccgtgccgctcgggcggcggcggcagcagtggcggcggtggtgcgaacgtggctagcgtcgtcaccggctccttcttcaacggcatcaagagccaggccgggagcgggtgcgagggcaagaacttctacacccggagcgcgttcctgagcgccgtcaaggcgtacccaggcttcgcccatggcgggtcgcaggtgcagggcaagcgcgagatcgccgccttcttcgcgcacgccacgcacgagaccgggcgtaagctggctctatctattaacctcgctcttcagcgcggcgcaggttctttgatttttgacccatcatgctgatcaattttttttttggaaaattttccgctgctgtgtctgtgtccacgggcagatttctgctacatcagcgagatcaacaagagcaacgcctactgcgacccgaccaagaggcagtggccgtgcgccgcggggcagaagtactacgggcgcggcccgctgcagatctcgtggaactacaactacgggcccgcggggagggccatcggcttcgacgggctcggggaccccggcagggtggcgcgggacgccgtggtggcgttcaaggcggcgctctggttctggatgaacagcgtgcacggggtggtgccgcaggggttcggcgccaccaccagggccatcaacggcgccctcgagtgcggcgggaacaaccccgcccagatgaacgcgcgcgtcggctactacaggcagtactgccgccagctcggcgtcgaccccgggcccaacctcacctgctaggctaggcggcatcggcggacggcgggggccttcaggccttgtgctcggcgtcgcatcgcaccctcgcgcgcgaaaccgagcaatagtgacaataaaacgccggggctagctgagcctgtttgttcgacttcgacctgaataatgaagcagctgtgatatgcatgttgtttcgacacaacgtgtacgcttgcagagcgcttgtactttacgattgcattgtatgcagcaagggtttaaaggctgaatcaataaacggtgtgtaggcgatcactgtttcaccgcacacgtattcggagcaagtccacgttgaattcaccgcttttgtcgccgtcttgtaccttctgctcgtggtcttctacccattctgtgggtgtgactgtgagcagatgacggtagggccggaaaaaaaaaacttaggctcg

SEQ ID NO: 100821 - DNA, 1455 bp, Zea Mays
aatgtggaaagagtcatgccaccggtgcaacggtggactggaccggaacagccactccaccaatgtcttccacgtcgcatgccatgcatcgacaggatgcacgctctgatctctatataaggggcggcaacccttgtgacacctgacatcacctcagtatttgtcagaagctcaaatactgatctcactgatccagtatggctatggcaaaggcaggcgcgccgagggtctcggcggcccagctggtgactctcgggctatcactcctctgcgctgtcgccggcccggccgccgcgcagaactgcggctgccagccaaacgtatgctgcagcaagtttggctactgcggcacgaccgacgagtactgcggcgacgggtgccagtcgggcccgtgccgctcgggcggcggcggcagcagtggcggcggtggtgcgaacgtggctagcgtcgtcaccggctccttcttcaacggcatcaagagccaggccgggagcgggtgcgagggcaagaacttctacacccggagcgcgttcctgagcgccgtcaaggcgtacccaggcttcgcccatggcgggtcgcaggtgcagggcaagcgcgagatcgccgccttcttcgcgcacgccacgcacgagaccgggcatttctgctacatcagcgagatcaacaagagcaacgcctactgcgacccgaccaagaggcagtggccgtgcgccgcggggcagaagtactacgggcgcggcccgctgcagatctcgtggaactacaactacgggcccgcggggagggccatcggcttcgacgggctcggggaccccggcagggtggcgcgggacgccgtggtggcgttcaaggcggcgctctggttctggatgaacagcgtgcacggggtggtgccgcaggggttcggcgccaccaccagggccatcaacggcgccctcgagtgcggcgggaacaaccccgcccagatgaacgcgcgcgtcggctactacaggcagtactgccgccagctcggcgtcgaccccgggcccaacctcacctgctaggctaggcggcatcggcggacggcgggggccttcaggccttgtgctcggcgtcgcatcgcaccctcgcgcgcgaaaccgagcaatagtgacaataaaacgccggggctagctgagcctgtttgttcgacttcgacctgaataatgaagcagctgtgatatgcatgttgtttcgacacaacgtgtacgcttgcagagcgcttgtactttacgattgcattgtatgcagcaagggtttaaaggctgaatcaataaacggtgtgtaggcgatcactgtttcaccgcacacgtattcggagcaagtccacgttgaattcaccgcttttgtcgccgtcttgtaccttctgctcgtggtcttctacccattctgtgggtgtgactgtgagcagatgacggtagggccggaaaaaaaaaa

SEQ ID NO: 100822 - DNA, 410 bp, Zea Mays
cgatggttagacaacgtagaagctcgttcaccaaggcgcgacggctcgatcgtgagcaccggagtcggacgacaaagtcccggtcacccgcacgagtccccacctccaggtgcaccaaatcgccggctaacgacgcgcccagaccccgcgaattattcgcagacgtcgaacgaccatggaaagcgaagaacagcgttggcagcgtactttcctctcccctattctctgttggcggcgcgggtgggtgaacacgctacgaagctcgctccaacagatggaagaagaggacgccagacacaactacttaaaggcccaaggtcagggaccccgaggagctagcacagggtacccgcacgatccgacacggtggttcatggcggagttcgcggctaggaaatcggcgatgccgt

SEQ ID NO: 100823 - DNA, 481 bp, Zea Mays
cgagcgcgagcccagccatacgacctcggcaggacacctcacagcatcgtatccagcaactccagactcagctagatgatgagaggaggcaacgtgaggagctagagaagaggatggcggagatgttcgcgtacatgcagagccttggcgccgcacagggtcatgctccaccacctccgttgttccctgcagctgaccctacagagttcactactcctggtcaatcggcggcgtcgaacaaccctcatgctttgtccagcccttcgccaaaccagtccagatgcccacctcgttgatgatctgttttgtgatgatccagacttacctttatgagtgttggtgatgttagttaaactttatcttgtgagatacttggtgatgttagtgatgacgcagacttatatctgttttgtgatgatccttacttatatttgtgagactttagtgagactttgtgatatatatggtgttgatgataaat

SEQ ID NO: 100824 - DNA, 750 bp, Zea Mays
acagaagctatagctatatctaacccgcgcgatcgaactcctgttagtttggtgggctacgtacgtactcactacagaaagctagcactgccaagtaaggtcttcagaaagaagaaaggtgtagggcatcttcgtcaacctctcgcccaacatgcccgagttcatcagagctgcagctgggatcctgaccgttcttctcctcgccgtggctctctcctccactgcacttacttccgtggaggcggcgggcaggcggctgcccgcggtggggcagcagcagtacgctggccaccgcatgctgcatgagagggccaggtcgctgatcatggcatgggtagcgcagctcacccaggggcccagccctagaggccctgggcactgaagaggttcgagccagctcctgctccgcctgctgcatgcatgcgcgtacgcacgtgttgcccccgacagttttcttcagactagcttgagttttgtttcacgcttagtcaggagaaaacctcatgagtatttaatgcttttttacgatgcttttctaagacccgcgatatgatgtgtgttgttcctcgctcatatatatgtggtacttgcttccagcactctgcaatgctcacttgtgcagtgtctatatatatatatatatatatatatatatatatatatatatatatatatgataaaatagacaataaaggggagcaacagcgtgaaatcatatagcttatataatggcatacaatatcttgtttc

SEQ ID NO: 100825 - DNA, 972 bp, Zea Mays
ccttttctagtgctcacatccactcgccgcgcgacgaagagaacggctcccccttccccgccacctactcgggctggagcaacaggttctcgaagcgaaacattctcgccccaattgtgggggttcatgggcgccaacggccacccaccgctggcgagcacccgcgcgcacaacgggtcccactccggcggaagcggaggcggaggaggtgggggagggggagcgaaccctagcaacggcggcacggcggcggcgcttcggcacgaccctggcctggcgcgggagtggttgacggaggagcatgccatccttgacgaactgctggtcaagtatgcatccgacttacctgtcgttcgttatgcaaaattgcaatgaagttgccagagaaaacagttcgggatgtagctttgcgctgcagatggatgattaaaaaaggagagcgccaaaagaaagaaggaggatcattactcgtctaagaaaagcaaggacaaaaaggagaaggtttcagattcttcatcgaaaccacctgtccttatggctgataggcctactgttcctccataccctcttccagttcttccagtggacgatgatgaaatctcatccaaagcatgtatattggaggtccaacaggcgaaatccttgaaactaattcccaggttttgagtcaaatttcaacaaaccttagcaacatatacagaacaacatctctctgttgtgccaaactcgagataatatactcaggatcttgaaagagataaacgatgctccagagaccatgaagcagatgccctcgctacctgtgaagataaacgaggacgcagatgcccccgctacccagatgataaacgaggacctcgtcaactcgttgctgcccagaccaactgtacctatgcagtagtgatagcaaaatgaccgtatcctctgtagttccgagagctttttagactgactgcaacgcttgcctcttca

SEQ ID NO: 100826 - DNA, 93 bp, Zea Mays
gtgtaatcagaagatgcttttgcgtattctgataacacagtctaacaccctcgttcgtctcacacgcttatttaacacagcattgtcttgtag

SEQ ID NO: 100827 - DNA, 861 bp, Zea Mays
gaaatagagcacaaggtgacgaacagagtacaataggtcacaaaaattgttactagggtctgggggacaacatataatgcaccgtgaaaatttggcggagccttttggtttcacggatttatgtgaatgaatccatatgcagaaggtgggcgacccgtcgctgaaggcactgctcctggacgaggagcggctgacggaggcggggatagaggcgatggtgtcgcggttcctggcgcaggtgaaggacgggacgtggggcgagcaggggtggcccaaggtgtggacggactactccgtctccaagctggccctgaacgcctactcccggctgctggcgcggcggctggaggcgcgcggcgtgagcgtgaactgcttctgccccgggttcacgcgcacggacatgaccaggggctgggggaagcgcaccgccggcgaggcggccgacgtcggggcgcggctcgcgctgctgccgcccaccgagctccccacggggaccttcttcaagtggcgcacgccgcagctatactctaagctgtgactggctctgggctctggctggctggctagctgagctgtcgtccgtcggccggggcgtacagcatttcggtccggcggtgtaggcgtgtagccgctcctcctattcctcctgctgaatagtactagcaagtatcaacaacgtgtgcagagaagtcggtaaccggagtgtcgatctgccaaggtgctttggttgaacactggctcagcccgtttgtgactctcagctatgtgtacaatgtgcgcttatatctgtcttaagatttaggccaacttctgagcactggttgaatggctgttccttacagttctgtccgttcacaagta

SEQ ID NO: 100828 - DNA, 1457 bp, Zea Mays
cggcaactcgtgtgcactaaagtctgaaccggtcgactagtctgactgagccgctcttgcccgtccgtgctgcgctgaggtcgtctcactcggaggcgccagcgcgcgcgcgcgcgtcgtgtataaatacgtgcccgcgtctcactgttgcctcgctcgcacggtgtcctcctcccgctaccggcaggccacccccatacgcctcgttcgtctcctcctcaaccgcaggtcagcagcgcccgagctctgcgtgcgatggactactcgggcaccaaggagtcgcctccctccggggcttggtggtcgagggagacggtggccgtggtgaccggcgcgaaccgcggcatcggccacgcgctcgccgcgcgcctggccgagcacggcctcaccgtggtgctcaccgcgcgggacggcgagcgcggggaggccgccgcggccccgctcctcgcgcgcgggctcgccgtcgtcttccgcaggctcgacgtctccgacgccgcctccgtcgccgagttcgccgcctggctccgcgacgccgtcgggggcctcgacatcctggtgaacaacgccgccgtgtcgttcaacgagatcgacaccaactcggtggagcacgccgagactgtcctcaggaccaacttctacggggccaagatgctcaccgaagcgctcctgccgctgttccggcagtcgtcggcgaccagcaggatcctcaacatcagctcgcagctgggccttctcaacaaggtgggcgacccgtcgctgaaggcactgctcctggacgaggagcggctgacggaggcggggatagaggcgatggtgtcgcggttcctggcgcaggtgaaggacgggacgtggggcgagcaggggtggcccaaggtgtggacggactactccgtctccaagctggccctgaacgcctactcccggctgctggcgcggcggctggaggcgcgcggcgtgagcgtgaactgcttctgccccgggttcacgcgcacggacatgaccaggggctgggggaagcgcaccgccggcgaggcggccgacgtcggggcgcggctcgcgctgctgccgcccaccgagctccccacggggaccttcttcaagtggcgcacgccgcagctatactctaagctgtgactggctctgggctctggctggctggctagctgagctgtcgtccgtcggccggggcgtacagcatttcggtccggcggtgtaggcgtgtagccgctcctcctattcctcctgctgaatagtactagcaagtatcaacaacgtgtgcagagaagtcggtaaccggagtgtcgatctgccaaggtgctttggttgaacactggctcagcccgtttgtgactctcagctatgtgtacaatgtgcgcttatatctgtcttaagatttaggccaacttctgagcactggttgaatggctgttccttacagttctgtccgttcacaagta

SEQ ID NO: 100829 - DNA, 1771 bp, Zea Mays
ctacaaagacttttaagttttacaccactcgtcggtcgcctcacctcccgccggacagcgccggcgccggcgggggatacctggaccgtgacgactgacgaggaggtcagttgccgacttgccgtcattaaggtagctggtgcagtacacgcctagttgctttgcttgcgattggctccggagaccaaactgggtgggtactcaaccacgacagatctggagaaatcgtacagggtttccattcattccctcgtatagcttttactattcggcattcaggttcaagtagctttcggatagcgacgacaatactagttctaggcttctagcaagcagaaattcttttttccctgaacaaaagataacaaatcatatgttacagagaaaagtagccaaaatcattggaagcaacagcaaggcacgacagggattactgttgagctatcggcgtgaacagcgtcaggctaggttcagtccagtcggtctctatccgttagcttagcgcttgtagcccatggagttatcagcagatatgatcagagattcagagagctttttttctttaggaatgatgagagaaccttttttttgagcaatggtgagagatcctttttgtgtgtgtggactgtggaatggaatgatcagagagcttttcacgagtccagttcagactcgacgctccggtccagagggaaagccgccgtcgtgcattaccaacacaccagtcagtggccgccagtgctgctgtagccaattgtttgctcagacacttgaaagcaacaatgaaagagggttttttttttcggtggccggactttccagtgtcgctgaaatcaggtttacctttattttttttcttgttcgttgctgctgctgctgcaggtgaacaacgccgccgtgtcgttcaacgagatcgacaccaactcggtggagcacgccgagactgtcctcaggaccaacttctacggggccaagatgctcaccgaagcgctcctgccgctgttccggcagtcgtcggcgaccagcaggatcctcaacatcagctcgcagctgggccttctcaacaaggtgggcgacccgtcgctgaaggcactgctcctggacgaggagcggctgacggaggcggggatagaggcgatggtgtcgcggttcctggcgcaggtgaaggacgggacgtggggcgagcaggggtggcccaaggtgtggacggactactccgtctccaagctggccctgaacgcctactcccggctgctggcgcggcggctggaggcgcgcggcgtgagcgtgaactgcttctgccccgggttcacgcgcacggacatgaccaggggctgggggaagcgcaccgccggcgaggcggccgacgtcggggcgcggctcgcgctgctgccgcccaccgagctccccacggggaccttcttcaagtggcgcacgccgcagctatactctaagctgtgactggctctgggctctggctggctggctagctgagctgtcgtccgtcggccggggcgtacagcatttcggtccggcggtgtaggcgtgtagccgctcctcctattcctcctgctgaatagtactagcaagtatcaacaacgtgtgcagagaagtcggtaaccggagtgtcgatctgccaaggtgctttggttgaacactggctcagcccgtttgtgactctcagctatgtgtacaatgtgcgcttatatctgtcttaagatttaggccaacttctgagcactggttgaatggctgttccttacagttctgt

SEQ ID NO: 100830 - DNA, 616 bp, Zea Mays
cggcaactcgtgtgcactaaagtctgaaccggtcgactagtctgactgagccgctcttgcccgtccgtgctgcgctgaggtcgtctcactcggaggcgccagcgcgcgcgcgcgcgtcgtgtataaatacgtgcccgcgtctcactgttgcctcgctcgcacggtgtcctcctcccgctaccggcaggccacccccatacgcctcgttcgtctcctcctcaaccgcaggtcagcagcgcccgagctctgcgtgcgatggactactcgggcaccaaggagtcgcctccctccgggtaaccaacaaccttctccctcccccctcgtctctcgcccagagcgcgcggcgtgcgtgtctcggcgcgcgcgtgcgtgcatcgactaacggggtctgcctggctcgggtgcctacgcctacggctacgcgcgcgcacgcagggcttggtggtcgagggagacggtggccgtggtgaccggcgcgaaccgcggcatcggccacgcgctcgccgcgcgcctggccgagcacggcctcaccgtggtgctcaccgcgcgggacggcgagcgcggggaggccgccgcggccccgctcctcgcgcgcgggctcgccgtcgtcttccgc

SEQ ID NO: 100831 - DNA, 124 bp, Zea Mays
gaatccatgaaagcaacagagagcgcgccgaaacatctgcattattgccggcccagagtcttgtagtaccgagaactccagtgatctccacgcgcttcctcgaggaaaaccgaacccccaatta

SEQ ID NO: 100832 - DNA, 1217 bp, Zea Mays
cagtataaaaagttaatgataagcttctcttttgcaaattccgaacctggtccaccagaagttgtccatcccaactaaaatttactaactgctgcgtggcgtcgcgaccgacacgcgggcccgcagcgctccagtccacgccgcgctaaagcctccaacggccggctccaatccaaactagccgttgccttgctcggtcggcggtcgcccttgtccccgtctcctcctcaaacggtcgaaagtcgaatccaatgccccaagccccatttagacctctccgccacccaccccgttcctcctcgcctcactgcacaccactgccctcctccaatctcgtcgcgccggtaaaagcccccacgcgcgcctcccgtccggctcctcccctctccgcgtcccggctccatgggcggcctgtcggtgatcgcgccccccgcgcgggacacggcgtcgccgcagcaccgccgcgcgcgccgggcgttcctcgtctccaactacctcatcctgggttgcgcgtccgggtgcggcttcctcacgctgtcgctccgcctggtcccctccgtggacggcttcctcctcatcctgctccacgcgctcaccgtggccgccgccgtggccgggtgcgccgtcatcgcggcgcccgacccgccgcgcggccgctgctacaccgcccacatgtccgccaccgccgtcgtgtccatcctgcagggcgccgccgccgtgctcgccttctcccgcacctcggagttcctcgccggcgggctccggtcgtacgtccgcgaggaggacggcgccgtcatcctccgcatggtcggcgggctcggcgtcgccatcttctgcctcgagtgggtcgcgctcgcgctcgccttcgtgctcaggtactacgcctacgtcgacagggagtgcggcggcaacccgcagcgccgcagcgccaaggtcggcggcgaggacggcgccggcacctggcccttccaggtctgaggactggtcacactggccttggctgcgggaaggtggaactgagaaccgtgtgctcttggaagggaaatcaagcgtcgagtgttgttctactggtagaactgtgtgtgtgggaatgagatgggatgctgtgattcgtttattggtttattatgtgtctcgtatttgtaaggctgttatatctatataattatttatgtgtcttgcgatcgagcagtctggattctgacgatgtccagcga

SEQ ID NO: 100833 - DNA, 670 bp, Zea Mays
ccatcacttgccattcctcaaatataaatatattgcatctattatatggctcttctgacaaaagaagtttgaaaacagagaggaaggataaggacgcaaagaaaagaagtaaaaagaggagaaagcacaaaagttcatcagagtcaagttccagctcatcttcagaatcttcaagcagcgacgatgaggataggggttcaaggaagtccagatcacggtcgagatcaaagagaacaaggaaggaaaagaagagccggtcaaggtccaagcgcagaggcagtgaaagcgaggaggaaggcccggtacgcctctctaaattcttcgggaagtaaggagtagacgccgctgtacccaagacgcctttttcattttgaaacgtagattggtgggtttggatgtatcattcaacacaaattacttctgaaggttgagcgagccgtttaccatggtgttctcaatatgatgctcagctgttaagagggtctggtcaagttgtgtggcttctaaaaactttgtaagcaactggtaagtcattgttaaatcgctgtaccttggaggatttgatgccatatatttgagacattgaactgctatatttatgttaagactttacatatgcagtcagttgtttcagttatatgctcttttgctatatttatgttaagacttt

SEQ ID NO: 100834 - DNA, 1223 bp, Zea Mays
cactaaacactttaaatcagattttattttaattttgaggactcaaattctaacagcagtaacatcggcagctgagattaaatcgcctggctacgagataaaagccatttccccatgtccactatccctccttatcaccaaccatccagtcataactcacggcaggcagagacgcgcaccaccagaccagcagcagaacgaaagggatctccggtccccaggccccggctcctccccttccgattccaatctggtctcgccgggcctggcggcgagggagagatggggaagaaccaggcgtacaaggcgatgcagcgggcgcggttggggtcctcgtccggcgcgccgggcgccgccgacgcccccgaagacggcatgacggacggttcattccattctccagagtggcatgcggcgcgcctggccagccttaacaagacgcacaccctcacctgggaggagttcaagaagaagcagaaggaagaggaactgaaaaggggcgagctggaggctgacaaagacaaaatgatgagagagtatagagctcaactggatgctgaaagagctcaaaagctagcaaacggaagaaatcactcaaggtcaaactcaaaatcatcatcttccaagaaagagaggaaggataaggacgcaaagaaaagaagtaaaaagaggagaaagcacaaaagttcatcagagtcaagttccagctcatcttcagaatcttcaagcagcgacgatgaggataggggttcaaggaagtccagatcacggtcgagatcaaagagaacaaggaaggaaaagaagagccggtcaaggtccaagcgcagaggcagtgaaagcgaggaggaaggcccggtacgcctctctaaattcttcgggaagtaaggagtagacgccgctgtacccaagacgcctttttcattttgaaacgtagattggtgggtttggatgtatcattcaacacaaattacttctgaaggttgagcgagccgtttaccatggtgttctcaatatgatgctcagctgttaagagggtctggtcaagttgtgtggcttctaaaaactttgtaagcaactggtaagtcattgttaaatcgctgtaccttggaggatttgatgccatatatttgagacattgaactgctatatttatgttaagactttacatatgcagtcagttgtttcagttatatgctcttttgctatatttatgttaagacttt

SEQ ID NO: 100835 - DNA, 1121 bp, Zea Mays
cactaaacactttaaatcagattttattttaattttgaggactcaaattctaacagcagtaacatcggcagctgagattaaatcgcctggctacgagataaaagccatttccccatgtccactatccctccttatcaccaaccatccagtcataactcacggcaggcagagacgcgcaccaccagaccagcagcagaacgaaagggatctccggtccccaggccccggctcctccccttccgattccaatctggtctcgccgggcctggcggcgagggagagatggggaagaaccaggcgtacaaggcgatgcagcgggcgcggttggggtcctcgtccggcgcgccgggcgccgccgacgcccccgaagacggcatggaagaggaactgaaaaggggcgagctggaggctgacaaagacaaaatgatgagagagtatagagctcaactggatgctgaaagagctcaaaagctagcaaacggaagaaatcactcaaggtcaaactcaaaatcatcatcttccaagaaagagaggaaggataaggacgcaaagaaaagaagtaaaaagaggagaaagcacaaaagttcatcagagtcaagttccagctcatcttcagaatcttcaagcagcgacgatgaggataggggttcaaggaagtccagatcacggtcgagatcaaagagaacaaggaaggaaaagaagagccggtcaaggtccaagcgcagaggcagtgaaagcgaggaggaaggcccggtacgcctctctaaattcttcgggaagtaaggagtagacgccgctgtacccaagacgcctttttcattttgaaacgtagattggtgggtttggatgtatcattcaacacaaattacttctgaaggttgagcgagccgtttaccatggtgttctcaatatgatgctcagctgttaagagggtctggtcaagttgtgtggcttctaaaaactttgtaagcaactggtaagtcattgttaaatcgctgtaccttggaggatttgatgccatatatttgagacattgaactgctatatttatgttaagactttacatatgcagtcagttgtttcagttatatgctcttttgctatatttatgttaagacttt

SEQ ID NO: 100836 - DNA, 1246 bp, Zea Mays
gatctagccgctcgacgctagagacgacgacagccgcaatcaacgtacagaccgtgttctgcgtgacgcatcccggcgccgacgccgaggacccgcaaccgacccggcagctgagggagagcttcatctccagcgagagtcgcaaaccctccatgagttccccattccccaaccttctgattttgacgccgggtcgtgggcaaatcaggtagagcggctgcggattttggcgcccggcctcgggagtttgggagcttagcgactccacagtggaagactggtggacggcctttgcccgcgctgcgtcttcccctgcttcgcgatgggaggctcccctgtatgggacgggactctgtctccggacagcttcaacacctccgcggcggcgcttgttaagaggtggaaggagatcgaggtcgacgattcccttcctgaatggacgtggaagccgtgcagcaaatttgggggtgccgtcggaggtagaagggtatctagccctggaaagagtgtaccgcagctgtggaacaagccagatcgaagagatgaagttcgatggtgcaggggatgtagcttgggtcgagagctccagcgacaatgttcatgtttatgatttccatgctgtctacagcttctcctacaaagtcccagtgctatactttcgcggttatcacactagtgggcagctactaactctagatgaggtaaaagagggtcttccttcccactcacagaaagtattaagtgaatcaaagtggacgtttattactcaagaggagcacccccatttaagcaagccatggctggccctgcacccctgtgcaaccagtggttggatgaagctacttctcgaagaaactgaagcgactgataaggagcactcggtgcaatatttaccggcatggttatccgtggttggccaggcagtagggctgaaaatccctcttgaacttcattccaactcttagtttttttttcactttttgtatgtctttcagtatgtagcagggattgaaagagagtcctcagcttgtgtttggtgataatagtcaccaatatttgtgacactggtggctagaccttgccatcgtgtcattgttgtggtgactgtatactttcattcaatctgctagcgtttctgttagacaccctcgggggtatgaaacgctagcgttttaggaaattcatctactcttggtttgtgttttggagtaatctcctggttgaaccaaggaagcaagaatttctc

SEQ ID NO: 100837 - DNA, 1252 bp, Zea Mays
gatctagccgctcgacgctagagacgacgacagccgcaatcaacgtacagaccgtgttctgcgtgacgcatcccggcgccgacgccgaggacccgcaaccgacccggcagctgagggagagcttcatctccagcgagagtcgcaaaccctccatgagttccccattccccaaccttctgattttgacgccgggtcgtgggcaaatcaggtagagcggctgcggattttggcgcccggcctcgggagtttgggagcttagcgactccacagtggaagactggtggacggcctttgcccgcgctgcgtcttcccctgcttcgcgatgggaggctcccctgtatgggacgggactctgtctccggacagcttcaacacctccgcggcggcgcttgttaagaggtggaaggagatcgaggtcgacgattcccttcctgaatggacgtggaagccgtgcagcaaatttgggggtgccgtcggaggtagaagggtatctagccctggaaagagtgtaccgcagctgtggaacaagccaggagcagatcgaagagatgaagttcgatggtgcaggggatgtagcttgggtcgagagctccagcgacaatgttcatgtttatgatttccatgctgtctacagcttctcctacaaagtcccagtgctatactttcgcggttatcacactagtgggcagctactaactctagatgaggtaaaagagggtcttccttcccactcacagaaagtattaagtgaatcaaagtggacgtttattactcaagaggagcacccccatttaagcaagccatggctggccctgcacccctgtgcaaccagtggttggatgaagctacttctcgaagaaactgaagcgactgataaggagcactcggtgcaatatttaccggcatggttatccgtggttggccaggcagtagggctgaaaatccctcttgaacttcattccaactcttagtttttttttcactttttgtatgtctttcagtatgtagcagggattgaaagagagtcctcagcttgtgtttggtgataatagtcaccaatatttgtgacactggtggctagaccttgccatcgtgtcattgttgtggtgactgtatactttcattcaatctgctagcgtttctgttagacaccctcgggggtatgaaacgctagcgttttaggaaattcatctactcttggtttgtgttttggagtaatctcctggttgaaccaaggaagcaagaatttctc

SEQ ID NO: 100838 - DNA, 1256 bp, Zea Mays
gatctagccgctcgacgctagagacgacgacagccgcaatcaacgtacagaccgtgttctgcgtgacgcatcccggcgccgacgccgaggacccgcaaccgacccggcagctgagggagagcttcatctccagcgagagtcgcaaaccctccatgagttccccattccccaaccttctgattttgacgccgggtcgtgggcaaatcaggtagagcggctgcggattttggcgcccggcctcgggagtttgggagcttagcgactccacagtggaagactggtggacggcctttgcccgcgctgcgtcttcccctgcttcgcgatgggaggctcccctgtatgggacgggactctgtctccggacagcttcaacacctccgcggcggcgcttgttaagaggtggaaggagatcgaggtcgacgattcccttcctgaatggacgtggaagccgtgcagcaaatttgggggtgccgtcggaggtagaagggtatctagccctggaaagagtgtaccgcagctgtggaacaagccaggagcagatcgaagagatgaagttcgatggtgcaggggatgtagcttgggtcgagagctccagcgacaatgttcatgtttatgatttccatgctgtctacagcttctcctacaaagtcccagtgctatactttcgcggttatcacactagtatgtgggcagctactaactctagatgaggtaaaagagggtcttccttcccactcacagaaagtattaagtgaatcaaagtggacgtttattactcaagaggagcacccccatttaagcaagccatggctggccctgcacccctgtgcaaccagtggttggatgaagctacttctcgaagaaactgaagcgactgataaggagcactcggtgcaatatttaccggcatggttatccgtggttggccaggcagtagggctgaaaatccctcttgaacttcattccaactcttagtttttttttcactttttgtatgtctttcagtatgtagcagggattgaaagagagtcctcagcttgtgtttggtgataatagtcaccaatatttgtgacactggtggctagaccttgccatcgtgtcattgttgtggtgactgtatactttcattcaatctgctagcgtttctgttagacaccctcgggggtatgaaacgctagcgttttaggaaattcatctactcttggtttgtgttttggagtaatctcctggttgaaccaaggaagcaagaatttctc

SEQ ID NO: 100839 - DNA, 1265 bp, Zea Mays
gatctagccgctcgacgctagagacgacgacagccgcaatcaacgtacagaccgtgttctgcgtgacgcatcccggcgccgacgccgaggacccgcaaccgacccggcagctgagggagagcttcatctccagcgagagtcgcaaaccctccatgagttccccattccccaaccttctgattttgacgccgggtcgtgggcaaatcaggtagagcggctgcggattttggcgcccggcctcgggagtttgggagcttagcgactccacagtggaagactggtggacggcctttgcccgcgctgcgtcttcccctgcttcgcgatgggaggctcccctgtatgggacgggactctgtctccggacagcttcaacacctccgcggcggcgcttgttaagaggtggaaggagatcgaggtcgacgattcccttcctgaatggacgtggaagccgtgcagcaaatttgggggtgccgtcggaggtagaagggtatctagccctggaaagagtgtaccgcagctgtggaacaagccagagtgttcttccaggagcagatcgaagagatgaagttcgatggtgcaggggatgtagcttgggtcgagagctccagcgacaatgttcatgtttatgatttccatgctgtctacagcttctcctacaaagtcccagtgctatactttcgcggttatcacactagtgggcagctactaactctagatgaggtaaaagagggtcttccttcccactcacagaaagtattaagtgaatcaaagtggacgtttattactcaagaggagcacccccatttaagcaagccatggctggccctgcacccctgtgcaaccagtggttggatgaagctacttctcgaagaaactgaagcgactgataaggagcactcggtgcaatatttaccggcatggttatccgtggttggccaggcagtagggctgaaaatccctcttgaacttcattccaactcttagtttttttttcactttttgtatgtctttcagtatgtagcagggattgaaagagagtcctcagcttgtgtttggtgataatagtcaccaatatttgtgacactggtggctagaccttgccatcgtgtcattgttgtggtgactgtatactttcattcaatctgctagcgtttctgttagacaccctcgggggtatgaaacgctagcgttttaggaaattcatctactcttggtttgtgttttggagtaatctcctggttgaaccaaggaagcaagaatttctc

SEQ ID NO: 100840 - DNA, 1333 bp, Zea Mays
gatctagccgctcgacgctagagacgacgacagccgcaatcaacgtacagaccgtgttctgcgtgacgcatcccggcgccgacgccgaggacccgcaaccgacccggcagctgagggagagcttcatctccagcgagagtcgcaaaccctccatgagttccccattccccaaccttctgattttgacgccgggtcgtgggcaaatcaggtagagcggctgcggattttggcgcccggcctcgggagtttgggagcttagcgactccacagtggaagactggtggacggcctttgcccgcgctgcgtcttcccctgcttcgcgatgggaggctcccctgtatgggacgggactctgtctccggacagcttcaacacctccgcggcggcgcttgttaagaggtggaaggagatcgaggtcgacgattcccttcctgaatggacgtggaagccgtgcagcaaatttgggggtgccgtcggaggtagaagggtatctagccctggaaagagtgtaccgcagctgtggaacaagccaggagcagatcgaagagatgaagttcgatggtgcaggggatgtagcttgggtcgagagctccagcgacaatgttcatgtttatgatttccatgctgtctacagcttctcctacaaagtcccagtgctatactttcgcggttatcacactagtatgtgggcagctactaactctagatgaggtaaaagagggtcttccttcccactcacagaaagtattaagtgaatcaaagtggacgtttattactcaagaggtatgcctgcttcatgcatgatccttgatttctattgaaacagaaattggctcttgagtcttggcagtgacacgtagaacgaactctggcctgtcgtttgctaactgtgcaaggattgtgttctacctggacttggaatcctgcaggagcacccccatttaagcaagccatggctggccctgcacccctgtgcaaccagtggttggatgaagctacttctcgaagaaactgaagcgactgataaggagcactcggtgcaatatttaccggcatggttatccgtggttggccaggcagtagggctgaaaatccctcttgaacttcattccaactcttagtttttttttcactttttgtatgtctttcagtatgtagcagggattgaaagagagtcctcagcttgtgtttggtgataatagtcaccaatatttgtgacactggtggctagaccttgccatcgtgtcattgttgtggtgactgtatactttcattcaatctgctagcgtttctgttagacaccctcgggggtatgaaacgctagcgttttagg

SEQ ID NO: 100841 - DNA, 2041 bp, Zea Mays
ttcgtaattaaaaggcacgctccaaacaaactgtacctatggctgacaatgagcctcaaattttacactataaaacttaagggtcgaatcggattaggatcggactttatttttattcatttttgaactataaataagttagggccctatcaaattgtgaagagtcatttggatcgcgatccattaccacccctaactgtacccgccatcctcctagaaccctaacgccttcgttctaaaaaatctaaccatggcaaccgccgccgccgccgccgccccgcttgacgacgccaaggccaagaatgttatacgccaggtggagttctattttagtgacagcaacctcccccgcgatgggttcctacgcaggactgtcgaggaaagcgaggatggattggtgagcttggctctcatctgttccttctcgcggatgaggtcacacctaggtctcgaaggggatgcgaaaccagaaacagtgccagaggagaccgtgcttgcagttgccgacatcttgcgccgttccacagcgctccgcgtatcagaggatgggaagaaagttggtaggtctaaggagttgtcgaagccagatgaggttatagagcaagtggactccaggacagttgctgcatcaccgcttccttacaatgtaaaactggaggaagtcgaatctttttttgctcagtgtggcaaggtaaatagtgtgaggctacctcgacatgtttctgacaaaaggcatttctgtggcactgctttagttgaattttcagaagaagatgaggcaaaaggcgtttttgagaaaaatctcatttttgctggggcagacctggaaataagaccaaagaaagaatttgatactgaaagagaggcaaagaaagaagcatatgagaagtcacatcctaataagagcagtcatggtgaaggctatccaaaaggtctgattctggccttcaagctgaagaaaactgcagatgatggtgagacaggaaaaagtggtgggggcaaagtagatgacactgaccttactaagaataatggagcttccgatgctacagagaaatccagtgtagagaatgatgagaagatcactgagaataaaggcaatgtgagtgaggagcaggccgatgccgttgaggaattgaaagggctgtctgctggggaaactttacaatctgttcccaaggttgataaaagcccttcaaataaagatcaagatataatctcgagggaggatttaaaagaagaattcactaaatttggcacagtgcggtatgtggacttcagcattggggaagattctggattcattcggtttgaggatcctgcagcagctgacaaggcccgtgcatttgcagccattgcagatgaaggtggtttgactatgaaaggccacatagtcattttggaacctgtgtctggtcaagctgaaaaggattattggagtgcaattcggggcgttcaggagaaatataaagatagccgaaacaacagaggacgggactggaagaacaaccgaggcggaaagcagtttggcggtgggaagcggggtcgccacttcgactcccgtgacagggcctccaataaagctcagaaagtttagatgcaggatatagatttaatctccatatataatgaggaaaacattattttgcgcttcttcagtttgcatcgtggaattgtcatttgttttttatgtttattttctctttgtgaatgttggcctgcactttgaagagcaatctatgaaccacgaggcatgcagcatgctgataatggaaggggcttggctccctctatggttgttcaagtatattgtactattactcattagttatactaattctaaaagtcatagtaaaataacggcttagttactaaggtaatacaattttctattgtattgttctcaaattattttttattgtttaattctacatgagtaagtaaaataaatataatgtaaatcattatttttgtaaacaatatcttattttatctttagtttaaataattaatatttgtctaaaataaaaaataaaaaaaa

SEQ ID NO: 100842 - DNA, 578 bp, Zea Mays
ctttgtatttttttagccattcatcaatttggttatgtgttgtgagctcatcatatccgaatactcgatcacttggatgctagattagataacttgccaatcatgcaggtcaagctgaaaaggattattggagtgcaattcggggcgttcaggagaaatataaagatagccgaaacaacagaggacgggactggaagaacaaccgaggcggaaagcagtttggcggtgggaagcggggtcgccacttcgactcccgtgacagggcctccaataaagctcagaaagtttagatgcaggatatagatttaatctccatatataatgaggaaaacattattttgcgcttcttcagtttgcatcgtggaattgtcatttgttttttatgtttattttctctttgtgaatgttggcctgcactttgaagagcaatctatgaaccacgaggcatgcagcatgctgataatggaaggggcttggctccctctatggttgttcaagtatattgtactattactcattagttatactaattctaaaagtcatagtaaaataacggcttagttactaaggtaatacaa

SEQ ID NO: 100843 - DNA, 457 bp, Zea Mays
tctacatgtaatttcagctcgtcgcgaaatgaaggaggcgaggaaccactaccacacgcggggctcctcacgcggcggcggcggcaccgctgccaagcgcgacctgatgttacagtggggcaaccggaagcgcctgcgctgtgtcaaggtgcagcgccgcgacgaggccgccatcagccagcgccgcgacgaggccgcagctgcccatcaccacccaaccggccacactcaccagcaccaccgtgttctcaggtttgtgactttctctaatttgtttcttttttatcgtttgtgcctttgtggtgtcgatgtgcccattgcgtgtgccggctctcagcatgattgctttgttttgatggctacctgtctttatgtaactaatgtagaaatcatgtcaaaacacatttccccacaacataaaagataagaggaccatatttgtgagctaaaataattt

SEQ ID NO: 100844 - DNA, 730 bp, Zea Mays
aggcatctttgtcgagggagtttggctcgccatctccctccgttgcgccctcgcgccctcccaccctaggggacagtttcagttcccatgtttcctccctctcctgctcatcggccacaaagttttccctcggtgtcacctcctgctcgtcggccacggagtttccctcggcgtcgctcaccatgtacagaccactgcaaccctgttcatcggcgagtgaagaaattgactactggaattcatccgcagacaacgttcctctctttctcggtttatggcaggaagggtgaatcctgagacatcacatcgcagggagggagatttgcaccaatccagcgtcgaattgatgcacacgtgtgtggttcctccaacaaacttcgaaggcccgattctagaggatttgccccattgctaatcgaatcaatacggacgaatgctatacaagtgagatcctaatctgtcagcgcacactagctaagctcgctgggtcgctcgtttcgtgttcacggacgacatcaactgatcgccgtcgaccaggtttcagagtgttctcaggtttcatgtcccacccctattgcaaggcactgctatttatatctatctctagtcatttgaaccatggttgtttgctttaaactcacatctatctagccaacatgacacacataattttcgttttatattttatactcaagtataatatagacttttattaaaaaataggggaaaa

SEQ ID NO: 100845 - DNA, 678 bp, Zea Mays
gcgttctcgtcaatggcccatataaagcccagcccaccatcttcctcctctcccctgcaacaaagacgacgcaagccctcgcctgtcctcactcctaaccctcgcccgactcagatctatctgccccgcgccgccgtcgccatgccgttcactccgggtccctactctggcgtcagcaccctcgcccttgtagcgagggcatcggtcttcggcttcggtgtcgtctacgggagcatcaagctctcaatcctcaaggcaacaaagcctaaaaaggaagaagcgcatgctcatcactaaggacgacagggctgctacatgttaatttctatggaaggatgatataaaaatgtggttgcactctttctccatacgtgcaatttgatttatgatttgtggacatcttgctgtaacacacctgctgagttatcttagttttgtgtcataataaaattcttagccaatgacttgaaatcaggaaggggaaaatcaaaagaacccacttttgttttgtcaggatgcgaagttaggacatggcttcttgaacttcggtcaagaggatctgccttgttgatcctgttttgttgcgacgttgtgcaatggattggatggctcatgatggatgtcacttagggctggtttggtggaaggggatgattgatcccttccaccagcccagcc

SEQ ID NO: 100846 - DNA, 889 bp, Zea Mays
atatgaaactgttagtgtctatgttttctagattatttaattcggttgatatcatggtctcctgttaaaaactttgattggtcgattacatttccacccctcttctctgatagatggttatgctggttcttcataatttccagcattgtgtagatctttgcactgatccttttgaactgattgatatacacatttgttgatttctttgatccatggttcactaatatctttgtgttggttgctcttatctttaaatttagcaccgcggtccttactagttaaggatttgactgaattttttatcttcagtggatgcagctatagttggctttcatatgcaagcttatgaaacctatattttctagttagcttgttttggtgttgttttaactttaggcctgcttacagatgagcttacatgccacattatggtttagaaagaccatgtttgcttcatttttccccatgaaacaccctattgtgtatcaaaccgttcaattaaatttgctgatgttgcaatttctctttcaggcaacaaagcctaaaaaggaagaagcgcatgctcatcactaaggacgacagggctgctacatgttaatttctatggaaggatgatataaaaatgtggttgcactctttctccatacgtgcaatttgatttatgatttgtggacatcttgctgtaacacacctgctgagttatcttagttttgtgtcataataaaattcttagccaatgacttgaaatcaggaaggggaaaatcaaaagaacccacttttgttttgtcaggatgcgaagttaggacatggcttcttgaacttcggtcaagaggatctgccttgttgatcctgttttgttgcgacgttgtgcaatggattggatggctca

SEQ ID NO: 100847 - DNA, 2222 bp, Zea Mays
ggcgatccgagcgagcggccggcgcctggctgcgctccagcgcgcggaggggctctaggtgcgcaattaatggcggcatttagtttctacgtcgctgttagttggcggaggggagaaaaggtcggcggggcggtggccgtggacggggcgaccagcagcgcgccggtaggggcctgccagggaccagggggcgttccgtcttgagaacactggctggcactctggaagagtggaagtgttaccacagcagcttgtgccgcttgcgctcgcactgcccctcgtgctcgtgggtcctgctagagctagaccagctgagagacgatagatttcctcccgacaccgcgtcgcagcccccatcgctctctctcgctggcgcagtgacgtgcccgtgagcttctcgtcgatccaggaaagacgtgctcctcgctctccttgtcctcggcggcaagatgggccgggggcgcggcggcgccttttcttgctcaatgctggacttgctggtcttgtcggcgctgctaccgttcgccgcctcgcagtcgccgtcctcgcttctgtcgccggctcagagcgcgtcgcggcctccgacggcgccgtccgcgagaccgtcgttcccatcgcctgcggcgccagcgccgaggctgtcacggcctccagccccgccggccgcgaaaccgtcgtctccaccgcccgcggcgccagctgggaagccgtcgccatctcccaggccggctccaacgaggtctccggcagtggcgacacccgcgccaagagcgtcgcctgcagcctcgccagctccaaagccatcctctcctccacctaaaacggcgccggctccaaaaccatccccgtccgtggcgccggcgccaaggccatctcctccacctgtcacaccggtaccaccagctccaaagccgccgccaccgccgccgccgccaccggctccgctgcagcctccgtcgaactccacgccgacgacgtcctccgcattgggccagctctcgcccagcttctacgcgcagtcctgcccggacgttgagctggcagtgagggacgtcgttaggtcggcctccaccctggacccctccatccccggcaagcttcttaggctggtcttccatgactgcttcgtcgagggatgcgatgcatcggtgctgatacaaggtaacggtaccgagaggacggatcctgcaaacctctcgcttggtgggttcaatgtcatcgatgcagcaaagaggttgcttgaagctgtgtgccctgcgactgtttcttgcagcgacattgtcgtcctcgccgcaagagatgctgttgtgtttactggaggaccggctgtgcctgtcgcgctgggaagacgagacggcctcgtctcgttggcatccaacgtccgaagaaacatcatcgacacgggcttctccgtggacgccatggcggccagcttcaccgccaaggggctcaccttggacgacctcgtcactctctcaggggggcacaccatcgggtcggcgcactgcaacacgttccgggagcggttccagcaggtggcgaacgggagcatgacgccggtcgacgggtcgatgaacgccgactacgcgaacgagctgatccaggcgtgctcggcgaacggcaccgtgccggcgggcacggccgccgtgggctgcgactccggctcggcgtccgtcttcgacaacacctacttcgcgaacctgctgggcgggcggggcctgctgcgcacggacgccgcgctggtgcagaacgcgacgacgagggccaaggtggcggagttcgcgcagagccaggacggcttcttcgcgagctgggccagctcgtacgccaggctcaccagcctcggcgtgaaggtcggcgccgacggcgaggtccggcggacctgctccagcgtcaacggctgacgagggggcgggggaggctgcagaaacttatgttgtagttgtagagcaaggaaaggtgaggtgaggtgtggtgtcggctagttcttgttcttggcccggcgatgcttcggtgggtgagcgaggtgttgccgtgtagccggcgtcaccgtttttagtgaaaggagcgaaaagaaaatgcagaaacctgtgtagatgacgtgcctgatctgcgtctgcaaccaagggcatagttcactcatgacgatggacactgtactttgacctgataaatgacatagcaagcgaggcgaacgtgcttacgcggttcactcggcagta

SEQ ID NO: 100848 - DNA, 3011 bp, Zea Mays
cccttcccgtctcatatctacctcgaaagaggggtcgcagacggaacccttccaccctcccgacaccaccttcgattcctctgcgatttccccccgcgcgctcgccgattccttgatcgactcccgcgtgattcgctttctggtcggattctctctcctcaagcatgcagtcggatcagcctgtgatcagcttgcgccccggcggcggcggcggcccgcgcgccggccgcctcttctcccccgcctttgccacctccgtttccggagacttcctccgcctgcacgtcggtggcgcctccggcatctccaagatcggtgattcacattttgagccacgtgagcgtgttcgttacacaagagatcaacttctcgagctgcgtgagcttgttgatgtgtctgaggacattttaaggctcaagcaagagattgatatagagcttcatggtgaagatcagacctggattcacaatgattcagctgttcaaggacaagtccaaggtcaaacacaagcacagaatcggtatgctgagacggataatcgtgattggcgtgcacggtctgcacaaccgccttcggctaatgaagagaaatcttgggacaacatacgcgaggctaaagaagcctacacctctagtggtaggcaacaagagcaagctaacagacaagatcagttaagctcccagtttgcttcgaaagctcagtttggctctacccctgctcttatcaaggctgaagtgccctggtcagcccgaagaggcaatctctcggagaaagaaagagtgttgaaaacagtgaaaggtatactgaacaaacttacaccagagaaattcgatcttctgaagggtcaactaatggaagctggaattactacagctgatatcttgaaggatgttataaatctcatatttgagaaggcagtttttgagcccactttctgtcctatgtatgctcaactttgttccgatctcaatgaaaagctcccgacattccctcctgaagagccaggtggcaaagagatcacattcaagcgtgtactattgaacaattgtcaggaagcctttgaaggtgctagcagcttaagagctgatattgctaaattaactggccctgaccaagagatggagagaagggacaaagaacggttggtcaaacttagaacacttggaaatattcggctaattggtgagctactcaagcaaagaatggttcctgagaagatagttcatcacattgttatggagctattggggtctgggccagataaaaaaacatgccctgaagaggaagatgttgaggccatctgtcatttcttcaatacgattggtaaacagcttgatgaaaacccaaagtctcggcggatcaatgatacctactttatccagatgaaggagctaacaatgaatccccagcttgcaccacgtttgaggtttatggttcgtgatgtgattgatctccggtcaaataactgggtgcctcgacgagaggagattaaggccaagaaaatcagtgaaattcactccgaggcagaaaagaaccttggattacgacctggagcagcatctggcattaggaatggccgtagctcaccaggaggagcccttttgcctggaggggcatttccaatgaatcggccaggaactggaggcatgatgcctgggatgcctggttcaagaaagatgcctggaatgcctgggttggacaatgataactgggaagttgcccgttctaaatcgatgccaagaggggactcgattcgcaaccaggggccgttgcttaataagccatcaacagttcacaagacatcatctattaacacgaggcttcttcctcaaggcagtggcgcaggactaattggcaagagcgcacttttgggaactggtgccccaccatcacgtcctctcagctttgggcctgagcccacacctcaaattacaccatcaccaaaaccattaagtgcagcaccagctcttgcccctgctcctgataaaccagccagtgctcccaaggggaactctgctgagcttaagaagaaaacaatagctcttcttgaggagtatttcagcatacgtattttagatgaagcacagcaatgtatcgaggagttgcagaatcgtggttactacccagagattgttaaagaagctgtcaatcttgccctagataaagggaccaattttgttgatcctctcgttaggctactggagcatctgtacacaaagaaaattttcaagactcaagacctggaatccggttgcttgttatacggtgctctgttggatgacattgggattgaccttcctaaagctccaacgcaatttggtgagattattgctcgcctgactttgttaggtgccttgagatttgaagttatggaggagattttaaagaaaatggaggataccatgtaccgcaaagcagtttttgatgctgtcaagaaaaccttggaagcaaacccatcgggccagacaatcttaggctcacatgctgctgtaatagacgcttgcaacagccttttggaataatcctcttagcagctttggccaaccaactttttcagatgctgtctcttgcgaaagacagtgtcgtgtattccctgtagcttagggccttgtttgggagtaagggaacgcagtaccaaagatgcgaggaacagccagttttgggctgtataattttgcgagatcagatgagtgttaatttattattattattattgtttggaccaggatggaaagaaagaagccatggattttacccttgggcgaccagcttattttgctggaggccccagatgaacaaggctaaatatatgatgttttcgtgtccacttaaactgttgctagttcttttcctgcgactacactttttgtaacgttgtactatggttttggaccgttttgtctgttacagtatattttgcctttatttaggagtcatgactcgatctgcctaggttcttgtggtgtttcttcctttgggctttggatttccatgctgtttaactgaagatt

SEQ ID NO: 100849 - DNA, 1905 bp, Zea Mays
cccttcccgtctcatatctacctcgaaagaggggtcgcagacggaacccttccaccctcccgacaccaccttcgattcctctgcgatttccccccgcgcgctcgccgattccttgatcgactcccgcgtgattcgctttctggtcggattctctctcctcaagcatgcagtcggatcagcctgtgatcagcttgcgccccggcggcggcggcggcccgcgcgccggccgcctcttctcccccgcctttgccacctccgtttccggagacttcctccgcctgcacgtcggtggcgcctccggcatctccaagatcggtgattcacattttgagccacgtgagcgtgttcgttacacaagagatcaacttctcgagctgcgtgagcttgttgatgtgtctgaggacattttaaggctcaagcaagagattgatatagagcttcatggtgaagatcagacctggattcacaatgattcagctgttcaaggacaagtccaaggtcaaacacaagcacagaatcggtatgctgagacggataatcgtgattggcgtgcacggtctgcacaaccgccttcggctaatgaagagaaatcttgggacaacatacgcgaggctaaagaagcctacacctctagtggtaggcaacaagagcaagctaacagacaagatcagttaagctcccagtttgcttcgaaagctcagtttggctctacccctgctcttatcaaggctgaagtgccctggtcagcccgaagaggcaatctctcggagaaagaaagagtgttgaaaacagtgaaaggtatactgaacaaacttacaccagagaaattcgatcttctgaagggtcaactaatggaagctggaattactacagctgatatcttgaaggtttgttttatttaccaccatatgtctacagccttttgttttctgacatcttccctactgctcttgatcaggatgttataaatctcatatttgagaaggcagtttttgagcccactttctgtcctatgtatgctcaactttgttccgatctcaatgaaaagctcccgacattccctcctgaagagccaggtggcaaagagatcacattcaagcgtgtactattgaacaattgtcaggaagcctttgaaggtgctagcagcttaagagctgatattgctaaattaactggccctgaccaagagatggagagaagggacaaagaacggttggtcaaacttagaacacttggaaatattcggctaattggtgagctactcaagcaaagaatggttcctgagaagatagttcatcacattgttatggagctattggggtctgggccagataaaaaaacatgccctgaagaggaagatgttgaggccatctgtcatttcttcaatacgattggtaaacagcttgatgaaaacccaaagtctcggcggatcaatgatacctactttatccagatgaaggagctaacaatgaatccccttcatttcacttgctcccaaacaagccctagatgtccaaggaacgcagtaccaaagatgcgaggaacagccagttttgggctgtataattttgcgagatcagatgagtgttaatttattattattattattgtttggaccaggatggaaagaaagaagccatggattttacccttgggcgaccagcttattttgctggaggccccagatgaacaaggctaaatatatgatgttttcgtgtccacttaaactgttgctagttcttttcctgcgactacactttttgtaacgttgtactatggttttggaccgttttgtctgttacagtatattttgcctttatttaggagtcatgactcgatctgcctaggttcttgtggtgtttcttcctttgggctttggatttccatgctgtttaactgaagatt

SEQ ID NO: 100850 - DNA, 3141 bp, Zea Mays
cccttcccgtctcatatctacctcgaaagaggggtcgcagacggaacccttccaccctcccgacaccaccttcgattcctctgcgatttccccccgcgcgctcgccgattccttgatcgactcccgcgtgattcgctttctggtcggattctctctcctcaagcatgcagtcggatcagcctgtgatcagcttgcgccccggcggcggcggcggcccgcgcgccggccgcctcttctcccccgcctttgccacctccgtttccggagacttcctccgcctgcacgtcggtggcgcctccggcatctccaagatcggtgattcacattttgagccacgtgagcgtgttcgttacacaagagatcaacttctcgagctgcgtgagcttgttgatgtgtctgaggacattttaaggctcaagcaagagattgatatagagcttcatggtgaagatcagacctggattcacaatgattcagctgttcaaggacaagtccaaggtcaaacacaagcacagaatcggtatgctgagacggataatcgtgattggcgtgcacggtctgcacaaccgccttcggctaatgaagagaaatcttgggacaacatacgcgaggctaaagaagcctacacctctagtggtaggcaacaagagcaagctaacagacaagatcagttaagctcccagtttgcttcgaaagctcagtttggctctacccctgctcttatcaaggctgaagtgccctggtcagcccgaagaggcaatctctcggagaaagaaagagtgttgaaaacagtgaaaggtatactgaacaaacttacaccagagaaattcgatcttctgaagggtcaactaatggaagctggaattactacagctgatatcttgaaggtttgttttatttaccaccatatgtctacagccttttgttttctgacatcttccctactgctcttgatcaggatgttataaatctcatatttgagaaggcagtttttgagcccactttctgtcctatgtatgctcaactttgttccgatctcaatgaaaagctcccgacattccctcctgaagagccaggtggcaaagagatcacattcaagcgtgtactattgaacaattgtcaggaagcctttgaaggtgctagcagcttaagagctgatattgctaaattaactggccctgaccaagagatggagagaagggacaaagaacggttggtcaaacttagaacacttggaaatattcggctaattggtgagctactcaagcaaagaatggttcctgagaagatagttcatcacattgttatggagctattggggtctgggccagataaaaaaacatgccctgaagaggaagatgttgaggccatctgtcatttcttcaatacgattggtaaacagcttgatgaaaacccaaagtctcggcggatcaatgatacctactttatccagatgaaggagctaacaatgaatccccagcttgcaccacgtttgaggtttatggttcgtgatgtgattgatctccggtcaaataactgggtgcctcgacgagaggagattaaggccaagaaaatcagtgaaattcactccgaggcagaaaagaaccttggattacgacctggagcagcatctggcattaggaatggccgtagctcaccaggaggagcccttttgcctggaggggcatttccaatgaatcggccaggaactggaggcatgatgcctgggatgcctggttcaagaaagatgcctggaatgcctgggttggacaatgataactgggaagttgcccgttctaaatcgatgccaagaggggactcgattcgcaaccaggggccgttgcttaataagccatcaacagttcacaagacatcatctattaacacgaggcttcttcctcaaggcagtggcgcaggactaattggcaagagcgcacttttgggaactggtgccccaccatcacgtcctctcagctttgggcctgagcccacacctcaaattacaccatcaccaaaaccattaagtgcagcaccagctcttgcccctgctcctgataaaccagccagtgctcccaaggggaactctgctgagcttaagaagaaaacaatagctcttcttgaggagtatttcagcatacgtattttagatgaagcacagcaatgtatcgaggagttgcagaatcgtggttactacccagagattgttaaagaagctgtcaatcttgccctagataaagggaccaattttgttgatcctctcgttaggctactggagcatctgtacacaaagaaaattttcaagactcaagacctggaatccggttgcttgttatacggtgctctgttggatgacattgggattgaccttcctaaagctccaacgcaatttggtgagattattgctcgcctgactttgttaggtgccttgagatttgaagttatggaggagattttaaagaaaatggaggataccatgtaccgcaaagcagtttttgatgctgtcaagaaaaccttggaagcaaacccatcgggccagacaatcttaggctcacatgctgctgtaatagacgcttgcaacagccttttggaataatcctcttagcagctttggccaaccaactttttcagatgctgtctcttgcgaaagacagtgtcgtgtattccctgtagcttagggccttgtttgggagtaagggtaatagaggggattggaggggttagaatcccccactattcaattttaaatagtagaggattatagccccctcaatccccttcatttcacttgctcccaaacaagccctagatgtccaaggaacgcagtaccaaagatgcgaggaacagccagttttgggctgtataattttgcgagatcagatgagtgttaatttattattattattattgtttggaccaggatggaaagaaagaagccatggattttacccttgggcgaccagcttattttgctggaggccccagatgaacaaggctaaatatatgatgttttcgtgtccacttaaactgttgctagttcttttcctgcgactacactttttgtaacgttgtactatggttttggaccgttttgtctgttacagtatattttgcctttatttaggagtcatgactcgatctgcc

SEQ ID NO: 100851 - DNA, 2915 bp, Zea Mays
cccttcccgtctcatatctacctcgaaagaggggtcgcagacggaacccttccaccctcccgacaccaccttcgattcctctgcgatttccccccgcgcgctcgccgattccttgatcgactcccgcgtgattcgctttctggtcggattctctctcctcaagcatgcagtcggatcagcctgtgatcagcttgcgccccggcggcggcggcggcccgcgcgccggccgcctcttctcccccgcctttgccacctccgtttccggagacttcctccgcctgcacgtcggtggcgcctccggcatctccaagatcggtgattcacattttgagccacgtgagcgtgttcgttacacaagagatcaacttctcgagctgcgtgagcttgttgatgtgtctgaggacattttaaggctcaagcaagagattgatatagagcttcatggtgaagatcagacctggattcacaatgattcagctgttcaaggacaagtccaaggtcaaacacaagcacagaatcggtatgctgagacggataatcgtgattggcgtgcacggtctgcacaaccgccttcggctaatgaagagaaatcttgggacaacatacgcgaggctaaagaagcctacacctctagtggtaggcaacaagagcaagctaacagacaagatcatttggctctacccctgctcttatcaaggctgaagtgccctggtcagcccgaagaggcaatctctcggagaaagaaagagtgttgaaaacagtgaaaggtatactgaacaaacttacaccagagaaattcgatcttctgaagggtcaactaatggaagctggaattactacagctgatatcttgaaggatgttataaatctcatatttgagaaggcagtttttgagcccactttctgtcctatgtatgctcaactttgttccgatctcaatgaaaagctcccgacattccctcctgaagagccaggtggcaaagagatcacattcaagcgtgtactattgaacaattgtcaggaagcctttgaaggtgctagcagcttaagagctgatattgctaaattaactggccctgaccaagagatggagagaagggacaaagaacggttggtcaaacttagaacacttggaaatattcggctaattggtgagctactcaagcaaagaatggttcctgagaagatagttcatcacattgttatggagctattggggtctgggccagataaaaaaacatgccctgaagaggaagatgttgaggccatctgtcatttcttcaatacgattggtaaacagcttgatgaaaacccaaagtctcggcggatcaatgatacctactttatccagatgaaggagctaacaatgaatccccagcttgcaccacgtttgaggtttatggttcgtgatgtgattgatctccggtcaaataactgggtgcctcgacgagaggagattaaggccaagaaaatcagtgaaattcactccgaggcagaaaagaaccttggattacgacctggagcagcatctggcattaggaatggccgtagctcaccaggaggagcccttttgcctggaggggcatttccaatgaatcggccaggaactggaggcatgatgcctgggatgcctggttcaagaaagatgcctggaatgcctgggttggacaatgataactgggaagttgcccgttctaaatcgatgccaagaggggactcgattcgcaaccaggggccgttgcttaataagccatcaacagttcacaagacatcatctattaacacgaggcttcttcctcaaggcagtggcgcaggactaattggcaagagcgcacttttgggaactggtgccccaccatcacgtcctctcagctttgggcctgagcccacacctcaaattacaccatcaccaaaaccattaagtgcagcaccagctcttgcccctgctcctgataaaccagccagtgctcccaaggggaactctgctgagcttaagaagaaaacaatagctcttcttgaggagtatttcagcatacgtattttagatgaagcacagcaatgtatcgaggagttgcagaatcgtggttactacccagagattgttaaagaagctgtcaatcttgccctagataaagggaccaattttgttgatcctctcgttaggctactggagcatctgtacacaaagaaaattttcaagactcaagacctggaatccggttgcttgttatacggtgctctgttggatgacattgggattgaccttcctaaagctccaacgcaatttggtgagattattgctcgcctgactttgttaggtgccttgagatttgaagttatggaggagattttaaagaaaatggaggataccatgtaccgcaaagcagtttttgatgctgtcaagaaaaccttggaagcaaacccatcgggccagacaatcttaggctcacatgctgctgtaatagacgcttgcaacagccttttggaataatcctcttagcagctttggccaaccaactttttcagatgctgtctcttgcgaaagacagtgtcgtgtattccctgtagcttagggccttgtttgggagtaagggtaatagaggggattggaggggttagaatcccccactattcaattttaaatagtagaggattatagccccctcaatccccttcatttcacttgctcccaaacaagccctagatgtccaaggaacgcagtaccaaagatgcgaggaacagccagttttgggctgtataattttgcgagatcagatgagtgttaatttattattattattattgtttggaccaggatggaaagaaagaagccatggattttacccttgggcgaccagcttattttgctggaggccccagatgaacaaggctaaatatatgatgttttcgtgtcc

SEQ ID NO: 100852 - DNA, 1081 bp, Zea Mays
gccgccgccgctgcctactcccgccccatctctcccccgtccggccgtcgtgctcttagccttcagaatcggatgctcttctttgttttgtagccggctcggtcggttcgtcgaagatcccggatctgctctgtcacgaggtctttcggcgggtgttgtctcgcgaggtgtagcgagccaagttcaggagagtttcgagaagctgaaatggctcctaaagctgctcctgccaagaagggtgatgccaagacccaggccttgaaggttgccaaggctgtgaagtctgggtcagtaaagaagaccaagaagatccgcacgtccgtgacatttcaccgccccaagaccctgaagaaggctagggaccccaagtacccaagaatcagcactaccggaaggaacaagcttgatcagtaccaaattctcaagtatcccctcaccacagaatcggcgatgaagaagattgaagataacaacactcttgtcttcattgtcgacctcaaggcagacaagaagaagatcaaggctgctgtcaagaagatgtatgacattcaggccaagaaggtcaacaccctgatcaggcctgatggaaagaagaaggcttacgtgaagcttatgcctgactatgatgctcttgatgtggccaacaaaatcggcatcatctaaagttaccgcgtcaggcatctgctgtgctctatttccatgtgaaaccagagtttttgtagctatggctcagtggctccatgaccatgtcttatgcacacttacgaatttgatatcatccaagtcacaggttgtgctcatcaatacttggatactatcacttattcgtattgggttggtctttggctctcacatttctttgtattgggttggtgttttgatctcacctttcttcgcattgggttggtctttggaaattggaactcggcctgatagctgttggagtatagtgtatggatctgcgttcataatgcgagcagcagcgcatggaaattggttacggcaattgtgcatgcaattttctcgaagtgtgccgtgatgtagccgcgctgcttgtacacgtgagcttttctcctattta

SEQ ID NO: 100853 - DNA, 1515 bp, Zea Mays
ggagtgagttactcgggtccattcttaaaaacctctgctcgggcctagggtttcctcccagtcgtcatcgcttggcgtccgcctcagcccgccgccaggagagccggctcggtcggttcgtcgaagatcccggatctgctctgtcacgaggtctttcggcgggtgttgtctcgcgaggtgtagcgagccaaggtctggtcgcctggtagatttcctgtatctgctcatatcggtagcttttgcttttaatcgtgagaatgttttgtggggagtctcttcgaccttagtacgctgatcccatcggggtaatgatatgtatggaatacggatgctgcctaggtttctaatattcttgctatggttgatttgggcatgacgttgatttagtaatggtatttctatgattatgttttttgttctaactttgggttaacgttagacagtgaactctaatctgcacatacggttagagctagaccgagagctgttgttaatcagtagctattcatgtagatgacatcattcttctttggttccctgcatttttcatgattttctattttcttctttgcttcttcacccatctgacattgtggtcttcattctctgtttccagttcaggagagtttcgagaagctgaaatggctcctaaagctgctcctgccaagaagggtgatgccaagacccaggccttgaaggttgccaaggctgtgaagtctgggtcagtaaagaagaccaagaagatccgcacgtccgtgacatttcaccgccccaagaccctgaagaaggctagggaccccaagtacccaagaatcagcactaccggaaggaacaagcttgatcagtaccaaattctcaagtatcccctcaccacagaatcggcgatgaagaagattgaagataacaacactcttgtcttcattgtcgacctcaaggcagacaagaagaagatcaaggctgctgtcaagaagatgtatgacattcaggccaagaaggtcaacaccctgatcaggcctgatggaaagaagaaggcttacgtgaagcttatgcctgactatgatgctcttgatgtggccaacaaaatcggcatcatctaaagttaccgcgtcaggcatctgctgtgctctatttccatgtgaaaccagagtttttgtagctatggctcagtggctccatgaccatgtcttatgcacacttacgaatttgatatcatccaagtcacaggttgtgctcatcaatacttggatactatcacttattcgtattgggttggtctttggctctcacatttctttgtattgggttggtgttttgatctcacctttcttcgcattgggttggtctttggaaattggaactcggcctgatagctgttggagtatagtgtatggatctgcgttcataatgcgagcagcagcgcatggaaattggttacggcaattgtgcatgcaattttctcgaagtgtgccgtgatgtagccgcgctgcttgtacacgtgagcttttctcctattta

SEQ ID NO: 100854 - DNA, 1134 bp, Zea Mays
atttagcccacaaggcccacctatattatgggagtgagttactcgggtccattcttaaaaacctctgctcgggcctagggtttcctcccagtcgtcatcgcttggcgtccgcctcagcccgccgccaggagagccggctcggtcggttcgtcgaagatcccggatctgctctgtcacgaggtctttcggcgggtgttgtctcgcgaggtgtagcgagccaaggtctggtcgcctgttcaggagagtttcgagaagctgaaatggctcctaaagctgctcctgccaagaagggtgatgccaagacccaggccttgaaggttgccaaggctgtgaagtctgggtcagtaaagaagaccaagaagatccgcacgtccgtgacatttcaccgccccaagaccctgaagaaggctagggaccccaagtacccaagaatcagcactaccggaaggaacaagcttgatcagtaccaaattctcaagtatcccctcaccacagaatcggcgatgaagaagattgaagataacaacactcttgtcttcattgtcgacctcaaggcagacaagaagaagatcaaggctgctgtcaagaagatgtatgacattcaggccaagaaggtcaacaccctgatcaggcctgatggaaagaagaaggcttacgtgaagcttatgcctgactatgatgctcttgatgtggccaacaaaatcggcatcatctaaagttaccgcgtcaggcatctgctgtgctctatttccatgtgaaaccagagtttttgtagctatggctcagtggctccatgaccatgtcttatgcacacttacgaatttgatatcatccaagtcacaggttgtgctcatcaatacttggatactatcacttattcgtattgggttggtctttggctctcacatttctttgtattgggttggtgttttgatctcacctttcttcgcattgggttggtctttggaaattggaactcggcctgatagctgttggagtatagtgtatggatctgcgttcataatgcgagcagcagcgcatggaaattggttacggcaattgtgcatgcaattttctcgaagtgtgccgtgatgtagccgcgctgcttgtacacgtgagcttttctcctattta

SEQ ID NO: 100855 - DNA, 1046 bp, Zea Mays
ggcgcgcattcctcatttagcccacaaggcccacctatattatgggagtgagttactcgggtccattcttaaaaacctctgctcgggcctagggtttcctcccagtcgtcatcgcttggcgtccgcctcagcccgccgccaggagagttcaggagagtttcgagaagctgaaatggctcctaaagctgctcctgccaagaagggtgatgccaagacccaggccttgaaggttgccaaggctgtgaagtctgggtcagtaaagaagaccaagaagatccgcacgtccgtgacatttcaccgccccaagaccctgaagaaggctagggaccccaagtacccaagaatcagcactaccggaaggaacaagcttgatcagtaccaaattctcaagtatcccctcaccacagaatcggcgatgaagaagattgaagataacaacactcttgtcttcattgtcgacctcaaggcagacaagaagaagatcaaggctgctgtcaagaagatgtatgacattcaggccaagaaggtcaacaccctgatcaggcctgatggaaagaagaaggcttacgtgaagcttatgcctgactatgatgctcttgatgtggccaacaaaatcggcatcatctaaagttaccgcgtcaggcatctgctgtgctctatttccatgtgaaaccagagtttttgtagctatggctcagtggctccatgaccatgtcttatgcacacttacgaatttgatatcatccaagtcacaggttgtgctcatcaatacttggatactatcacttattcgtattgggttggtctttggctctcacatttctttgtattgggttggtgttttgatctcacctttcttcgcattgggttggtctttggaaattggaactcggcctgatagctgttggagtatagtgtatggatctgcgttcataatgcgagcagcagcgcatggaaattggttacggcaattgtgcatgcaattttctcgaagtgtgccgtgatgtagccgcgctgcttgtacacgtgagcttttctcctattta

SEQ ID NO: 100856 - DNA, 1207 bp, Zea Mays
tcactattttacacgaagcaacctaaataagccccttatatacaacccatccagcaggtgataccaggatccggcgcgcattcctcatttagcccacaaggcccacctatattatgggagtgagttactcgggtccattcttaaaaacctctgctcgggcctagggtttcctcccagtcgtcatcgcttggcgtccgcctcagcccgccgccaggagagccggctcggtcggttcgtcgaagatcccggatctgctctgtcacgaggtctttcggcgggtgttgtctcgcgaggtgtagcgagccaagttcaggagagtttcgagaagctgaaatggctcctaaagctgctcctgccaagaagggtgatgccaagacccaggccttgaaggttgccaaggctgtgaagtctgggtcagtaaagaagaccaagaagatccgcacgtccgtgacatttcaccgccccaagaccctgaagaaggctagggaccccaagtacccaagaatcagcactaccggaaggaacaagcttgatcagtaccaaattctcaagtatcccctcaccacagaatcggcgatgaagaagattgaagataacaacactcttgtcttcattgtcgacctcaaggcagacaagaagaagatcaaggctgctgtcaagaagatgtatgacattcaggccaagaaggtcaacaccctgatcaggcctgatggaaagaagaaggcttacgtgaagcttatgcctgactatgatgctcttgatgtggccaacaaaatcggcatcatctaaagttaccgcgtcaggcatctgctgtgctctatttccatgtgaaaccagagtttttgtagctatggctcagtggctccatgaccatgtcttatgcacacttacgaatttgatatcatccaagtcacaggttgtgctcatcaatacttggatactatcacttattcgtattgggttggtctttggctctcacatttctttgtattgggttggtgttttgatctcacctttcttcgcattgggttggtctttggaaattggaactcggcctgatagctgttggagtatagtgtatggatctgcgttcataatgcgagcagcagcgcatggaaattggttacggcaattgtgcatgcaattttctcgaagtgtgccgtgatgtagccgcgctgcttgtacacgtgagcttttctcctattta

SEQ ID NO: 100857 - DNA, 409 bp, Zea Mays
cgctagaagcctgtgataggggaatattaagaacaagttgtgatttgcactaaactgcttgttgattagaacaagttgtgatttgctcgcacaggcttgataatttgcatggatgctgattcacctttcaagtactgatgcagtttgaaccctttcatatagcagttttagttaagtacttattcaaatgaaatgatgtgcttatgcatgaatatttttactccctttacctgaacttatggccctttatgttgtatcaggaattttcttcatgatgttgggcattgtaatgttcatccctgggttctactacacaaggattgcctactatgcatacaaaggttacaagggcttatctttttcgaacatcccaccgatctgaaggacgctttgatgcaaacttgtgcgg

SEQ ID NO: 100858 - DNA, 971 bp, Zea Mays
gtaggtcattccgtggtccgtggctgataatagaatctggaaaaaatttccaatgtcagagcttcgttgtaaaatactaggacgttttggtaatgatctgagatgtaaaaaaaaaaaaaaaacaaaactccgtgaaatcagattcgaaacttcatatgtaaattatactcccttcctaccaaaatataaatgcattctacatttatgtatatatactatacattatcatttgaatgtatatggatagaaaaaataagctagaaagaactatattttagaacggaagaagtgtcatattatgtaaaaaagaatatatgaaaatcgtactgatatgttgggcttgcagcttagctgtgtttggtagctattcatctcgatagggccaggtgcaattgaaatttaattttaagtctacaattggtaaatggcgatatttctattttaggtgatgatcaagaaaggtagaaagtggattatagagttaggcaaaggcaagataagcattactttttgcttttcaatggtatcttttagcatcatatgatcgtgctcttgcgttgcatcctagtaagtagttagtgaattttgattcttatatttattatttgcatgctttgattgtgttgttatcaagcacaaaaaacgagattgtaatgaaaacataccccatttgtcattaagtttggacttttggtgtttgattaaagcaactatttggactaatattgttttatactatacaaggtataattcagcagtatgtaaggtggagttggacttagataaaatgatcaacaccttaagtaagacattagaagacattaaagtctgataatgatatgcactatgggtactagactgagtccggtaaagaaaagttcgagtggatggatccatggactctgctatgagcccataagggaggtccacaaataataggcttccagaagattagatatgacaagcatctc

SEQ ID NO: 100859 - DNA, 608 bp, Zea Mays
gttttaaggcattctaaacttagctctggacctcagttttcaaaactgcggtattataaactacggtattgtcataactaaagtatagtatagtatttcaaaaactgtggttttcaaaaactttgttcccaaacagggcctaacttgtttgtcacgtgataaaggatgcaaactgaaccagagcctacaggtatgttcctcctacactaatgtggcatatgaatgcgcccttagccagtactcctccgttccaaattaaaatttgttttattaattaatgggtttatacaatacttgatgtatttgttttatatatgtctaagttcatgttcatctatttgaatatagacataaaactaagagctaaaataactactattttagaacgaatgaagtatataattaccatgtaagaaattaaaacttgtgtgatcaagaaattaaaacaagagacggttttatttcaagttttgagtaatagtgcttgcttgattaaacttatctcttttactggtaatggttcattgatgatttgttcaattgtatatacattattttaggattcttgcaatcaagtcttttgaactttgatgatcaatagacaattg

SEQ ID NO: 100860 - DNA, 131 bp, Zea Mays
gtttcaaggtacgcgcaagcatggtccctggtgaaagttgtaggttggttaagaaataaatattttctggtatatgtagccaaagtttgcgttgggggtttctaaatttgaattcaacctacgaacttttc

SEQ ID NO: 100861 - DNA, 413 bp, Zea Mays
aaatctacccacctcctcagacctcactccactcaccgttgccaaaagctcccacccacctctcatgggcagggttcatgtcacggcagccggccgcccgcccgcccgcgttcggcggcgcgcatgcagcatacaccgccccaggcccgatcgatggaggggaggggagcgcccgcgagaaccctaaaaagcctccgctcaacctctatgctggatgggatcagctggacggaggcctggagcgtccagcactccagcctgccacacgcctgggctggggcccacctccccgctataaagcggagccgccgggttaccgttgaagtctgaggagacctgatccacaagcaccgccgccgtgtgccagagatgagatgccatggaagagcaagaagacgcatggaattgtgacg

SEQ ID NO: 100862 - DNA, 1463 bp, Zea Mays
tgggctctggatgctgctcaaagcggagatgctgtaaagatcggttccttggcgagcgcgccgacgatggcggccggcggccgcgtgcggttcaacgtgggcgggcaggtgttcgagacgaccaccacgacgctggccaacgccggtcgggactccatgctcggcgcgctgctcgactcgtcctggaacgtctcctcctcgggcggcggcggcggcggggtggccgagtacttcatcgaccgcaacccggcctgcttcgcggtgctgctggacctgctccgcacgggcagcctccacgtgcccccgcacctcccggagaagctgctctaccgggaggcgctctactacggcctcctcgaccacgtgcgcgccgcgcggtggggcgcgttcgacggcgaccgcctccgcctcgccgcgtccgtgccggggcgcgcccccggggacggcacggccatccgcgccgcccccgacggcgggtgctgcgtggcgcacggcggcgccgtgcgcgtgtacaactggatgctcgacgagcgccggccggtgtcgctcgaccactcgcaggtcaacgacgcggcatacctcgacgccgccacgctgctggtcgcggcccgggagcggctcggcaagcgcgacggcggcatggccgccttctccgcggcctccggcgagctccgccaccgcttccgcgtcgcgcacgaccggcaggccaagtccttcaccgccggcgcgctggccttcgaccaggacgcgagcgtgttcgccagctgcaagggccggctcaacgagtacggcgtcggcgtctgggaccgcgccaccggcgagcaggccgacttcttctacgagccccccggctgcgccctgggcgacgccgacaggctgcagtggctggacgccgccggcgcgctcatggtggccacgctgttccccaaggcggacaactgtttcatcggcctgctggacttccgggccaaggacgtggtgtggtcctggtccgacgccggcgcggccgcgtcgctggacgacaagcgcgtgctccacgccatcgccatggaggacgagcgctccgtctgcgtcatcaaccagtacgacgacctcggcttcctcgacctccggagcggcgccggcggcgtacggtggagctcccggagcaagctgatgaaccggaaggtgcccggcgaggagagctgctacccgaagctcgccacgcacggcggtcagctcttctcgtccatgaacgacagcatctccgtgttcagcgggcccgagtacgtgctgacgtcgacgctccgccggagccacggcggcgccatctgcgacttctccatcggcggcgaccggctcttcgccctgcacaacgaggagaacgtgttcgacgtctgggagacgccgccgcccccgatcatctgaccgtgccaggggactccggccctattggttcctctgcgcacccgttctgtaacttc

SEQ ID NO: 100863 - DNA, 3273 bp, Zea Mays
gccagcgtgatctgtctcatcgcagttgctgtagccggtatttttggtaaactggttgaaggggcctcaacagctcagcccctgctcaacctcagccaacccgggatgttcccgttgcacgattcgaacggcggcgaatcgcgtaaaattggaaggagggagaggtcgagtgcgaacgccacctcctcgccgccgctgccgccaccacaggcgtgtcatcggctataaaaccctacccctgctagtcttcccgtcgccaccagcctcctcgccgaaaccctaaacccttctccccgttaggtttgcccgcgcgccccgacgatggcggaggacgcaccgcctgcagctcctgcgatgacgccggaggaagtgcaggctgagaccgagttgcggatgcgcgacataggccagcgctttggcgctatcccggaggaccacgacgagctgctccgtttactcgaggaagccgaaacctggctgtccagggtggatcaatctccgcccgagggcatgtacaatgctcttcgccccaccatggctgttttgattacaaatgagctactggagcaccctgatcccaacgtgaaggttgctctcacctcttgcttaactgaagttaccaggattactgcgccagaggccccctatgacgatgatgttatgaaggatgtgtttaagagaattgtggagacttttgctgagttggatgacatgaacaacccctcctttgcaaggagggtttcaatccttgattctgttgcaagggttcgttgttgtgttctgatgttggatcttgacttggaccatatgatactggacatgttccgtcatttcttcaaaactgcctccaccaggcattcagaacaagtcacccactgtatggaaattataatgatgtttgtaattcaggagagcgatgatgtccatgctgaactggcatcgtgcctgcttcagaaccttacaagagaagcacaagaaactctcccagcatcttttggacttgcagagagggtactaggcctatgtagggacaagctcaaaccagtgcttcatgagttacttaagggaactcctttggatgaatacagcaacgttgttacgacgttgttccaagatgctggagaaaacaatgttgatgcatcaggagaagacatggcagccaaagggaaactttctgaaaagcctgtttctgacgagtcaccacaggaaacttcaaaggtagaccaaaatgtcaattgcctaggccaagaaggtagtagtccaaacagtactccgacaaccgccattagcaatggtgctgctccagttgacaatgtcaaatctccagatggaccagattcttcaaaacagaagcaagaactgacttctggtgacgagcagacaccagattcttctaaacagaagcaagaactgacttctggtgatgagcagacaccagattcttctaaacagaagccagaactgacttctcttgacaagcagaccaaaagttctgagcaattgatatcttgtgaccaagaagtacgagaaccagtgactgttgaaactgaaaagctatctgatgtcaattcaaagaaagatcacaagctttgttcttccattggatctgagatggctgaacaatcaaaggttgttaaagacaatgagagtatagtagcatctgaggagttatccccagggacaaatgatgttgataaaaagcagataacagagaccggcaatataactactgaggaatcatcaaaaccaagtgatactaagcctgctgtggttaagccaaagagaggccgacctccagcagcaaagtctcaggagaaaaagcctgctggaaagaaacatgcatcagacctaaaatctgcaaaacttgatcctatcactgattctggagggagagctacacggcacctgaataaagatgctgcgaagtcttcatcaaccaaggctgctgaaggagaatctgagaagaagcaacataaaaccagtatgaaattgcagaaagaagatgctgtctctgataaagacaccaatgaggatattagtttgaaggaaatgatgtccccaacaaaaatcgataaatcaaaaggccaacaagaggataatggggcatcatcaaaaagaaaaagtttgcaggaagctcaagagacccctctatcaaagaaaaataaaatacttgatgaaaaccttattggctcaagaatcaaagtttggtggccagatgacaaaatgttctatgcgggtgttgttgaatcattcgatgcctcttcaaagaagcacaaggtttcgtatgatgatggtgatgttgaggtactaatgcttaagaaggaaagatgggagttcatttctgaggaacaagacactgatcctgatgcggtatctaatatgccacgtggcagaaaagctaaggggagctcgggtccacaaatgaaaggagggaaaacaggaacacctcaaagtgatgttaagaatcctcccaagaagagagggcgtccaaaaggcatgcacgacagcaataatatgccaaatgctgatagctctgtgactccagccagactgaagggaaaaagtgttgagaaggatactcaagtgacacctaagactggcaataactccaagaaggaaggtgcaaggcactctcgatctactactggaaaagctcagaatgctgttgtcaaggcaagcagcaaggatgaacctgatagcaccgacaactcaaaagatgatgctggtagtgaagacaagaattcaaaagatgaagtgaaatccagcgaaggtaacgatggatccaagaccaatggtctttcaaccaaaaggaagctagaggagaatgaaggtgagtcatcagaggagaagggttctgctaaaactactaccagaaagaagcgcagaagaaagagccgcaactagttgctcagaagctatgcagctcatcatcttaggggcgttccgcccttgcagtctaaagtctcaagttgctggcatgggacatgccatgtatgctttatattgcctggaccgttttaccagcttagcgctttggcaatttgggcatcatgagtcggctcgtagttgtagcagtcttaaactctcaataggagctataatgtttggtcttacttttctttttagaatctcgttgccaacggttgtgcctctggcaaaaatggatttgatgcttttgctctgcttaaagcttttgtgccaaatcgtaatgcatttcgacttatcttctggcaaacaaaagtatgctcctgttatgaagcgaatgtttcagaa

SEQ ID NO: 100864 - DNA, 1012 bp, Zea Mays
gttagcatgcagtttggtaggttttgaaattatttcttgatttgcaggttctatgcgggtgttgttgaatcattcgatgcctcttcaaagaagcacaaggtttcgtatgatgatggtgatgttgaggtactaatgcttaagaaggaaagatgggagttcatttctgaggaacaagacactgatcctgatgcggtatctaatatgccacgtggcagaaaagctaaggggagctcgggtccacaaatgaaaggagggaaaacaggaacacctcaaagtgatgttaagaatcctcccaagaagagagggcgtccaaaaggcatgcacgacagcaataatatgccaaatgctgatagctctgtgactccagccagactgaagggaaaaagtgttgagaaggatactcaagtgacacctaagactggcaataactccaagaaggaaggtgcaaggcactctcgatctactactggaaaagctcagaatgctgttgtcaaggcaagcagcaaggatgaacctgatagcaccgacaactcaaaagatgatgctggtagtgaagacaagaattcaaaagatgaagtgaaatccagcgaaggtaacgatggatccaagaccaatggtctttcaaccaaaaggaagctagaggagaatgaaggtgagtcatcagaggagaagggttctgctaaaactactaccagaaagaagcgcagaagaaagagccgcaactagttgctcagaagctatgcagctcatcatcttaggggcgttccgcccttgcagtctaaagtctcaagttgctggcatgggacatgccatgtatgctttatattgcctggaccgttttaccagcttagcgctttggcaatttgggcatcatgagtcggctcgtagttgtagcagtcttggcgtgtttggatcaccgccgctggcaccacgccgcaccacacttcgcgcgtcgcagttatggcggccgaatcagccgccgtaccttaggcggggtgtggcgctagacgcc

SEQ ID NO: 100865 - DNA, 419 bp, Zea Mays
ttccatataaaggatacgacaaggataaagaccccctttaacctgaccgttcccgttcgcgtgcatccagcaggaacctttcagaaaattcaaacgaaggatataggtctatctatgcttcattcttctgaaggtgggagaaaagatcaaactgattattgatcaaaattagggtttgaaacttaggtaattaacttcttctgcttagggtttatgcactaagaacaggcaagcctttttgggttgtatccgaagacatggaaagggatgtttttatgtcagcagacgaagccaaagcttatggacttgtcgatattgtaggggatgaaatgattgacgagcactgtgatactgatccagtgtggtttccagaaatgtttaaggattggtagtgggtggatttcttggagctatcgttt

SEQ ID NO: 100866 - DNA, 420 bp, Zea Mays
atactcttatcttcaacgaatggccccgctttcaatgcacctccattttttgtttgatttgacatgaggaacaattttcctatcttgatttggcattattcaacaagaaaaaaaattcgacaaattcctttttttgaaaattatgtgataattatgagaaccactcctactacttcgcgtcctgggatttccacaattgaagaaaaaagcgtagggcgtattgatcaaattattggacccgtgctggatatcacttttcccccgggcaagttgcctgatcgagatgtatggatccatgtgtctacatacctagattctgttcatggattaacgaaaatgtgcaagagctctatttgcctctgccattctatgagtcgcttcctttttgtgtatggcacccccactccctttggcagcatc

SEQ ID NO: 100867 - DNA, 270 bp, Zea Mays
ttggctatttccctcttcctctatccctatcctctaggtacagcgtttgcatcaatagagaactttttcctctgtatgaatcgatattattccaatttaagaaaagtacgattttttcgaacccattctatccaacgaacagttcttaccttaaccttaccgaaatggatcattctggatatttaaagaatcacagatcgagattgttttcgcttaaccaaagaaaagaatgacgcttcttttttactaataatacaagaaaacaaataa

SEQ ID NO: 100868 - DNA, 565 bp, Zea Mays
ggcattttttatcaggctgaggttgatggttcaaatgagtccaatgactttgagcctggttcacttaacacaacaaaccagctcatatgccaatggctatctttcacaatgggaccaattcactgcacaggttgagcccattgcttctactgtgccttacatggttgggagtggtagccacaaaagagattggcctggatcaggatctttctatggaaatcttgactcaggtggtgaatgtggggtaccagctcagaatatgttctatatgccagcagaaaactgtgagcagttctggtactcaacggactacgggatgttccgtttctgcgtagccaataccaagttggactggaggccagcaacggagcagtacaggttcatcaagcacttcctgtcatctgttgatcggcagaaacagccatggctcatcttcctcgcgcaccgtgtcctgggttactcgtcggccaccttctacgccgacgaaggaacaaccgaggagcccatgggccgcgagtgccttcagccactctggtagaagtacaaggtcgatatcgctatgtac

SEQ ID NO: 100869 - DNA, 1015 bp, Zea Mays
ggtatgtgcacttccttccagccaggatttgctttccagcaacagcttgttccaggcatgaggcctgggggtcctcatatgccaaactattatgttccggttgtccaacagggccaacagggtccacgcccaggtattaggcgtggagctggagcccagggccagcaacctgtgccaccatttcagcagcagattcttccgcgaggacggatgtaccgttacccaactggtcgcaacatgcctgaagctccagcgatgccaggggttgctggaggtatgattcaggcatatgatatgggaggcttccctgtgagagatgctgccttatcaccggccgctcaaattgggactctgacttctgcccttgcaaatgctaatcctgagcagcaaagaacgatacttggtgaaaacctatacccactggttgagcaactggaaccaaaccaagctgcaaaggtcactggaatgcttttggagatggatcagaccgaggtcctccacctgctcgagtcccctgatgctctcaagtccaaggttgctgaggcgatggatgttctccgcaatgtggcccaccagcaaaacccaaacctcccgaccagtcagcttgccgcattatcactgaccgaaggcattatgtcctaacttgaaggccataacaaactatcttcagtttccaactcagtgcgggtgtttccagaggttgtctggcacatgacagtattgttccttcgatactatggttggacttgtgaatgttgtttccatactggatgttaggttttatatgcgccctacggtgacctgccgttaaggcaaagaacttatttgcaagtctgagcactattttggggggtggggtggggggtgcgttgtttttataactgtcttttttcccctagttggaagttttcttactcaattgaatgaacgagggaacttattgcatactatcaaatgttttgtgatatggtgttgagtaattatcaacaccttggattttaatctctgttggttt

SEQ ID NO: 100870 - DNA, 1762 bp, Zea Mays
tctctctcctactataaccacctctccacccactagaaccccccctctcgtcgagagagtcgtccccccgcgtgctctccgcctgcggcctctgtatcccgcaaccaaaaactacccccaaaaaaagaagaaaaccccaaatcctcgagatctatcagtatcgagcgacttaccaatccgattgctagggtttagtttcgaaaaaatctgaaaaaaaattctggtcgaggggaggaggcgatgtcggcgcaagtggcggtggtgcctaatgggggcccgggcgctgtccccgcggtggtgtcgccgggagctgtcggcgtggctcagcctctcccgaccacgtcgctctacgtgggcgacctggagggggccgtctcggactcgcagctgtacgaactcttcagccaggcggggcaggtggtgtcggtgcgcgtctgcagggatgtcacctcgcgccgctcgctcggatacgcctacgtcaactacagcaatcccttggatgctgcgagagcattggaagtgctgaactttgctgctcttaacaacaagcctatccgggtgatgtattcaaaccgtgatccaagcagccgcaggagtggatctgctaacattttcataaaaaatcttgacaagacaatagacaataaaacccttcatgagaccttttcttcatttggtaccattctctcgtgtaaggtagctgtggatgaagcaggccaatccaaaggctttggttttgttcagtatgacaaagaagaagctgcgcagaacgctataaaaagtcttaacgggatgcttataaatgataagcctgtttttgttggaccttttgttcgcaagcaagaaagagatcattcttttgacaagacaaaatttaacaatgtctttgtgaaaaatttgtctgagtctaccacaaaggaagatttactcaaaatctttggtgaatatggggatattacaagtgctgttgtgatgattggtatggatggtaaatcaaggtgttttggtttcatcaattttgagaatccagatgcagcttcccatgctgttcaggaacttaatggtaagaagataaatgacaaagagtggtatgttggaagagctcagaagaagtcagaaagagagatggaactaaaaaggagatttgagcaaagcttgaaagatgctgctgacaaatatcaaggactgaacttatacctcaagaacttggatgatagcattggagatgatcaactttgtgaattgttctctaactttggcaaaattacttcgtacaaggtgatgcgtgaccaaaatggtcttagcaaaggctctggatttgttgctttctcaactcgtgaggaagcatctcaggctttaactgaaatgaatggcaaaatgatatctggaaaaccattgtatgttgcatttgcacagcgcaaagaagatagaaaagcgatgttgcaggtaactgttctcaaaccagttgaatttgtgtaatgcatttatgctaattcaaatgtgaaaatagacacaagtgtttactacacagttatgttgttcgtcagaacctagtactctttttggttgtaccgatctggttggtcgcccccagttggtctccatgaataatcctgtctttgctagatgataatcgtcagttgccttgcatacctgaatcaggtgatgcctctagtcggatatctctacttcctgcttgtttgtcgtcctggtgttctggttgtctgtcgcagacatgagacttggtgtatttctattatgc

SEQ ID NO: 100871 - DNA, 1629 bp, Zea Mays
atggtcgccgtcttcaacaaggacgtgctgagctggtacctcatcacgatcaagctcagggaggccgtcgacgccaaactccagaggtcaaccccgcctccgcgggacctgccgctgcggctcacgaacggtgacgcgtcgccgccgctccagcgccagccggccacggccaggtcgcgggcgcagtccccggcgcacagccccaagccgcaggactcggaatgggtggtcgccatccgcgggaagctggcgcaggcgcggtccgaggcggcggccctgccctgggcgcgcctgtccgtgtaccgcgtgcccaagtgcctccgcgacggcgacgagcgcgcctacacgccgcaggcggtgtccatcggcccgctccaccgcggccggcgccgcctgcgggagatggaccgccacaagtggcgcgcgctgcaccaggtgctcaagcgcacgggccacgacgtcaccgcctacctcggcgcggcgcaggctctggaggaccgcgcgcgcgcctgctacgagggccgcgccgccgggatgggcagcaacgacctcgccgagtgcctcgtgctggacggcaccttcgtcctggagctgttccgcggcgcgctggacggcggcaagggcttcgtcgacgacctggggtactcgcgccacgaccccgtcttcgccatgcgcggcgcgatgcacgccgtgcgcaacgacatgatcctgctcgagaaccagctgccgctcttcgtgctggacctcctgctcggcatccagctcgggaacccggagcagaccggcgccgtcgcggccctcgccgtgcgcttcttcgatccgctcatgcccaccgacgcgccgctgcgccgcgaggaccggtccaggctggagtcgtccgtcggcgccgaggccacggcggcgttcgacccgctgcggggcccgatgctccactgcctcgacgtgttccgccggagcctcctgcgcgccagcgtgcagcccacgccgccgccgccgccgccggtgcggctgtggcccaggaagtggtccgtgccgcggcgcgtggctgacaagcggcggcagcagttcgtgcactgcgtgtcggagctccgggaggcgggcatcaggtgccggcgccacaacacggaccgcttctgggacatcaagttcgacaagggcgtgctccacatcccgcggatcctcgtccacgacggctccaagctgctcttcctcaacctcatcgccttcgagcagtgccacatggacatcgccaccccgggcggcaacaacatcacctcctacgccatcttcatggacaacctcatcaactcggcggaggacgtcaagtacctgcacgaccgcggcatcatagagcactggctcggcagcgacgcagaggtggccgatctcttcaaccgcctctgccaggaggtcgtgttcgacatcaacgacagctacctctccggcctgtcggaccaggtcaacaggtactacgaccacaagtggagcacgtgggtggccagcctgcagcatacctacttcagcaacccatgggcgatcgtctccgtcgtcgctgctgtcttcctgctgctgctcaccatgacgcaaaccttctacagcgcctacagctactaccgcccaccccattaa

SEQ ID NO: 100872 - DNA, 1257 bp, Zea Mays
caaatccgcccgcacctgctctgcgcgcgtcgcgcgtcccggatggccatcgtctcctccgcccgactcgtggttccgtagcatgggccactccccctcttccctttccaaatccggcccctcctctccaccgcgccgcagcaggtcattctcccccatggcgccgccgcagcagctgctgctgaccgcgccgttgcaggtcgctgcggggggcagcggcagcgactcgtcctcctcgctgcacgtgctcctggccttgttgagcttcaccttgagaagctacaggttggcgaccgtgggcttgcggcgctttccgcctgtgccaatctggaagttctgttccttgtcaagacccctgagtgcactgattcaggcatcatcagtgttgccgagaagtgccacaaactccgcaaactgcatgtggatgggtggcgcacaaacaggattggggatttcggactcatggctgtggcacgaggatgtccagatctgcaggagctcgttttgataggggtcaaccccaccgtgctgagccttcggatgcttggtgagcactgccggttgctggaacggctggcactttgtgggtgtgaaactgtgggtgatgctgagatcatttgcttggctgagcgatgggctgcgctcaagaagctctgcatcaagggttgccctgtgtcagatcgtgggatggaagcactaaatggggggtgccccagtttagtcaaggtgaagctgaagagatgtcgtggagtgtcatacgagtgcattgagaacctgaaggttactaggggggagtcattttccatcagcttggatgttgtattggagcatgatgccgggagcactagtgaaaatggtgcacaagagaatggacagacacaaattacagagctggccggtcaaatgacaggcatggacctcctcaccaatgccgctggcacacaatcatcgattcataccattaacaggatgaggagtgtcatgtcagcgatccggcgtaggtttggcaatcctctgccaccatgatgattccatgcccataagaccaagattgattattcaaatgacggttgctgaaaaattctacatgactatattattactctattccataacaaagaaaagctagaacgatctttttgtcaaagggtacagcaaccaatgcgtttgctggcaaaaactggtggttgaaagggggattatgtacttatgctcatctcagcctatatgataaaatgtactgcgccctccttccct

SEQ ID NO: 100873 - DNA, 2053 bp, Zea Mays
ccccgaaccggcaccgtctcctactctccttctctggtgcgggtctgcgggatgcacggccctgccatgccaacgccatccccgccggccgccgcatcaccacctacacccacctgaagaacgccgtaccaataaactctctcgggctcgatactttccccatctcccatcccatcctccgatttcccttcccacgccgtccccccaccccccagatcggcaaatccgcccgcacctgctctgcgcgcgtcgcgcgtcccggatggccatcgtctcctccgcccgactcgtggttccgtagcatgggccactccccctcttccctttccaaatccggcccctcctctccaccgcgccgcagcaggtcattctcccccatggcgccgccgcagcagctgctgctgaccgcgccgttgcaggtcgctgcggggggcagcggcagcgactcgtcctcctcgttcgcgccccccgctcgggactacacccaggacctgcccgacgagatcctcgcgctggtattcgcgtcgctctcgcccaccgaccgcaacgcctgctccctcatctgctcccgatggatggaggtcgacgccaccacgcgccaccggctctccctcgacgcccgcgccgcgctggggaacgcggccaccgcgctgttctcgcggttcacggctgtcacgaagctcgcgctccgctgcgcgcgcgactcaggatcggacagcctctccgaccacggtgctgcggcgctggccgccgcgcttccctcggagcgcctagccaggctcaagctccgcggtctaaggcagctctccgacgccgggctagcctccctcgctgccggcgcgccagcgatccgcaagctctctattgcgtcctgcaccttcggacccagggcattcgtcgcggtgctccagtcgtgccccctcctcgaggacctctccgtcaagcgcctccgcagcgtagcagacacgtccggtgccgccagttccattgctgaggagatcaagtttccaccggctttatccctgcgttcggtttgcgtcaaggatctatataacgctctgtgctttgtgccgcttgtggcgtcctcaccgaacctccgctccctcaagatactgcggtgctccggcgcctgggacctgccattggaggtcatcgctgcacgtgctcctggccttgttgagcttcaccttgagaagctacaggttggcgaccgtgggcttgcggcgctttccgcctgtgccaatctggaagttctgttccttgtcaagacccctgagtgcactgattcaggcatcatcagtgttgccgagaagtgccacaaactccgcaaactgcatgtggatgggtggcgcacaaacaggattggggatttcggactcatggctgtggcacgaggatgtccagatctgcaggagctcgttttgataggggtcaaccccaccgtgctgagccttcggatgcttggtgagcactgccggttgctggaacggctggcactttgtgggtgtgaaactgtgggtgatgctgagatcatttgcttggctgagcgatgggctgcgctcaagaagctctgcatcaagggttgccctgtgtcagatcgtgggatggaagcactaaatggggggtgccccagtttagtcaaggtgaagctgaagagatgtcgtggagtgtcatacgagtgcattgagaacctgaaggttactaggggggagtcattttccatcagcttggatgttgtattggagcatgatgccgggagcactagtgaaaatggtgcacaagagaatggacagacacaaattacagagctggccggtcaaatgacaggcatggacctcctcaccaatgccgctggcacacaatcatcgattcataccattaacaggatgaggagtgtcatgtcagcgatccggcgtaggtttggcaatcctctgccaccatgatgtgagatggaaactaatgaactgttatttacagcttttatctaatcacacattcatgttccctaagcttatttcattgcaatgtttcttcatgatgcttttattgggct

SEQ ID NO: 100874 - DNA, 2048 bp, Zea Mays
atgccaacgccatccccgccggccgccgcatcaccacctacacccacctgaagaacgccgtccccataaactctctcgggctcgatactttccccatctcccatcccatccagccatcctccgctttcccttcccctcgccgccccccaccccccagatcggcaaatccgcccgcacctaccccgcgcgcgtcgcgcgtcccggatggccatcgtctcctccgcccgactcgtggttccgtagcatgggccactccccctcttccctttccaaatccggcccctcctctccaccgcgccgcagcaggtcgttctcccccatggcgccgccgcagcagctgcggctgaccgcgccgttgcaggtcgctgcggggggcagcggcagcgactcgtcctcctcgttcgtgccccccgctcgggactacacccaagacctgcccgacgagatcctcgcgctggtattcgcgtcgctctcgcccaccgaccgcaacgcctgctccctcacctgctcccgatggatggaggtcgacgccaccacgcgccaccggctctccctcgacgcccgcgccgcgctgggcaacgcggccaccgcgctgttctcgcggttcacggctgtcacgaagctcgcgctccgctgcgcgcgcgactcaggattggacagcctctccgaccacggcgctgcggcgctggccgccgcgcttccctcggagcgcctcgccaggctcaagctccgcggtctaaggaagctctccgacgccgggctagcctccctcgctgccggcgcaccagcgatccgcaagctctctattgcgtcctgcaccttcggacccagggcattcgtcgccgtgctccagtcgtgccccctcctcgaggacctctccgtcaagcgcctccgcagcgtagcagacacgtccggtgccgccagttccattgctgaggagatcaagtttccaccggctttgtccctgcgttcggtttgcgtcaaggatctatataacgctctgtgctttgtgccgcttgtggcgtcctcaccgaacctccgctccctcaagatactgcggtgctccggcgcctgggacctgccattggaggtcatcgctgcacgtgctcctggccttgttgagcttcaccttgagaagctacaggttggcgaccgtgggcttgcggcgctttccgcctgtgccaatctggaagttctgttccttgtcaagacccctgagtgcactgattcaggcatcatcagtgttgccgagaagtgccacaaactccgcaaactgcatgtggatgggtggcgcacaaacaggattggagatttcggactcatggctgtggcacgaggatgtccagatctgcaggagctcgttttgataggggtcaaccccaccgtgctgagccttcggatgcttggtgagcactgccggttgctggaacggctggcactttgtgggtgtgaaactgtgggggatgctgagatcatttgcttggctgagcgatgggctgcgctcaagaagctctgcatcaagggttgccccgtgtcagatcgtgggatggaagcactaaatggggggtgccccggtttagtcaaggtgaagctgaagagatgtcgtggagtgtcatacgagtgcattgagaacctgaaggttactaggggggagtcattttccatcagcttggatgttgtattggagcatgatgccgggagcactagtgaaaatggtgcacaagagaatggacaggcacaaaatacagagctggccggtcaaatgacaggcatggacctcctgaccaatgccgctggcacacaatcatcgattcataccattaacaggatgaggagtgtcatgtcagcgatccggcgtaggtttggcaatcctctgccaccatgatgtgagatggaaactaatgaactgttatttacatcctttatctaatcacacattcatgttccctaagcttatttcattgcaatatctggtccgtgcaagataaccacctatgggtgtttcttcatgatgcttttattgggctaatcccatcagcattagtttt

SEQ ID NO: 100875 - DNA, 4075 bp, Zea Mays
gcgcactaccccgagaaacgtgcgacgggaacctccgcggttccccaagttcgcctccttcactactctcgcgccccggcacgcctgaaaaaccccacccctcctgccgctccgcctctcccatcacttcccacgcccctcgccgcctcccattccagcgtggacacgacgccactcgccagcacggagacgcgcgcctcgaagcactactgcactagccagccgtcgttcttccgcgccggcgccatgcaccgggtgctcgtgagctcgcttgtggccgccacgccgcgatggctgcccctcgccgactccatcctccggcgccgccggccgcgctgctcccctcttcccgtgctgatgttcgatcggagggcttggtccaagccaaggaaggtctcacgaggcatttcagtggcgtccaggaaagctaacaaacagggagaatactgtgatgaaagtatgctgtcgcatatcatgtggtggaaagagaaaatggagaggtgcagaaaaccatcatccatacaattgactcagaggcttgtgtattcaaatatattagggttggatccgaatttaagaaacggaagcttgaaagatggaaccctgaacatggagattttggtatttaaatcaaaatttcctcgtgaggttctactttgcagagtaggagatttctatgaagctatcggttttgatgcctgtattctcgtagagcatgcaggcttaaatccttttggaggtttgcgttccgacagtattcctaaagctgggtgtccagtcgtgaatttacggcagacattggatgatttgactcgatgtggttattccgtgtgcatagtcgaggaaattcaaggcccaactcaagcccgtgctcggaaaagtcgatttatttctgggcatgcccatcctggtagtccttatgtatttggtcttgctgaagtagaccatgatgtagagttccctgatccgatgcctgttgttgggatttcacattctgcaaaaggttattgcttgatatctgtgctagagacaatgaaaacttattcagctgaggagggcttaacagaggaggctattgttactaagctccgcatatgtcgttatcaccatctataccttcacaattctttgaagaataattcttcagggacatcacgctggggtgaattcggtgaaggtgggctcttgtggggagagtgcagtgggaagtcctttgagtggtttgacggttcacctattcaagaacttttatgcaaggtacgggaaatatatggccttgatgagaaaacggtttttcgcgatgtcaccgtctcattggaaggcaggccccaacctcttcatcttgggactgctactcaaattggagtcataccaactgagggaataccgagtttgttaagaatggtgcttccttcaaattgtggcgggcttccatcaatgtatattagagatcttcttcttaatcctccatcatttgaggttgcagcagcgatccaagaggcttgcaggcttatgggcaacataacctgctccattcctgaatttacatgcatatcagcagcaaagcttgtgaaactacttgagtcgaaagaggtcaatcacattgaattttgtagaataaaaaatgtccttgatgagattatgctcatgaacagggatgctgagctttctgcaatcctgcatgaattactggtacctgcttctgtggctactggtttcaaagttgaagctgatatgctaatgaacggatgtagcattatttcacaacgaatagctgaagtgatttctttaggtgttgaaagtgatcaggcaataacttcattggaatatattccaaaggagttcttcaatgatatggagtcatcttggaaggggcgcgtgaaaaggatccatgctgaagaagagtttgcaaatgttgatagggctgctgaggcattatcaattgcggtcattgaagattttatgccaattatttcgagggtgaaatctgtagtgtcctcgaatggaggtttgaaaggagaaatcggttatgcaaaagaacatgaagctgtttggtttaaaggaaagagattcataccaaatgtatgggctaacacacctggtgagcagcaaataaaacaactgaagcctgcaattgattcaaaaggcagaaaggttggggaggaatggtttacaacaagcaaagttgagaatgctttagccaggtaccatgaagcttgtgataatgcaagaaataaagttcttgagctgttgagaggcctttctagtgaattgcaggacaaaattaacatacttgtcttttgctcaacactgctcatcattgcaaaagcactttttggtcatgttagtgaggctcgaagaagaggttggatgcttcctactatatctcccttatcaaaggactgtgttgtggaggaaagttcaagtgcaatggatttagtaggactatttccttactggcttgatgttaatcaaggaaatgcaatattgaatgatgtccacatgcactctttatttgttcttactggcccaaatggtggtggtaaatctagcatgttgcgatcagtctgtgcagctgtgcttcttggaatatgtggcctgatggtaccttcaacttcagctgtaatcccacattttgattccattatgctgcatatgaaagcctatgatagcccagcagatgggaaaagttcatttcagattgaaatgtcggagatacgtgctttagtcagccgagctactgctaggagtcttgttctgattgatgaaatatgtagaggcacagaaactgcaaaaggaacatgtatagctggtagcatcattgaaagacttgataatgttggctgcctaggcatcatatcaactcacctgcatgggattttcgacctgcctctctcacttagcaacactgatttcaaagctatgggaactgaagtggtcgatggatgcattcatccaacatggaaactgattgatggcatatgtagagaaagccttgcttttcaaacagcaaggagggaaggcatgcctgacttgataatcaccagggctgaggagctatatttgagtatgagtacaaataacaagcagggagcatcagtggcgcacaatgagcctcctaatggcagccccagtgtaaatggcttggttgaggagcctgaatctctgaagaacagactagaaatgctgcctggtacctttgagccgctgcggaaggaagttgagagtgctgttactacgatgtgtaagaaaatactgtcggacctttacaacaaaagtagcatcccagaactggtcgaggtggtctgcgttgctgtaggtgctagagagcaaccaccgccttccactgttggcagatctagcatctacgtgattatcagaagcgacaacaggctctatgttggacagacggacgatcttctggggcgcttgaacgcccacagatcgaaggaaggcatgcgggacgctacggtattatacgtcttggtccctggcaagagcgttgcctgccagctggaaacccttctcataaaccagctcccttcgaggggcttcaagctcatcaacaaggcagacgggaagcacaggaacttcggtatatctcgaatctctggcgaggcagttgctactggacggaactagtcagctgaaggtctttttgctattggatattcaataggaggcgggagctaactgacaccatgccgccctagttttgttgaactgatagtggtgctagccttgtgcatagtaggggccaggggagtaataatatttcccttgtctaaggaagtaattaaggatgtaggagcgcagagcaaatgattagcaaaacgatcacgttcgcagtgcggcaggcattgtgcagctgattcgtttgttcaatcagtgctctcgctcagtgacctgacagcgtgatcactaaacctagtagctgggcgcgcctttctaggccagaacagaacattggcgtgaattagattccagtgcggcagggtgttccctaagtacatgttttcagttcagcggcacttggaatatttttatgagaaaaagctgcgtcttttagcttgga

SEQ ID NO: 100876 - DNA, 3718 bp, Zea Mays
aagccccaaccacccttagcacccgctttcgtctcgctgcgtgcgctctctgtcactccccctcccctcccccctcctcatcagatccggccacctcctgctcacctcgcctcgccgccggtcccgcgccccggagccctagagctctccccgcggcgtgggccgccggagtccccgggcgcgcggagagaatggaggcggcgctggaggcggcgcgcgccaaggacaccaaggagcgtctggccggggtcgagcggctgcacgaggcgctcgacgccgccgcgcggcgcgggctggcggcggccgaggtcaccgcgctggtggacacctgcatggatctgacgcgggacgccaacttccgcatcgcccagggcggcctccaggcgctctccgccgccgccgtcgtcgccggcgaccacttcaagatccacctcaacgccctcgtccccgccgccgtcgagcgcctcggcgacggcaagcagcccgtccgcgacgccgcgcgccagctcctcatcacgctcatggaggtttcttcaccaacaatcatagttgaaagagctggtagttatgcatggactcataagagttggagggtgagggaagagtttgtacgtacggtggcatctgcagttgggctatttgcttctacggagatttccttgcaacgagttttgctttcacctgtcctgcaactaatgaatgattcgaaccaaagtgttcgagatgctgctatctcttgtattgaggagatgtacaagcacatgggatcacaatttcatgaagagttgcagcgccataatctgccttcatacatgctaaaagaaataaattcaaggttggataaaatagaaccaaaggttcgatcctctgatacagcaatgcagtataaggctgtagagtctagatctgttagtgctaatccaaaaagaggcagcccaaggacaaaaaacataccaagggaaagtacactatatggaggtgacacagatgttacagaaaaacctgtggaaccagtaaaagttcattctgagaaagaattgcttcgggagtttgagaagatcgcggctacccttgttccagaaaaggactggtctttacgtattgctgccatgcaaaggattgaagccctggtttatggaggtgcaatcgataatccatcatttcttatgctcctgaagcaactggttcctccattgtctactcagctgtctgatcgacgttctagtattgtcaaacaggcatgccacctacttaatatactatccaaagaactccttggtgattttgagccatttgctgaactattcattccgatgctttttaagcttgttgtcataacagtgcttgtaatcgctgaatctgcagatacatgcataaaaactatcctgcggaattgcaaggttgctaggattcttcctcgcatagttgacacagcaaagaatgatcgaagtgcaatactccgtgcaaggtgctgtgagtatgcacttctggtactggagtattgggctgatgcaccagaaatacaacgttcagctgatttatatcaggatatgataaaatgctgtgtagcagatgcgatgagtgaggttcgtgcaactgcaagaacttgctatagaatgtttgcaaagacatggcctgagcgctcacgccgtcttttcatgtcatttgatcccgcgatacagaggataataaatgatgaagatggtggtgtgcacaaaaggtatgcttctccctcgttgcgtgatagagtcgtgcagccttcacgtgcttcctctcattcaagtggtacacatgtacctggatatggcacttcagctattgtcgcaatggacaagagtgcagctatttcttcagattcatcttttccatcaaacactcttcggttatcacagtcaaagacgattgacagaagttctgagaggagcctggagagtgtgcttagctccagcaaagaaaaagtttccgccattgaaagtttgctgaaaggtgtcagcatgtcagggcaaaatttctctgctgcacgctcaacaagtttggaccttggagttgatcctccatcatctcgtgatcctcctgtgccgcttgcagcaccagcatcaaacgttctgtcattgcagaactcagcactgttggactcatcccttcctaccatcccacctagttcacgaaatggaggttcccgcttattggatacgatgacaacacacttgcccaccaaagaacgatcaaggtcaccatacttgagtaatatgtcatctgagtccatgtctggcttatcactgccttactcaagaaaatctttggagaggctccaagaaggtggccgcatggatgagagctatgatatccgttcaactaggcgaatcccccaaatgcacttggacagaaactatgttgatatgccttatagggattcacataataaccacgtccctaatttccagagacctcttctaagaaaacaagtaatgtcaagagcttctgcaagtggcagacacagctttgatgatagccatgtaccattaggtgatgtgcctggctatacagattctctggcttctctaaatgatgcactttccgagggtctcagccctagttctgactgggtagcaagagtttcagcttttgaatttattaggaatttattgaaacaaggacagaagggcattcaagaaattattcaaaattttgagaaggttatgaagctgtttttccgtcatttggatgatcctcaccataaggttgcacaggcagctttctctacacttgcagagattatcccagcttgcaagaagccatttgaaagttacgtcgagcgaattctaccatatgtattttcacggcttattgatccaaaagagttggtgaaaaaaccatgctccataacattggagattgttggtcgaacatatgctattgatatgttgctacccgcgctagtacgctcattagatgaacagaggtccccaaaggcaaaattggctgttctggagttcgcaaataaatcattcagcaagtactctgtggactctgatggttatagtaacagtggctttcttaaactatggctttcaaaattggcacctttggtaaatgaaaagaatgcaaaattgaaggaggcatctatttctggtatcatatctgtttattctcattttgattcaacagctgtgctaaattttattctcagtttgtcagttgaagatcaaaacctcctgaggagagcgttgaagatcaaaacccctcgtattgaggttgatctggtgaactacttgcagagcaagaaagaacgcccgcgccccaaaccttatgaccaggtggattttggaacttcttcggaggatggctatgcactgacatccaagaagagctatccatttgggcggttttcttctagttcccttgatgctgaagggggcaagatgatcagctcgatgcaagaaccagcgctgcataatgtctctataggtcgaacagtttctgatatgagcatggatcatgctattcaaagtttggagtcatctacaggagctgaagttcatttaactaggggtagagaaccaaagaataacagtaacttagttgcggaagctgctcgctcttggacaagctaccctgaaaaaactgatgcctccgtagatggtgaaactgctaccggtactcctcggttagatttcggtcggtttattacttctgatgggcataatactgttggttc

SEQ ID NO: 100877 - DNA, 552 bp, Zea Mays
atgcagctacactacaggacgtactgctgtatccctgtcgtccgggtccggccggccggtggcgagaacgcgcgcggcaggcaacgacgcggctgcctattatctgtctctgttgttgcttacgaactgtatgccggtgtcgttgaggatgccgacgccggcggacgcgaagttggcgccgacgagcagctggtcgccgcggaggtcggggctgaggtacggcagcgcgggctgggagccgaggtgctcgctgatgatgtcggggatgttgagcccgttggagaaccgccccgtgggcaggtgcgtggggaagtcgatcccgtagggcggcgcgtcggcccgcgccgtggtcatgaggtagttgttgttgccgttgtccacgagggagtccccgaacacgaagaaggcgcgcggcggcgaggcggacgcggccccgaggacgaggagcgccgccaccgcggggacgaggacggtcacgagcagagcagcgtccattgcgcgtggcgcggaagggcctcgctcgctcgctcgcagtcgcggagtgatgactga

SEQ ID NO: 100878 - DNA, 1508 bp, Zea Mays
gttataataaaataggcaaaaatcatgtatgtatcccaactatgctttcatcttacatttttgggtattacccggcggcggcaaggagtgtcagaagactcggaaatcgtttggcaacccacgcggcgggggcaaaatagtcaaaccgttttccatcgttccgtagcatatgcatatcctaaccacgattcgggggcaagcgaacggacacgatggtggccttgaccgcggggatttccgtagctaccggcgtcgtgttcagccccgccggccgccggcgaggccgtggacacgccgcctttcgctgctcgtcgtcctctgccggagagaggcaggctctcttcagccgcatcgcccccgtctacgatcatctgaacgacgtgctcagccttggacagcaccggacgtggaagcgcatatgcgtctcttggtcgagagcgaagatgggggatcgagttcttgatctctgctgcgggagcggggatttggcgttcctgctgtctcagaaggtcggcttagatggagaggtgatggctgttgatttttcaagtcagcaactacagactgctgctggccgtcaggagcaacggtggaagctgtgttacaagaacatcaaatggatcgagggtgatgcacttgatttaccattcacagactgctacttcgatgctgtaacagttggctacggattgcgcaatgtggttgataaatcgaaagcgatgcaagaaatatatagggtcctgaaaccaggatcaagagcttctattcttgattttaacaagagctcatcacttttcacagcgtcattacagagttgggcgatagacaatgttgtggttcctttagctagtggctatggactaactgaagaatacaagtacttgaaaagctccatatcacagtatctaacaggagaagagttggagaaactggccaaagaagctgggttctgtgcagcgaagcactacgagcttggtggagggcttatggggaatctagtagcgactagatgagtagaatgtagaacggaaaatcgagttgcatggttcctctgcatcattttagctgattgtacgctcttcttctatgtattggcctcagatgaggtcaatgacaagtgttgattccagaggggcctggacgtcttgattatcactgtcttctgtttgaacctgcgcttctgtagagcatcgacgttgtgattacgatcaagatggaccgagacgctgacgcatgcttctgcagattacaccggcatgttgttctacagcgcgggagcattcaaaggttcttattaattatgcgttgcaatgtctgagagcatgtgggaatttcagcttttcactgtgcgttgcccattttgcccagaactgacatccagcttttcaccgcgttgctcatttgctctgaactgaatcctttttccccctcagtaaaactgcgtgcagtcctctcctctaccctccggttctcccgtttactcggtccccattgcgacgggtgagatc

SEQ ID NO: 100879 - DNA, 1016 bp, Zea Mays
gttataataaaataggcaaaaatcatgtatgtatcccaactatgctttcatcttacatttttgggtattacccggcggcggcaaggagtgtcagaagactcggaaatcgtttggcaacccacgcggcgggggcaaaatagtcaaaccgttttccatcgttccgtagcatatgcatatcctaaccacgattcgggggcaagcgaacggacacgatggtggccttgaccgcggggatttccgtagctaccggcgtcgtgttcagccccgccggccgccggcgaggccgtggacacgccgcctttcgctgctcgtcgtcctctgccggagagaggcaggctctcttcagccgcatcgcccccgtctacgatcatctgaacgacgtgctcagccttggacagcaccggacgtggaagcgcatatgcgtctcttggtcgaggtatagcgctagtggtaactgtagtagataagcaatgtgaatcaaaatgccctgttctacgatcgattgatgcaaaagtttgctcatatggagttagagcgaagatgggggatcgagttcttgatctctgctgcgggagcggggatttggcgttcctgctgtctcagaaggtcggcttagatggagaggtgatggctgttgatttttcaagtcagcaactacagactgctgctggccgtcaggagcaacggtggaagctgtgttacaagaacatcaagtgagcatcctcaatgtgagggtttgcagatccagaacatcttgtgatttcagagcaactacagtttgcagatccagaacagactgctgctaacatatgtgatatgacgacatgacgttatgtggtacacctacatctgacactggcacttgcagatggatcgagggtgatgcacttgatttaccattcacagactgctacttcgatgctgtaacagttggctacggattgcgcaatgtggttgataaatcgaaagcgatgcaagaaatatatagggtcctgaaaccaggttggatagtggtt

SEQ ID NO: 100880 - DNA, 2154 bp, Zea Mays
atggccgggtggagaaaggcgtggatgtcggtgctggaccgggccggcggcggtggcagcaccgtctccctgcagggccgcctccacctcccgtccatcctcgccagctacaagcggggcggtaataagtacggtaacggccacgtcagcggcaaggcggtggcggcctgcttctcggtcgcggtcgcgctcgccttcttctacgcctcggtcaccggcgggcccgccgccgccggcttctcctcctcctcctacgcgcttctcttgccgtggctgtcgtcgaactcgtcgtcgacgtcaccgaagaaatcgcctccaacacaccctcctcccgtttctcctgccgtggctgcgggcggcgctgctgaccacccgacagacgcgcgcaacgcgaccgcggtgtcgcgtcgcgtgccgagcggcggcgcggtggggggctcgtcgggttcggaggtcggcttggggcgagcgtcatcggcgccccggcgaacgggcagcgcgcagggtcgtctccccctgcaggacgccgggaacgccaccgtgggttccgacgccaaacccaccagtaacagtaaccgaacaagagaagatggaccccaagtagaaaccgcgatgcggatgcagcagtggcaaaaggcagacggagccagtcgcgcttcccacgacgccgccgtcgtcgtcggtgatggcggtcagcgagcggcgaacactacggacatcgccaccggcaactccacatacacagggacttcgagcagagaagaaacagacaaagacagcgccgttggctacgtccagaacctgccacggcgagtggctttgccatcacgaccggagcggaaggcggaaagacacaggcgcaggagagccgtgaggcacaggcacccgaggcgacggaaggagaccctggtctcggcgcaagatctcgctgccgagcgcagcgacgacgagatggctggcgtcaaaaccagcttggccgtcgggccagggaacgacatggccgcaggtgcgaacgccagcatgggcgctgtcggggccggcaacaaccgtgtcgtgtggacgtccggcgtgcaagacctggtttccttcgccaagtgcgacgtgttcagcggccggtgggtgagggacgagagctacgggttctacccgcccaagtcgtgcaaactcatcgacgacgacttcaactgccacaagaacggccggtcggacagtgacttcctcaggtggcggtggcagcctcacggctgtgacattcccaggctgaacgcgactgaattcctggagaggctgagagggcagaggatcatattcgtcggcgactcgctgaaccggaacatgtgggagtcgctggtctgcatcctccgccatggcgtcagggacaggaggagcgtgtacgaggcatcggggaagaaccagttcaagaccagaggatactactccttcgtattcagggactacaattgctcggttgatttcataagatcaatattcctcgtcagggagacgatccgtgagggcagaaacggcactgaagacgcgaagctgaaactggatgagctagacgcgacgaccccagcataccagaccgcggacatcgtcgtcttcaacaccggccactggtggactcactacaaaacatcaagagggctgaactactaccaagagggcaaccatgtgtatcccagcctcgatgttctggacgcgtacaggagagccctcgtcacctgggctagatgggtggacaagaacatcgatccgaggaggactcaggtcgtgttcagaggatactcactctcgcatttcagaggagggcagtggaactcaggagggagatgccacggggagaccgagccaatattcaaccagacgtaccttactgagtaccctgagaagatggttgtcttggagcaggtcttgaggcagatgaaaactcccgtcatatacctcaacatcagcacgctcaccgactaccggaaagatggccatccgtcagtctaccggatacgttgtgatacggaggaggaacggatggcgatggtgaagaagcaggactgcagccactggcaggcaagggctcctggaaattatgagaggatggttacattacagcatcagctattcgtgtgccaaagcagagacatcgatgattcatga

SEQ ID NO: 100881 - DNA, 840 bp, Zea Mays
atggaggaggggccgctcggctggggacggcgccaggaggaggtggtggacgggtggaggaaggggccctggaccagccaggaggacaagctgctcgtcgagcatgtcaggcagcacggcgaagggcggtggaactccgtctccaagcttgcagaggaggcaaatggacaagcctactttttgatggtacggtggtcgacgatcgctcgcagcctccccggcaggacggacaacgagatcaagaactactggcggacgcacttcaagaagggcaagccgtccaagaacgttgagcgcgcgagagcccggttcctcaagcagcgccgggaaatgatgcagcagcagcagcagcagtcgtctcttgggcggcagcacctgcacctcgacgagggcggggaccagcgccgcggcgcgtgctgcaccaccggcgccacggcggcgtccggcgacaacgactgcggcagcgcgaccggtgacgcgtgcgcgccgccgccgacgacgacggtagccaccgaaggcgccggggccgacctggtcatgcacgacgccatggattgcttcttgtgccccatgtcctgctgcgacgacctcctcgtgctccacggcgccggcggacaggccggcaccgggcagctgctgcggctcaacggccagcgacgagtgattctgaatctggggactaggttctgcaacttgtcagaagatgacttatctgagcacagtttgaagaagaagaaatttgttgcaggatcagttggccagaagaggacgggcagaaaggatatggatgatgagaggaatgaagactcaacagatgaagataagcaagataagctctag

SEQ ID NO: 100882 - DNA, 2610 bp, Zea Mays
cccgcggccacgagagagacgagtcaaaacaagacacgagccgcacccgcacctcaaacgctccacctccacagctccactacctcccatgtcggctctgctcccctccaaaacctgccgccgcttcctctccccgcactcctatcggcagccatcgtataatccgtaggcgggtggcggtgtagagccccacgccacgtccccgcgagcagtagtctgcgagccggttggcccggccgggaggaggcggtttggtttgtgctttgaagcgatggagggtgcgtggaggaaggtcaggcaggcgctgggccttcgcctctgcgtgcacgcgcccgcggcaggaggtggaaatgtccagccggcgcagtcgggcgcgggcggttgtcggcgggatgccgcggtggcggtggcggcgccgggcgagtcggggccgaacaccccggcgggtgcgatccgccggtccaagtccgggggcaagtcctcctccttgcactcctccaaggagaaatgtgcaatatgctttgctagcatgagatctggccatggacaggcccttttcactgcagagtgttcccacatgttccattttcagtgtatctcgtctaatgtaaaacatggaaactatgtctgtccggtttgtcgagcgaaatggaaagagataccctatcgctcactatcttctactagccctcatggaagaattggaggtgaccatactcgatcaccccaacaagatcctcatttggctcttcaccagcaagtttcgaaccgtcggcgggaggtccgtcggttacgtacttctgagccagcagactacaatgatgatgaacctttgcagcgcatggaggcttttgacgatcttaactttggatctagtaaaactgctgagatcagctcatacccagaattccaagctgtcccacagtcaacatgtctagatggatttgatattctgatccatgtgaaggccccaacttctagctcagatgatgctacaggaagtttggtcaatggaagctctttgaggttgtcaagacgagttcctattgatattgttactgtccttgatgttagtggcagtatggcaggcacaaaaatggcactcctgaagcaagcaatgggttttgttattcagcaccttcggccatctgaccgactttcagtcattgccttttcatctactgctcgacgactgttccccctccaacggatgtcacatcatggcaggcagcaggccttgcaggcaatcaactcacttggcgctggtggtggcacgaacattgctgatgcgctaaagaaagctgtgaaggtgattgcggaccgcagctataagaattctgtgtgcagtatcattcttctgtcagatggccaagatacttacaacatttcctcaaatttccaaggcacatcagcaggtcgtaggtcacttgttccatctgctaatccaaatgagctccatatggtacccctgcacacttttggatttggagcagaccacgattcagatacgctgcattcgatttctgaagcttctggtggcaccttttcttttattgaggatgaaggtgtgatgcaagatgcgtttgctcaatgtattggtgggcttcttagtgttgctgtccgtgagatgcgtctcagtatggagtgcgttgatcctggtgttctgctctgttccatcaaaagtggcagctatccaagtaaggtagcaagagatggacgaaatggatttgttgatatcgctcacttgtatgctgatgaggagaaagacattttgctttcagtgaccattccaaaatcttgtgaacagacttcactgttaagagttgcttgtgcttacaaagatccggtgagcaatgagactatcaagattcaaggtgacgaggtgaagatcaagaggccagcatctactgtatctgtaccagtttctattgaagttgatcgagagaggaaccgtatacgagctaccaattctatggagtctgcatgggctgctgccgagagaggcgctctctcggaggccgtcaccattcttgaggactgccggagggcactatcacagtgtgttgcaagccagaatggggaccgtctatgcatggcccttgtcgcagagctacgagagatgcaggagaggatggcgaaccgccaactttacgaggcttcagggagggcgtatatgctatctggattgagctctcattcatggcagagagcaacagcacgcggagactctacagatagcaccactcttgttcattcatatcaaacgccgtccatggttcagatgctggagcattcccagaattttggctccctgcctcagggccgaaggccacaagtccagggagcgggatcagtcttagagaagcctagtaagggaaggtaactcaccatcatctcgccagtgtcatgtttggatgatggtgaaaggttaatcttagctttcattagtcttagcatgattgctggtggtttagcagtgcctatttattcttttgctgataggtttatttgagtcctagtgaggttagagcaactccaacagatccttaaattataactcccaaaaggaagtgattgggatcttcttaaaactaatggatacaaaaaagg

SEQ ID NO: 100883 - DNA, 2596 bp, Zea Mays
cccgcggccacgagagagacgagtcaaaacaagacacgagccgcacccgcacctcaaacgctccacctccacagctccactacctcccatgtcggctctgctcccctccaaaacctgccgccgcttcctctccccgcactcctatcggcagccatcgtataatccgtaggcgggtggcggtgtagagccccacgccacgtccccgcgagcagtagtctgcgagccggttggcccggccgggaggaggcggtttggtttgtgctttgaagcgatggagggtgcgtggaggaaggtcaggcaggcgctgggccttcgcctctgcgtgcacgcgcccgcggcaggaggtggaaatgtccagccggcgcagtcgggcgcgggcggttgtcggcgggatgccgcggtggcggtggcggcgccgggcgagtcggggccgaacaccccggcgggtgcgatccgccggtccaagtccgggggcaagtcctcctccttgcactcctccaagcaggagaaatgtgcaatatgctttgctagcatgagatctggccatggacaggcccttttcactgcagagtgttcccacatgttccattttcagtgtatctcgtctaatgtaaaacatggaaactatgtctgtccggtttgtcgagcgaaatggaaagagataccctatcgctcactatcttctactagccctcatggaagaattggaggtgaccatactcgatcaccccaacaagatcctcatttggctcttcaccagcaagtttcgaaccgtcggcgggaggtccgtcggttacgtacttctgagccagcagactacaatgatgatgaacctttgcagcgcatggaggcttttgacgatcttaactttggatctagtaaaactgctgagatcagctcatacccagaattccaagctgtcccacagtcaacatgtctagatggatttgatattctgatccatgtgaaggccccaacttctagctcagatgatgctacaggaagtttggtcaatggaagctctttgaggttgtcaagacgagttcctattgatattgttactgtccttgatgttagtggcagtatggcaggcacaaaaatggcactcctgaagcaagcaatgggttttgttattcagcaccttcggccatctgaccgactttcagtcattgccttttcatctactgctcgacgactgttccccctccaacggatgtcacatcatggcaggcagcaggccttgcaggcaatcaactcacttggcgctggtggtggcacgaacattgctgatgcgctaaagaaagctgtgaaggtgattgcggaccgcagctataagaattctgtgtgcagtatcattcttctgtcagatggccaagatacttacaacatttcctcaaatttccaaggcacatcagcaggtcgtaggtcacttgttccatctgctaatccaaatgagctccatatggtacccctgcacacttttggatttggagcagaccacgattcagatacgctgcattcgatttctgaagcttctggtggcaccttttcttttattgaggatgaaggtgtgatgcaagatgcgtttgctcaatgtattggtgggcttcttagtgttgctgtccgtgagatgcgtctcagtatggagtgcgttgatcctggtgttctgctctgttccatcaaaagtggcagctatccaagtaaggtagcaagagatggacgaaatggatttgttgatatcgctcacttgtatgctgatgaggagaaagacattttgctttcagtgaccattccaaaatcttgtgaacagacttcactgttaagagttgcttgtgcttacaaagatccggtgagcaatgagactatcaagattcaaggtgacgaggtgaagatcaagaggccagcatctactgtatctgtaccagtttctattgaagttgatcgagagaggaaccgtatacgagctaccaattctatggagtctgcatgggctgctgccgagagaggcgctctctcggaggccgtcaccattcttgaggactgccggagggcactatcacagtgtgttgcaagccagaatggggaccgtctatgcatggcccttgtcgcagagctacgagagatgcaggagaggatggcgaaccgccaactttacgaggcttcagggagggcgtatatgctatctggattgagctctcattcatggcagagagcaacagcacgcggagactctacagatagcaccactcttgttcattcatatcaaacgccgtccatggttcagatgctggagcattcccagaattttggctccctgcctcagggccgaaggccacaagtccagggagcgggatcagtcttagagaagcctagtaagggaaggtaactcaccatcatctcgccagtgtcatgtttggatgatggtgaaaggttaatcttagctttcattagtcttagcatgattgctggtggtttagcagtgcctatttattcttttgctgataggtttatttgagtcctagtgaggttagagcaactccaacagatccttaaattataactcccaaaaggaagtgattgggatcttcttaaaact

SEQ ID NO: 100884 - DNA, 1461 bp, Zea Mays
atgcaggttcttggtgatattgttgaatcttgtgttggtgctgtgcttttagattctggcttcaacctgaaccatgtttggaagctaatgctaatgcttcttaaaccaatattgagcttttgtggcatgcacatcgatcctatgagagaactccgagaaacttgtcaatataatggttttgacttgggacttcccgaacctacgaagtacaatggagagttccatgtcaaagtagaagttaacataaacggcaagatgataagctgtactgcagcaaaccggaattcaaaagatgctagaaaagtagctgcacaagaaacactttcgaaactgaagaattatgggtacaagcataaaagaaagtcgctggaggaaattttgcgttctaccacgaaaaaagaatcggaactgataggctatgatgaagaaccaatcaatgttgaggatgacattgacatgcaaatgaataatctactgataaatggagaaagaacctccattcagagtacagcgggagataacaaggttgacaagaatgatgctaatagtggaaggaataataagtccaatgtggtcatgcagaatggttgcctacctagaggggcaactgataaaataaaccaaaaagaatatcatggtgatatggtccgcaaaacagcaaggtcattcctttatgaattatgtgctgcaaactattggaaacctcctgaatttgagttatgcaacgatgaaggaccaagtcaccttcgaaagttcacatgtaaggtccttattgagatcacgggaacttcggtgagccttttggagtgctatagtgatcctaagctacaaaagagagccgcgcaggagcatgcggcagagggagctctgtggtacctcaagcaccttggatacctaccaagagatgaaaatcgtttctagcgacattttaggttttgtagccttcagtcacataaataaacctcggatgggaagagttctgttattgtaagcatgcagtctattcagaggtatatagcatcctggaatctcaatccaacagtcaacagtgcaaaaaaatcataaaagatgcaaaaatgatgacgtgcttctcatcaggctgacatcggaggacatctgcattgtacaacatccaaattgtatgggaagattttcgtcggtatgggtacatatttgggagaaaatcttctcattagctatggtgggtatgtgtatgggaatgcagaattcgaacctgattataactagcaaaattagttgtgtaacccaatagataataaacccaataactaacccacttgtcctaacccttttaagcatccatctacccaacttagacgatcaaccacccgttgtcccatccactagttcacgtgtcatttatttttgttgttttatatagttaaacaatttttttcttgttaaatatcagtatatttgtgttatgttgttgactgtgaa

SEQ ID NO: 100885 - DNA, 2122 bp, Zea Mays
aaagggcctctagcctagtggttaagggctttcgagtagcacttccaactcctgggttcgatccccctcgggagcgaattgtcagatttagttaaaaaaatcccctcgctgtgccccatccgccttcgcgttacgatgtgttgtgcgccaccctctgattgggccgttgcagagtggacggttgacgcctgcccgttagtgatggagggccagtgttcggggattttctcggccgaaaccattgtttcagtctctccttaatataataccgggagggcggtctttccctctcggccgagtttttttacacagaagacaatgggtgtttatttagcctatcagtggttcagcatcggttaataattgcggatcacatgaaaaacttacaaagtagtggtgcccatgatttccaaatctgttccaaagggccaattacatccatatgtacaatgttcaagcaatagcctaggctcctgggctgttggtacataggcttgggctgctagggtgcaaaattagacattataacttgattctgacttcttttgatggtatcgccgcacccataagccacaatggggctccacccctgcatcaaacccccttgtccagcccctgtgcaacttagcttttatgttttttctccaactacacagaagagttgtgtgtcatttcattaagcaagaaatagggtaacacaaagggagagggacatcacccactcccaacacaatagcctttacagacgcgtcagaacacaaagaaactcaaccttggcctaataacaacctggaaacagggccttgtaccatcaaagacacatgtattcctgtgtttccataactcccaagcaaccaggatcaatgaattgaggcctttcttaaattcctttggaactctcttgagtcttgacagtctggctccaccagccggagagtgggtcggtgtaccttatcatttctttctcattgttttcgtgcattaagctcaggaatacgtttatttgctaatatgatggacggtcatagttcagtaaagattttaagtgggtttgcttggactatgctatttctgaataatattttctatttcttaggagatattggtcccttatttatagttttagcattaaccagtctagaaaattaggtgtggctatatcacaagcttcatgtttctacgatctcaatttgtatttattgaatgatggtacaaatctccatcaaaatgagtcatttcataattgcataaaaacgaggagccaatcatagaactacatatgttttgagactcacttccttgaaaagaggaagactagtcatgtaggcagttaccatgaaagaaatgtatctttatcggttgctcgaccaaatccggtcaataaggcagatctaaatgccacaatgtcggctgttcaattttagaaaggcccatctcctgattttctctcaaatcgaataaaactctttagcagttggtttgacagaactgatggtaaggtaggggacccatacctttattctattcccgttcttatagcgagtgaatgaaaagctacacctgttgcttgtgttgattgaaaagaaatatgtcgagacagatcgatgtaggcgctcgtatactgttggcggtgctacaccatagatttgtacctaggagcaagaaccgtggcttaaggattagctaagggataatggcctttctgatctcattcgtcttccgatcgcttcgcataaaatgtaaagttaagattgtccaggtgtagtgcaaggccgttgcctgcctagggagtgcaaggccgttgcttgcctaggggcggggggaaagaagagtgggttggtgggcttctttcagtgtgatttgctcaaaggaaagaagggttttcgagagtcgagagtgaggggaggctcttttttctactctaactcgatacttttctcaactctagagaatggcgtggcctaacccgagcagaagcgaggcaaccccagaggggcattgatcttctgatattagaatctatatacgctatttccgatctgaactgctttagtgagtggatccctagttgggagccacaaacggagggaatagccccagaggacttgtcaagtggatatgg

SEQ ID NO: 100886 - DNA, 672 bp, Zea Mays
ctccaactacacagaagagttgtgtgtcatttcattaagcaagaaatagggtaacacaaagggagagggacatcacccactcccaacacaatagcctttacagacgcgtcagaacacaaagaaactcaaccttggcctaataacaacctggaaacagggccttgtaccatcaaagacacatgtattcctgtgtttccataactcccaagcaaccaggatcaatgaattgaggcctttcttaaattcctttggaactctcttgagtcttgacagtctggctccaccagccggagagtgggtcggtgtaccttatcatttctttctcattgttttcgtgcattaagctcaggaatacgtttatttgctaatatgatggacggtcatagttcagtaaagattttaagtgggtttgcttggactatgctatttctgaataatattttctatttcttaggagatattggtcccttatttatagttttagcattaaccagtctagaaaattaggtgtggctatatcacaagcttcatgtttctacgatctcaatttgtatttattgaatgatggtacaaatctccatcaaaatgagtcatttcataattgcataaaaacgaggagccaatcatagaactacatatgttttgagactcacttccttgaaaagaggaaga

SEQ ID NO: 100887 - DNA, 264 bp, Zea Mays
cgaggggagcggacgcagcaggagctcttggagggctgaagctccagccaagcaccaagtgcccccttcctcgaccaccgctaacaccacgttttgaacacaaggcctagaaccctcaaagacacaagaattatgatgtttctaaagctgccagaccactaggatgattagggaattgagtcctttcctcatgtcctttccaacactcttgatgctttggctccaccagtttgagaaatgcgtgcagtccagcagaggggcaat

SEQ ID NO: 100888 - DNA, 788 bp, Zea Mays
gagactccgacagactcagctcccagggttctgttcctttcccccacaatcgtacgcttccgctcgaagcttccgccatgagcgaggacgaggctgagagctcgagctccggcgcggccgcgagcgaacccaaggatccgagaacgatcgctcgcaaatatcagctggatctttgcaagagggcagtcgatgagaacatcatagtgtatcttggaacgggatgtgggaagacacacattgccgtgttactcatgtatgagcttggtcacctcatccgcaaacccagccgcgaggtctgcgtcttcctcgcaccgaccataccccttgtccgtcagcaagcaatggtgattgcagattccacaaattttaaagttcaacgttactatggaagtggtaaacactctagagatcaccaggcatgggagaaagagatgggagaatatgaggtccttgtaatgacccctcaaatattattgcacaatttgcggcattgtttcatcaggatggacttaattgcactattgatatttgatgaatgtcatcatgcacaagcacaaaaaaggcatccatatgcacaaattatgaaggaattctacaataatgctgataaacatcctcgtgtttttggcatgactgcttcaccaattattggaaaaggtggttctaacaagcttacctacactaaatgtatcaacagtctcgaggaattacttaatgcaaaggtttgttcagttgataatgtagaacttgaaagtgtgattgcttctcctaaggttgaagtgtacttt

SEQ ID NO: 100889 - DNA, 1446 bp, Zea Mays
gttctgcgcggacttgagcatgaacccaccaaccccggccttgtcgccagggtcctcgtcgtggtagacgtaggcgaagccgccgtgccgggtcaggtccatgccggacatctcgtcgtcggccgagatgcgcagcaggcccagcttcttgagcgcgtagaagagcgggcccatggtgcagctcacccacccggcgatcaccaggatctggatgatctgcgcggcgaggagcttcccgccgccgcccatgaacagcccgtagggcctcccggcgccgtagatctcctccacgtactttcgcctcgcgaagagccccgtgaagaggacgccccaggcgccacacccgccgtgcagctgcgccgcctccagcgggtcgtcgaacctgaagcgcgccgcgagggcgttggcgccgatgagcacccacgcggacacgaacccgcagatgacggccgcccacggctccaccacgctgcacccggccgtgatggccgcgaacccgccgaggaggccgttgcagacgtccaccacgttccagtggcccgtctggagccgcttcccgaacagcgtggtgagcgcggcgacgctgccggcgagggtggtggtgacggcggtgcggcccacggccgaccactgcccgtggacggtcccggcggggccgtacgacttgaggatggtggtgaaggacccggggttgaacccgtaccagccgaaccacagcaggaaggtgccgagcaccacgagcgacgcgctgtggcccttgagcgccacggagcggccggcgtggtcgaagcgcccgatgcgggggccctcgatgagcgcgccccacagccccgcgatgccgccgaccatgtggacgacgccggagccggcgaagtcgatgacgccggacccgaagagcagcgggccggacgtgcggctggcgccggcccagccgtcggcggaccagaaccagtgcgacaccacggggtagacgaaccccgtcaggaacgcggagtagatgaggtaggcgacgaactgggtccgctcggcgatggagcccgacgtgatgcccgcggcggcgatggcgaaggcccactggtagaggaagaagtcgtagtcgaagccggtcctgggcaggtgcttgagcccgaagaactgcttgccgatgaagccgttggagggcgtgccgaaggcgaaggcgaagccgaagaggtagtagaagagcgcccccgcggcggcgtcgagcacgttggtgagcatgatgttcatggtgttcttggcgcggacggagccggcgcacagcatggcgaagccgagctgcatggcgaacacgaggtaggccgagaagagcaggtacgtggcgtccaccgcggaggccgtgtccgcgaactgcccgcacaggtagtccgtggcgttcgccgccgccgggccgagcagcggcgccaggtccgccgcgcacgtcgacat

SEQ ID NO: 100890 - DNA, 1365 bp, Zea Mays
cacgccagaaactaatccagatagctagcctttgatttctcacttcaatctgacgaagtgcacacctaggcaacaaactcgaacgcgcgcggtagtggagccgagatgcagggaggggcgacggccaagcagcaggcgcgagacggtgaccgcggcgcggcgaagacgccgacgacggaggggaagggcgacgccgccggcgccaaggctagcgccgacgtggcgaagggcgacgccgccgtcgccaaggctgctggggacgacgtcgtcgtagggaagggcgacgcaggcaacaaggccggcgccggggccatgcaccacggcctgtcggccgtggaggcgaaggactcccagaccatcgtcgcgctgcagtcgccggtgaccgtcatgcgccccgtccgcggcgacctcgaggagcacctccccaagccatatctggcgcgagccctggtggccccggacatctaccaccccgacggcaccgcggccgacgagcacggccaccaccacatgagcgtgttgcagcagcacgtcgccttcttcgaccgcgacgacaacggcatcatctacccttgggagacgtactccggatgccgtgcgcttgggttcaacatgatcctgtctctcttgatcgctcttgtcgtgaacgggaccatgagctatgccacgctgcctgggtggctgccgtcccctctgttcccgatctacgtccacaacatccacaagagcaagcatggcagtgactctgggacctacgacaacgagggcaggttcatgccagtgaacttcgagaacctgttcagcaagtacgcgcgcacttccccggacaggctcacctacagggagctctggtcgatgacggaggggttccgcgacgccttcgacctctacggctggattgcggcgaagctggagtggacgatcctgtacgtgctggcgcgggacgacgaggggtacctgtcgcgggaggccatgcggcgcgtgtacgacggcagcctcttcgagtacgtggagaggcagcgcgcgcagcacgccaagatgtcctagctagagggaagaggatgcgacgtgggcacgtggcctcgatcgcgcgtgaatgaaatggaagccaagtgaacctgtctcggctggtatgtagatagtgagaagggtgtcggccggaaaacaagcagccgtgtgtactactccctcagctcccatcaataacgcagagttcgccggaccggcacctccccatctttgctacttcaacctggtttttcgcgcggtttatgtggctgtctgaagcgagacatgaatttgcgtattgtttaattttacaaaactactgaaatgaacaaaattggcctattagctcagttggtt

SEQ ID NO: 100891 - DNA, 1473 bp, Zea Mays
acacgccagaaactaatccagatagctagcctttgatttctcacttcaatctgacgaagtgcacacctaggcaacaaactcgaacgcgcgcggtagtggagccgagatgcagggaggggcgacggccaagcagcaggcgcgagacggtgaccgcggcgcggcgaagacgccgacgacggaggggaagggcgacgccgccggcgccaaggctagcgccgacgtggcgaagggcgacgccgccgtcgccaaggctgctggggacgacgtcgtcgtagggaagggcgacgcaggcaacaaggccggcgccggggccatgcaccacggcctgtcggccgtggaggcgaaggactcccagaccatcgtcgcgctgcagtcgccggtgaccgtcatgcgccccgtccgcggcgacctcgaggagcacctccccaagccatgtgagagcgcgcgcgcccgccacttcctctcgtcgctgaggcctgctggtgctttgttacattgttacttactgatgacgcgtcgtccactgagacgaggagcacagatctggcgcgagccctggtggccccggacatctaccaccccgacggcaccgcggccgacgagcacggccaccaccacatgagcgtgttgcagcagcacgtcgccttcttcgaccgcgacgacaacggcatcatctacccttgggagacgtactccggatgccgtgcgcttgggttcaacatgatcctgtctctcttgatcgctcttgtcgtgaacgggaccatgagctatgccacgctgcctgggtggctgccgtcccctctgttcccgatctacgtccacaacatccacaagagcaagcatggcagtgactctgggacctacgacaacgagggcaggttcatgccagtgaacttcgagaacctgttcagcaagtacgcgcgcacttccccggacaggctcacctacagggagctctggtcgatgacggaggggttccgcgacgccttcgacctctacggctggattgcggcgaagctggagtggacgatcctgtacgtgctggcgcgggacgacgaggggtacctgtcgcgggaggccatgcggcgcgtgtacgacggcagcctcttcgagtacgtggagaggcagcgcgcgcagcacgccaagatgtcctagctagagggaagaggatgcgacgtgggcacgtggcctcgatcgcgcgtgaatgaaatggaagccaagtgaacctgtctcggctggtatgtagatagtgagaagggtgtcggccggaaaacaagcagccgtgtgtactactccctcagctcccatcaataacgcagagttcgccggaccggcacctccccatctttgctacttcaacctggtttttcgcgcggtttatgtggctgtctgaagcgagacatgaatttgcgtattgtttaattttacaaaactactgaaatgaacaaaattggcctattagctcagttggtt

SEQ ID NO: 100892 - DNA, 904 bp, Zea Mays
atacacgccagaaactaatccagatagctagcctttgatttctcacttcaatctgacgaagtgcacacctaggcaacaaactcgaacgcgcgcggtagtggagccgagatgcagggaggggcgacggccaagcagcaggcgcgagacggtgaccgcggcgcggcgaagacgccgacgacggaggggaagggcgacgccgccggcgccaaggctagcgccgacgtggcgaagggcgacgccgccgtcgccaaggctgctggggacgacgtcgtcgtagggaagggcgacgcaggcaacaaggccggcgccggggccatgcaccacggcctgtcggccgtggaggcgaaggactcccagaccatcgtcgcgctgcagtcgccggtgaccgtcatgcgccccgtccgcggcgacctcgaggagcacctccccaagccatgtgagagcgcgcgcgcccgccacttcctctcgtcgctgaggcctgctggtgctttgttacattgttacttactgatgacgcgtcgtccactgagacgaggagcacagatctggcgcgagccctggtggccccggacatctaccaccccgacggcaccgcggccgacgagcacggccaccaccacatgagcgtgttgcagcagcacgtcgccttcttcgaccgcgacgacaacggcatcatctacccttgggagacgtactccggtatgcgtgcatgcgaattgtattattaattgctgcgtcgatcgttctctagctagcgagttccaccagatcgagtagcagtcggtgctgattgctcgtgcaaattccaaatgtgatcgctccgccgcgctgagacgagatacactaactgcaaacgatgcaggatgccgtgcgcttgggttcaacatgatcctgtctctcttga

SEQ ID NO: 100893 - DNA, 2253 bp, Zea Mays
ctcggggggaggagatagtctcggctctctgctgtgcggcgctggcgaaagaggggttttgatcgcttccttcgtctctctgtcgtgaagtggacgacggaccgagtacctacaccaacttaaacttggatatcaatggagggcggtgtgactgtagcggacaaggcagaattcaaggagtgcctgcggctgtcctggacacagccttacatccttcaacttgtcctgtctgctggcattggcggtcttcttttcggatatgatacaggtgtcatatcgggagccctcctgtacattagagatgactttgctgcggtggaaaagagcactgtattaagggagacaatagtcagtatggctgttgctggagctatagttggagctgcatttggtggctggatgaacgacaagtttggaaggaggccttccatcatacttgccgatgcactgttctttggaggtgccgttatcatggcgttttccccaacacctagagttatcattgttgggagggtatttgttggtcttggtgttggaatggcttccatgacagctcctctgtacatctctgaagcctcccctgctaggatcagaggtgctctagtgagcacaaatgggcttctcatcactggtggccagttcttggcctacctcatcaatctagccttcactaaggtgccagggacctggcggtggatgcttggcattgcaggggttcctgccctggtccagttcgtactgatgctgatgctgccagaatcaccaagatggctctacaggaagggcaggaaagaggaagcagcagcaatcttgcacaagatttaccctgcgaatgaggtcgaggaagagattgactcaatgcgccggtctgtcgaagaagaggtgctccttgagggctccatcggtgagagtggcttcatgggcaagctgaggaaggcgatgggcagcaaggtcgttcgccgcgggctaacggccggcgtcatcgtccaggtcgcgcagcagttcgtgggcatcaataccgtcatgtactacagcccgacgatcgtgcagctggccggctatgcgtccaacaacacagccatggcactgtccctcatcacctcgggcctgaacgccatcggctcgatcgtcagcatgttcttcgtggacagggcaggccggaggcgcctgatgctgatcagcctggtcggaatcgtcgtgtggctcgccgtgctcggcggcacgttcctgggcgccgcacaccacgccccacccgtcagcgacctggagacccgactgttggcgaaccagaaccagacccagacccagacgtgtcccgagttcaacccgaacgtccgctggagctgcatggactgcctcaaggccgcgtccacgtgcggcttctgtgctcaccagggagacaagcttcttccgggggcgtgcttggcgctgaacaacgcgtctcggcatgcgtgccgcgcagaccaccgggagttctacacggaggggtgccccaacaacttcgggtggctggcactgatcggcctgggcgcgtacatcgtctcctactcgcccggcatgggcacggtgccgtggattgtcaactcggagatctacccgctgcggttcaggggcatctgcggcggcatcgctgccgtcgccaactgggtctccaatctcatcgtgacgcagacgttcctgtccctgaccaaggcgctcggaacatcggccaccttcttcctcttctgtgctgtctccttgctggcgctcgtcatcgtcttcctcaccgtgccggagactaaaggcctgcagttcgaggaagtggagcggatgctggaaagggaggactacaagccctggaagaggtaccatggtggcagcagcagcatcgagccggcgaagaacagtgatattggcctcaccccgccatgaaatccacttgttctgttatctagattcaagtagaagtagcaataattcgtagtggcagtttataataggccatctgctgctaatctctctctagatttccaagaagtgaaaaaatgaggtattagtcattcagtatgaaaatacgacatttggtagctgctatactttgttctagagcatttaatcttgattttagctctggggtggcttgtggcattagttgcgcactgtgtttaagacaacattcagaattgtttccttttttactttttaccatttggtgatgaagatacattctgcacttcactgcattagttaagatgaaataaaacttccaagtac

SEQ ID NO: 100894 - DNA, 1439 bp, Zea Mays
cggagaattcaccaataatgacaaggcagagatctgaagtgaacaataaattgatgtctggacacaatatggacacaagggccgcaaaaaagctgagaacagacagatttggcaggactttggttcggcagtccaaatgtcatgcaaacaacagcagttgttctgaagttagcttatcaggcctcaacaacaatggaaaaggaattgactgtgatatcttggatagtgatcaaactggagaagctaatttgaggggggttgatcttagtactgctggaacttatctaaacaaaaacttttctgatataagcacggagcaaggttggagaacaacacacaaccacacaagtaaattacccatttcgtttatgggtaatataactagcagttccggatgggaatctggatcttctaccacacgatctaatcaaaaccatggatctgctggaggcaagcatagctctgttagtggagcaaacataatagttcctgataagatagggaataaaacaataatgcttggtagagaaaggagaaaacaaacctcaacttcttcccatattggtgaaagctctagtgctgctgacgaacctagaggtgatcttcaatcgtcaaaaatatcagctggcccaaatcatagcagtcatcagcataatattcctgtaataaacattgatgacgtatcccctgaagctagacctagttcgagtggattcactaatagaactcttgatcctaccatagaagcacaattggagtcggatgagttattggctcgccaactccaggagcagctctacaatgaatctgctcgttttgccccaacagaagagattgatgcaattgtagcaatgtcacttcaacatgaagaagatactcatcggacatctaggaccttaaggaggttccaaaaccatactagaggtgctcgggctactcgtttgagttcttatcgaaatgctcttagggctgaattagcaacagcaaacaatatgatttcccgtcagcggaatactgctccaataaatttgggattgagagctgctttagcaagatatcctggtgctttgcacattcaaccaaacattgacttaaatgactatgatgcactgcttgctctggatgaaaataaccaccagcacactggtgcttcagaaagccagatcaataatttgccacagtcagtagttcagtccaatagcattgaagatccatgttctgtctgccttgaaaatccttctgtgggagatactatccgccatttgccttgctttcacaagttccataaagagtgtattgacgagtggcttaggagaaagaaactgtgcccagtctgcaagtttgggattaactgaagtttgccgtaccagtctacagtggagttctacttggtagtggcagcgacgaggtgctgcaatttctcatacgggatgctttcc

SEQ ID NO: 100895 - DNA, 1623 bp, Zea Mays
cggagaattcaccaataatgacaaggcagagatctgaagtgaacaataaattgatgtctggacacaatatggacacaagggccgcaaaaaagctgagaacagacagatttggcaggactttggttcggcagtccaaatgtcatgcaaacaacagcagttgttctgaagttagcttatcaggcctcaacaacaatggaaaaggaattgactgtgatatcttggatagtgatcaaactggagaagctaatttgaggggggttgatcttagtactgctggaacttatctaaacaaaaacttttctgatataagcacggagcaaggttggagaacaacacacaaccacacaagtaaattacccatttcgtttatgggtaatataactagcagttccggatgggaatctggatcttctaccacacgatctaatcaaaaccatggatctgctggaggcaagcatagctctgttagtggagcaaacataatagttcctgataagatagggaataaaacaataatgcttggtagagaaaggagaaaacaaacctcaacttcttcccatattggtgaaagctctagtgctgctgacgaacctagaggtgatcttcaatcgtcaaaaatatcagctggcccaaatcatagcagtcatcagcataatattcctgtaataaacattgatgacgtatcccctgaagctagacctagttcgagtggattcactaatagaactcttgatcctaccatagaagcacaattggagtcggatgagttattggctcgccaactccaggagcagctctacaatgaatctgctcgttttgccccaacagaagagattgatgcaattgtagcaatgtcacttcaacatgaagaagatactcatcggacatctaggaccttaaggaggttccaaaaccatactagaggtgctcgggctactcgtttgagttcttatcgaaatgctcttagggctgaattagcaacagcaaacaatatgatttcccgtcagcggaatactgctccaataaatttgggattgagagctgctttagcaagatatcctggtgctttgcacattcaaccaaacattgacttaaatgactatgatgcactgcttgctctggatgaaaataaccaccagcacactggtgcttcagaaagccagatcaataatttgccacagtcagtagttcagtccaatagcattgaagatccatgttctgtctgccttgaaaatccttctgtgggagatactatccgccatttgccttgctttcacaagttccataaagagtgtattgacgagtggcttaggagaaagaaactgtgcccagtctgcaagtttgggattaactgaagtttgccgtaccagtctacagtggagttctacttggtagtggcagcgacgaggtgctgcaatttctcatacgggatgctttcctgcaaagatttttttttgtctaagataaaaaaacaatgtattgctgtgatctgcgcttttgggcatcattttgtatgcacgcacgttttgcttgctatttttgttgtcgtgatccaccaattcccatgaattggttaccagcatcttgtcaatcatttatgtcgccgcatatatgatccatcaa

SEQ ID NO: 100896 - DNA, 1046 bp, Zea Mays
aggagaggggcggcgatgatacagtagatttcaaactcaaactgaccaccagagagagatagaggggagagatcggagaggaaggacgtttggagcaggcggctattgcaggctttgcagccgccgtcctcctgattcgggcccccctccccggatcgctccagattcgcacgatttggggatcgtgcgtttcgccatcagatcgggagaagaaaaatcaaggtgaaggggcaagtttctgcaacttaaataaatagagtgaatatgactgacatgaattctgatgagattcttgaggttcctgacactcctgaccgattacagcagtcaaaataccatgtttccagctctattgttgggagggatggtacaatggcagctgctaatccatcaccacagcgcaaatttagaattagattcaagaacaattccgtgcaaggttcatcaagtcaaaataatggttgtagcatactgcctgcagctttagatactgatcatattttcaaacaagctgaagcagcacagattctggaactgtctaaagactataaggcaaaattttccctacagaaacctgacagcacaaggatatctgttgacagtgaaaagagggctggaaaacatggctttgatcagagcagaagcatttcgaacaatataagttgtagtgtgactggaggaaggaaccctaccttccaagttaaagatggagaggttggtcagcaagatgcaggtcatcagagtgcaaactttctagacataggaccaggttttcctactattcaagtgggaaaaccaggatacagattatgcactcgcactactgataagctgaaaggtgtaacaggtgctgatgtttgtccaggatcaagttctggggaggtcaaaggggacttgatcactaacaaggtcattgcaggacctacaagccctctgcgtgtttttcctcgaaggcatgtgggccaaaaaaggctggtacgcaatggatgtatttccccctctaacatagccaagacagatgcaaaagttaatgaaaaacaggaaat

SEQ ID NO: 100897 - DNA, 673 bp, Zea Mays
cctctcccgtctctcgtactcccttcgtttcctctcctccttctgccctgtgaacttacgatcctgcccctgcgtgggtcccaccatctcagttcgtactttgtgttcggtctctctttttcttttcttttttttccttcaactgctccgcagcgagaccaaaggagggagcaaaaaaaaaaaactctgtgcctctccgtatttcctttcggacggctcagctccgcgctgacgtgtctggaggcgaagcgcagccgtcgatatgtcgctgagcgagaagctggaggccgcgcgtgtcgtcctcggcaagcgcaaggagcgcgagcgcgagctgctgcaggcccagccgctcccggtggcggctagagccgagccgtggaatccggctccggctcgcgcggccccctccgccgccgccgccgccgccggcgacaacaagctcctggccgggcacctggcccacgagttcctcgcccacggcacgctcctgggtcggcggatcgagccgagccgcggagccccggctccggcaccggcgcgggccgagccggaccccaggaagaggtacgcggaggtgtcgtggctgctggtggcgcgcggggcccacgtccccggcgtcgtgaacccgacgcagctcggccgctggctgcagataaaggactgacggccacgt

SEQ ID NO: 100898 - DNA, 444 bp, Zea Mays
cggcaagcacaagcaccccctccccggaaagagctcctctacatttacttcccttcgttggtgtgtgagaataggctccgtctagacccacacgtcagtgacccctctgcaagtacctcctccttggaaggccccgccgccccgtccgccttgtgtcgcgtcgtcccgtgccccatggatccacgggagcaggcgggcaaggtggtggtgatgggcgtcgccccagcggcactgctggtggaccctgcctccgcgaccaaaaaggcacggtcgcggatggagcagcagttccgcacccctccacaggaagtgctgagcctcggctcatgccgtgacctccccgggttcctcgtctccatgccacaggtgagccaagggccaaggcggtagagaagggtagcgaccggcggcagccatcaccatggatgaacggctcctggcgcc

SEQ ID NO: 100899 - DNA, 2097 bp, Zea Mays
gcggtgacataggttgggtgactggctgactgccgcgcgaaaagagagggagagagagctagcgtggactgaacggagggcgcagcaaggacgagccccgctcgcgcggggatggccacagcgagagccgttgccgcagcggcggcggcgctggcggccgtggtgctggtggcgctcctggcgccggccgtgcgtggggtcgaccgcagcgagttcccgccagggttcctcttcggcgccgcgacgtcggcgtaccagattgaaggcgcgtacctggaggacggcaagggtctctgcaactgggatgtgttcacccacacacacagtggaggggtgatggacggacgcacgggagacgtagccgacgaccactaccatcgctacgtgggagatctggagatcctgcagtcgctgggagtcaacgcctacagattctccatctcatgggcgagggttctaccaagaggccgggttggtggcgtcaatgcaggcggggtagctttctacaaccgcctgatcgatgcgctcctgcagaaaggtacggcaggcagtccttgtccacatctctcatgcgctagggtagttgacgggccttaatctctctctctccctctctctcttcttgctccgagtgaccgagtccgaccaaagcaagctcaccagtgagacagtacgtgaccacaacacacgtctggtttctctctttctttctgctgatggtcaggaatacagccattcgtcactctgaaccatttcgacatgccgcgcgagctggaggtccggtacggtggctggctggacgctgggatccgggaggagtacgagcactacgcggacgtctgcttcggggcgttcggcgaccgggtgcggctctggacgaccttcaacgagcccaacctgctggtcaagttccagtacatgctgggcgcgtacccgcccagccgctgctccccgccgttcggcagctgcgggagcggcgactcgcgccgggagccgtacgccgcggcgcacaacatcatcatgtcccacgccgccgccgtccgcgcctacagggagaagtaccaggcgacgcagggcggctccgtcgggatcgtggccgccatgaaatggtacgagccgctgacgaactccacggacgacatcctggccgcgcggcgcgcgcaggctttcgagacggactggtttctggagccgatattcttgggcgattaccccggagcgatgcgggagatcctgggatcggacctgccgaccttcaccgcggaggagaaggcgctgctgctgcggtacaaggcggacttcatcgggctgaaccactacacggcgatctacgccagggactgcctgcgctccccgtgcaacctcgggtcgtacgaagggaacgccttcgtctcggcgaccggggaaagggacgacggggtcaagatcgggggagatactgcgctggcaggtttcttcgacgtcccagaggccatagagctggctatccagtacgtgaacgggaggtacaagggcacgcctgtgtatattactgagaacggttactcgcagtggagtgatgccagcagggaggagctgatcgacgatgtgaggaggaagaactacctgcagggctacatcacgtatctatccaaagcagtcaggaacggagcaaacgtgcggggctacttcgtgtggacgctgctggacaacttcgagtgggcgttcggttacaggttgaagtacgggctgtaccacgtcgacttcgacacccaggagaggacgccccggatgtctgcgaggtggtaccagggcttcctcacggcccgcaccagccagcgcgacgaagcagcgcaggcacggagagcagactcgtgatgaaccactcccatttccaccgatatatatcatcgaacgcattgctagacagccgagggtctcataactcgtgctcatttccgtcctcgccatatattggaataactgtggctgtggtgtcctaatgtctgtatatgcatatatatcatatatgttgacctcaaaagaggtttagatcacacactatagcacacctgaggtcgatacatagtattgaacacagcgagaaatctagagacc

SEQ ID NO: 100900 - DNA, 1911 bp, Zea Mays
gcggtgacataggttgggtgactggctgactgccgcgcgaaaagagagggagagagagctagcgtggactgaacggagggcgcagcaaggacgagccccgctcgcgcggggatggccacagcgagagccgttgccgcagcggcggcggcgctggcggccgtggtgctggtggcgctcctggcgccggccgtgcgtggggtcgaccgcagcgagttcccgccagggttcctcttcggcgccgcgacgtcggcgtaccagattgaaggcgcgtacctggaggacggcaagggtctctgcaactgggatgtgttcacccacacacacagtggaggggtgatggacggacgcacgggagacgtagccgacgaccactaccatcgctacgtgggagatctggagatcctgcagtcgctgggagtcaacgcctacagattctccatctcatgggcgagggttctaccaagaggccgggttggtggcgtcaatgcaggcggggtagctttctacaaccgcctgatcgatgcgctcctgcagaaaggaatacagccattcgtcactctgaaccatttcgacatgccgcgcgagctggaggtccggtacggtggctggctggacgctgggatccgggaggagtacgagcactacgcggacgtctgcttcggggcgttcggcgaccgggtgcggctctggacgaccttcaacgagcccaacctgctggtcaagttccagtacatgctgggcgcgtacccgcccagccgctgctccccgccgttcggcagctgcgggagcggcgactcgcgccgggagccgtacgccgcggcgcacaacatcatcatgtcccacgccgccgccgtccgcgcctacagggagaagtaccaggcgacgcagggcggctccgtcgggatcgtggccgccatgaaatggtacgagccgctgacgaactccacggacgacatcctggccgcgcggcgcgcgcaggctttcgagacggactggtttctggagccgatattcttgggcgattaccccggagcgatgcgggagatcctgggatcggacctgccgaccttcaccgcggaggagaaggcgctgctgctgcggtacaaggcggacttcatcgggctgaaccactacacggcgatctacgccagggactgcctgcgctccccgtgcaacctcgggtcgtacgaagggaacgccttcgtctcggcgaccggggaaagggacgacggggtcaagatcgggggagatactgcgctggcaggtttcttcgacgtcccagaggccatagagctggctatccagtacgtgaacgggaggtacaagggcacgcctgtgtatattactgagaacggttactcgcagtggagtgatgccagcagggaggagctgatcgacgatgtgaggaggaagaactacctgcagggctacatcacgtatctatccaaagcagtcaggaacggagcaaacgtgcggggctacttcgtgtggacgctgctggacaacttcgagtgggcgttcggttacaggttgaagtacgggctgtaccacgtcgacttcgacacccaggagaggacgccccggatgtctgcgaggtggtaccagggcttcctcacggcccgcaccagccagcgcgacgaagcagcgcaggcacggagagcagactcgtgatgaaccactcccatttccaccgatatatatcatcgaacgcattgctagacagccgagggtctcataactcgtgctcatttccgtcctcgccatatattggaataactgtggctgtggtgtcctaatgtctgtatatgcatatatatcatatatgttgacctcaaaagaggtttagatcacacactatagcacacctgaggtcgatacatagtattgaacacagcgagaaatctagagacc

SEQ ID NO: 100901 - DNA, 591 bp, Zea Mays
ggctacgcacaaggtggggatggttatactacccgtgccgaggactcgcttgacgaccagggcaggatacggtacctcgagggctacctcgcaaaactcgccaaagtcatcagtgacggcgccgatgtccgtggctacttcatctggtatctcattgacaatttcgagtggctatatgggtacaccctccgcttcggccttcactacgttgactaccaaacgcaggagagaaagcccaagtcgttggcgctgtggtacaaacggttcctccagagttcacttgaagctcaatagatgaatagagagaggatgccttgttcgaagtacaggcacacagcatgagcttgtgagtgtgacgactgaacatgctgcttcttcaattcagaaaatgaagggcgtgatctttgtatgaatttattgatccttaataaagggggccactacagttgccatctccgacgtccagcccacagtgaaacttggggtggagcgtttccttccccctaggcgaagtgtgacgtgcagctccagattttaaccattattatagagaccaaatagctcatttattatgcaaaacattgtccacac

SEQ ID NO: 100902 - DNA, 1946 bp, Zea Mays
gaaaaccagcgcggcgagcagatatcccacgagaaagccctcgaccccttcaattctccagcaaactagtcaccggcgtgtgcactggtgcagtgcacgcacgacgccggcagcatggcgggcagggccagggcacggcggttcgtgctcgccggcgctctgatgatcgcctggctcctctgtcttctcccacgggccacggcggcggccgtccgcaggagcgacttcccgccgtcgttcctcttcggcaccgccacctcctcgtaccagatcgaaggcgcgtacctcgagggcaacaagagcttgagcaactgggatgtcttcagccacgtaccaggaagaatcgaagacggaagcaccggagatgtcgcggatgatcactatcatcgttacgaggatgacattgagctcatgcactctctcggcaccaacgcctacagattttctatatcatgggccagaattcttccgagagggagattcggcgaggtcaacccagcaggcatcgcgttctacaacagactcatcgactcgctcctgctcaaagggatagagccgttcgtgacgctgtcccactacgacatcccgcaagagctggaggacaggtacggggcgtggctcggcggcgccgaggcgcggcgcgacttcggccacctggcggacgtgtgcttcgcggcgttcggggaccgcgtcaggcactgggccaccttcaacgagcccaacgtcgcggtcaccaggggctacatgctcggcacctacccgccgggccgatgctcgcgctcctgcgcccggggtaactccgacgccgagccctacgtcgccgcgcacaacgtcgtcctggcccacgccgccgccgtccagatctacaagaccaagtaccagagcaagcagaagggcttgatcggcatcgtgatgtccactgtctggttcgtgccgctgacggacgcgccggcggaccggctggcgactgagcgggcgctggccttcgacgttccatggtttcttgacccgataatctacggagactaccctccggagatgcgccggctcctgggctccaggctgccgaccttctcgccggaggagaggaggacgctgggctacgggctggacttcatcggcatcaaccactacacgacgctgtacgccagggactgcatgatctcgccaggttattgcccgtcggggcaggagttccaccaatcgctggcggcctacacgggagaaagagacgggattcccatcggacctccgacagcgatgccgacgttctacgtcgttcctgacgggatagagaagatggtcacctacatcatgaacagatacagcaatctccccatgttcataaccgaaaatggctacgcacaaggtggggatggttatactacccgtgccgaggactggcttgacgaccagggcaggatacagtacctcgagggctacctcgccaaactcgccaaagtcatcagtgacggcgccgatgtccgtggctacttcatctggtctctcattgacaatttcgagtggctatatgggtacaccctccgcttcggccttcactacgttgactaccaaacgcaggagagaaagccgaagtcgtcggcgctgtggtacaaacggttcctccagagttcacttgaagctcaatagatgaatagagagaggatgccttgttcgaagtacaggcacacaacatgagcttgtgagtgtgacgactgaacatgctgcttcttcaattcagaaaatgaagggcgtgatctttatatgaatttattgatccttaataaaggggaccactacagttgccatctccgacgtccagcccacagtgaaacttggggtggagcattttcttcccctaggcgaagtgtgacatgcagctccagattttaaccattattatagagaccaaatagctcatttattatgcaaaacattgtccacac

SEQ ID NO: 100903 - DNA, 790 bp, Zea Mays
ggcagcgccagtttgcttcccggtgatcatggcagcggcggcggcgggggcaaaggccgtgcggggccgtccaagcgcgcgaccacgtaggtcgactccgccagaccgccactccggcagtccggcctctgtgtcaccggaaacttgtcccgataagtataccccctccatgtcttgtgatctgaactgctgtttgcctgtttctcccttacgataagttacatccgtccacagcatttcatgaattgaatggtgtaagtggtaatctatggtgtctccatcggtggaggcgtgggagatccgagatccgactgaaggctgcaaacacgaataccattgctctcatcaattataaatcacaaatcgctatatattccatttctgcaaactgcaacgctaacagtttttgttccattcgattcttcattttctgctgagtcttgtcttattggtgatcggacaaattaattacacgatgggaacagtggcctgtggaggacacatttgttaaattgtcatattcaatgcaaggtagagaatgcgggttccattgacataatcacggaatggcacatctcatagataacccattctgtcgagctgctacctgtatatcgtatcttcaaaacatgacatgaaatttgcacttgatatatttgttgtttccgaacaataagatagaacctgatctttcatgttttctttcgaaacattaaggaaaattagtgtgcactgggcagtgggcagatatgcagttggttctcctgtccatgaacaattaccatctcaa

SEQ ID NO: 100904 - DNA, 1922 bp, Zea Mays
agcaagcaagcacgcagtcacggtcgaaaccagcggacgactactagacgaggaggaggaggagggaaactgaaactgaaaactagcggcggccggagaaagagagctgcgttgcgccgctggtctccatccatcgatttgttttgttggcttcttcgcatgtgattccgccagtaggagtgttgcttatctacccctcctcctcggctcctccacaacgtccagatcatcagagccagagggtaaaacggaatagtctattcccagtagtgataaacaaaacaaagaatcttctctgtcttcgtgcggtgtgcctgccatttccaggcccagctgttcattctcgaggctccttctcttgtagttcgtcgtccttgcgcagcagatcgagaggctgaggggagagggatccatggagctgggaaagcccctttcggcgcacagatgtagctacaccgctacctacacccactgttccataggcttctcccctcgggtcgtccgtaccagctggatccgcgcggcggctgagggcggcgacggcggggcagaccggcgacggagaggtgccagcttcgccgccgatgggcccagggtcgtcgaggtcgccgctgccccggtggctactagcggaggcgccgccggagcagccgggagcgcggggttcggagcacgggacgcggaactcgccatgtgggacaagctcggggcggtcgtcaggctcagctatggcattgggatctacggggccatggcactcgccgggagattcatatgccaaatggccgggatagactgcacggggggcttccatccgtctctcacggcactcgtcgagggtcttggctatgcagctccaccaatcatggctctgctcttcatcctcgatgatgaagttgtcaagtattcgcctcacgcgcgtgccatccgtgatgtggaggatgaggagcttcgcagcttcttctgtggcatgtcaccatggcagttcatcctcatcgtggctgctagctcaattggcgaggagctgttctaccgcgccgccattcagggagcattggccgatattttcctgagaagcacggagctaatgaaggatgctcgagggattgcatcactgagtggtatcgttcctcctctggttccattcgctcagacgttcgcggcagtcatcactgcagccctcacaggaaccctctactacgtcgccacaactccgaaagaccctacgtatgtggtgacaccagcgatgcgttcgcgcacagggcgtgagaacctcaagaaactatttgcagcttggtacgagaggaggcaaatgaggaagatatactcgccgcttctggaaggaatcttggctttctaccttggcttcgaatggatccagaccgacaatatcctggcacctatgatcacccacggcatatactccaccgttgttcttggccatgggctctggaagatccacgaccaccggagaaggctacggcagcggattcagaaggtcaggagtgaagggagtagctctgcagacgacacattgtaactgcagcatatgtagatcggcgtggtctactgctggatagctagctgctgattgcacgcacgtactgggtgatcgatcgatctaccgatcagtcagaagaccagaggcgtacgtctcacaagttttgatctacttaattaatatcaacaaggtaggtataagattgggcaaaaatatatatataatgcatgtagtcatgtaatgtagatacaatgtgtacatatatggataaatatatgcaggctgtaatcaatataggaagtatatagtgtacgattgcgacatccaagtatgttataatcctagtatcacgtatgcatgcaaggaatataccagccacatcctttctttctcgtccctctcccacacttgcaatgttaca

SEQ ID NO: 100905 - DNA, 2008 bp, Zea Mays
agcaagcaagcacgcagtcacggtcgaaaccagcggacgactactagacgaggaggaggaggagggaaactgaaactgaaaactagcggcggccggagaaagagagctgcgttgcgccgctggtctccatccatcgatttgttttgttggcttcttcgcatgtgattccgccagtaggagtgttgcttatctacccctcctcctcggctcctccacaacgtccagatcatcagagccagagggtaaaacggaatagtctattcccagtagtgataaacaaaacaaagaatcttctctgtcttcgtgcggtgtgcctgccatttccaggcccagctgttcattctcgaggctccttctcttgtagttcgtcgtccttgcgcagcagatcgagaggctgaggggagagggatccatggagctgggaaagcccctttcggcgcacagatgtagctacaccgctacctacacccactgttccataggcttctcccctcgggtcgtccgtaccagctggatccgcgcggcggctgagggcggcgacggcggggcagaccggcgacggagaggtgccagcttcgccgccgatgggcccagggtcgtcgaggtcgccgctgccccggtggctactagcggaggcgccgccggagcagccgggagcgcggggttcggagcacgggacgcggaactcgccatgtgggacaagctcggggcggtcgtcaggctcagctatggcattgggatctacggggccatggcactcgccgggagattcatatgccaaatggccgggatagactgcacggggggcttccatccgtctctcacggcactcgtcgagggtcttggctatgcagctccaccaatcatggctctgctcttcatcctcgatgatgaagttgtcaagtattcgcctcacgcgcgtgccatccgtgatgtggaggatgaggagcttcgcagcttcttctgtggcatgtcaccatggcagttcatcctcatcgtggctgctagctcaattggcgaggagctgttctaccgcgccgccattcagggagcattggccgatattttcctgagaagcacggagctaatgaaggatgctcgagggattgcatcactgagtggtatcgttcctcctctggttccattcgctcagacgttcgcggcagtcatcactgcagccctcacaggaaccctctactacgtcgccacaactccgaaaggctccagctaggtagtgttaatcttgaaatctattaaaaccctatatatgtgaggtgacaatgcgctgttcactcaaaattttcagaccctacgtatgtggtgacaccagcgatgcgttcgcgcacagggcgtgagaacctcaagaaactatttgcagcttggtacgagaggaggcaaatgaggaagatatactcgccgcttctggaaggaatcttggctttctaccttggcttcgaatggatccagaccgacaatatcctggcacctatgatcacccacggcatatactccaccgttgttcttggccatgggctctggaagatccacgaccaccggagaaggctacggcagcggattcagaaggtcaggagtgaagggagtagctctgcagacgacacattgtaactgcagcatatgtagatcggcgtggtctactgctggatagctagctgctgattgcacgcacgtactgggtgatcgatcgatctaccgatcagtcagaagaccagaggcgtacgtctcacaagttttgatctacttaattaatatcaacaaggtaggtataagattgggcaaaaatatatatataatgcatgtagtcatgtaatgtagatacaatgtgtacatatatggataaatatatgcaggctgtaatcaatataggaagtatatagtgtacgattgcgacatccaagtatgttataatcctagtatcacgtatgcatgcaaggaatataccagccacatcctttctttctcgtccctctcccacacttgcaatgttaca

SEQ ID NO: 100906 - DNA, 1810 bp, Zea Mays
cgacgggccaagcaagcaagcacgcagtcacggtcgaaaccagcggacgactactagacgaggaggaggaggagggaaactgaaactgaaaactagcggcggccggagaaagagagctgcgttgcgccgctggtctccatccatcgatttgttttgttggcttcttcgcatgtgattccgccagtaggagtgttgcttatctacccctcctcctcggctcctccacaacgtccagatcatcagagccagaggttcgtcgtccttgcgcagcagatcgagaggctgaggggagagggatccatggagctgggaaagcccctttcggcgcacagatgtagctacaccgctacctacacccactgttccataggcttctcccctcgggtcgtccgtaccagctggatccgcgcggcggctgagggcggcgacggcggggcagaccggcgacggagaggtgccagcttcgccgccgatgggcccagggtcgtcgaggtcgccgctgccccggtggctactagcggaggcgccgccggagcagccgggagcgcggggttcggagcacgggacgcggaactcgccatgtgggacaagctcggggcggtcgtcaggctcagctatggcattgggatctacggggccatggcactcgccgggagattcatatgccaaatggccgggatagactgcacggggggcttccatccgtctctcacggcactcgtcgagggtcttggctatgcagctccaccaatcatggctctgctcttcatcctcgatgatgaagttgtcaagtattcgcctcacgcgcgtgccatccgtgatgtggaggatgaggagcttcgcagcttcttctgtggcatgtcaccatggcagttcatcctcatcgtggctgctagctcaattggcgaggagctgttctaccgcgccgccattcagggagcattggccgatattttcctgagaagcacggagctaatgaaggatgctcgagggattgcatcactgagtggtatcgttcctcctctggttccattcgctcagacgttcgcggcagtcatcactgcagccctcacaggaaccctctactacgtcgccacaactccgaaagaccctacgtatgtggtgacaccagcgatgcgttcgcgcacagggcgtgagaacctcaagaaactatttgcagcttggtacgagaggaggcaaatgaggaagatatactcgccgcttctggaaggaatcttggctttctaccttggcttcgaatggatccagaccgacaatatcctggcacctatgatcacccacggcatatactccaccgttgttcttggccatgggctctggaagatccacgaccaccggagaaggctacggcagcggattcagaaggtcaggagtgaagggagtagctctgcagacgacacattgtaactgcagcatatgtagatcggcgtggtctactgctggatagctagctgctgattgcacgcacgtactgggtgatcgatcgatctaccgatcagtcagaagaccagaggcgtacgtctcacaagttttgatctacttaattaatatcaacaaggtaggtataagattgggcaaaaatatatatataatgcatgtagtcatgtaatgtagatacaatgtgtacatatatggataaatatatgcaggctgtaatcaatataggaagtatatagtgtacgattgcgacatccaagtatgttataatcctagtatcacgtatgcatgcaaggaatataccagccacatcctttctttctcgtccctctcccacacttgcaatgttaca

SEQ ID NO: 100907 - DNA, 93 bp, Zea Mays
gtacgtggcttggtgtttattacgacactagctatcaccagcaacgatttgaaacaagaaagtgagatttgtgtacatcataatcatgcacac

SEQ ID NO: 100908 - DNA, 834 bp, Zea Mays
atggggagggctccgtgctgcgagaagatggggctcaagagggggccatggacgccggaggaggacaagatcctggtcgcgcacatccagagcttcggccacagcaactggcgcgcgctgcccaagcaagccgggctgctgcggtgcggcaagagctgccggctccggtggatcaactacctgcgcccggacatcaagcgcggcaacttcagcaaggaggaggaggacgccatcatcaccctccacgagcagctcggcaacaggtggtccgccatcgccgccaggctgcccgggcggacggacaacgagatcaagaacgtctggcacacgcacctcaagaagcggctggagcccaccaccaagcagctggagcaggagcagcacggggcgcatgcaggtggtggcgccgccaggaagcgcagcaggcccaagcgcgcgggtgccaggaagacgacgacggccgccgtcgccccggccaccaccgcgccggcgtcgcctgaacggtcggcggcctcgtcgtcggtgaccgagtcgacggagcaggagcagggaaacacggggacgagctcgcccgggttccccaaggaggagagcttcacctcgtcctcggaggccgccgaggagttccagttcgacgacacgttctggtcggagacgctgtccatgccgctggacagcttcgacgacgtccccatggagccctgctccggcgcgttcggcgacgtggccgcctcctcctcctcgtcgtccgttggcgccgacgccgacttggactactggctcggagtgttcatgaagtccggcgacgcgcaccaacaactgccgcaggtttag

SEQ ID NO: 100909 - DNA, 2916 bp, Zea Mays
cccatccaaacacctgttctgaggttctgttcccgccgcggcgtccatcaccgccaggcgccagcagctccgactgctaacggccgccggccgccggccgccgcagatgcagaatccaagcggcaccatccttcagttctaccactcgggacggctttccgccgcgctccgggcctttgagtcgctccccttctcccccgcatccgcccccgaccctctctccgccgctgcctatgccgcgctcgtcgcggcctgctcccgcctccgctccttcccgcaggggcgcctcgtccatcgtcacctccttgcctcctctgctggcgccgcatacctcgctcgcaacaccattctcagcaaccacctcatcaccatgtacggccgctgcgccgccccagattccgcacgcatggtgttcgacgggatgctcgacaggaaccccgtctcctgggccgccgttatcgcggcgcatgcgcagaacagccgttgtgccgatgccatgggtctcttctcctccatgttgcggttggggaccgcgccggacgagtttgcgctcggcagcgccgtgcgcgcctgcgcggagcttggggacttgggcctagggaggcaggtgcatgcgcaggccataaaatcggataacggaggtcatctgatcgtgcagaacgcactcgtcaccatgtactccaagagcggttcagttggggatggatttgcgctctttgagaggattagggacaaagatttattttcatgggggtcaattatcgccgggcttgcacagcaaggtcgtgaaatggacgcacttcacattttcagggagatgattgctgagggcatgcaccaccccaatgagttccattttgggagtgtctttagggcctgctcagttgttattaacagtttggagtacggggagcagattcacggtttatgtgtcaagtataagctggaccgcaattcatacgcaggttgctcgctgggtgacatgtatgcccgttgcaataagcttgactcagcaatgaaggtgttttacagaattgagtcacctgatttggtttcttggaattccttaataaatgctttctctgctgatgggctccttagtgaggctatggttctgttctctgagatgagatattctagtctgaagcctgatggtatcacggttatggctttgttatgtgcgtgtgttggctgtgatgctttgcgtcaaggtagatccatccactcgtacttggtcaaattaggtttaggcggggatgttatggtatgcaattctttaatcagcatgtatacaaggtgtttggatttcccctctgcaatggatgtctttcacgagacaaatgatcgtgatgttgtcacctggaacagcattctcactgcttgtgtgcagcaccggcatatggaagatgtatttaagttattcagactcttgcacagttcaatgccaagtctggataggatcagtctaaacaatgttttgagtgcttctgctgagctgggttactttgaaatggcgaaacaggttcatgcatatgccttcaaggttggactggtgagtgatgcaattctgagtaatgctctgattgacacttatgctaaatgtggaagtttagatgatgccaacaagctctttgaaataatgggcaccggccgcgatgtgttctcttggagcagcttgattgttggctatgcccaatttggttatgcaaaggaagcacttgatttatttgccaggatgagaaaccttggagtcaagccaaatcatgtaacctttgtcggtgtcctcatagcatgcagtcgtgtaggacttgttgatgaaggctgctattactacagtattatggaacctgaatatggcattgtcccaacgaaagagcattgctcatgtgtcattgatttgttggcacgtgctgggagactaagtgaggcagcaaaatttgttgaccaaatgccatttgaacctgatattataatgtggaatactctgctagccgctagcagaacacataatgatgttgagatggggaagagggcagcagaaggtgttttaaatattgatccttctcattcagcagcctatgtccttttgtgcaacatatatgcctcatctggcaattggaatgagtttgcaagattgaagaaggatatgagaagcagcggagtccagaaatcacctgggaagagttggattaaactcaagggcgagctgaaagtctttattgtagaggacagatcgcacccagagtctgatgaaatgtacacaatgctggatctgattggatttgaaatggtaaaagcgggttatattccagaactttcatgttactcacgtaaatatattagttctgaccacacatattatgatttgctgagtgaagaaatgttggctgaatatggagtcagttctcaatagtcattgctgacttcctatcttttaccatgtcacaagattttttgccaattgtcaaaggaaatcaaggttcactatctcgataaggtacttgaagctaacatttatgctgtattttgatgattcagtaacggcaggttgtggatttccctttcctaaatgaatggaagaaaaggtatggtctgtgactagaagttaacctgtttctttggttccagactctggtttctagttgaactattttacaacaacaaaaccttttaatctcaagcaagttggggtagactagagttgaaacccaacagaaaccataagtcatggttcagtcacgactcacgagttgaactattctacatgagataaatgtctttatgttgcggttggactgaatacatagtaggaagctactgaagttgactctgctgtttcatagctgatggcaggttcttctgctgcccctcaaactctgtaatgatttctgttgtaatctagttttgaaaacaaca

SEQ ID NO: 100910 - DNA, 2237 bp, Zea Mays
atgtctcccgaagcctgcgagctcacgctcgcgccgcggatgcccgcatcgcaggccggtgccggtgccggcgccgagcccgagaccaagggatccgtgcacccgcaactgtggtacgcgtgcgcgggccccacgtgcaccgtgccgcccgtcggcaccgcggtgtactacttccctcagggccacgccgagcatgccggcgccgccgccgacgccaacctgcacgccccgcctttcgtgccgtgccgcgtcgcgggcgtcaggttcatggctgagctcgacaccgacgaaatcttcgtcaaaatacgcctcgacccgctccgctccggggagccgctgacggacgtgggcgaggcccaggtggtgaacgacgaggccggccagcggcagcccaccaggccggtgatttcttccgccaagacgctgaccaagtccgactcctacagcggcggcagcctctccgtgcggcgcacctgcgcggaaaccatcttccccaagctggacaagagcatcaaacggccccagcagttggtctccgccagggacgtgcacggcgtcgagtggacgttccgccacgtctaccggggcaccccggagcggaacctgctcaccacagggtggagcgacttcgtcaacagcaagaagatcgtcatcggcgattccgtcgtgttcctgcgcgaagaggacggcaccatccacatcggcctgcggcgcgccgagcgcgcgtcccggcggaacgcctacgggcgccagctggtgcggggcaacgcgagcggcacgggcgccgccgcggacggcgtcctccgagcggaggacgtggtcgcggcggcggtgacgctggccgccgccgggaacccgttcgaggtggtgcactacccgcgggccacagcgccggcgttctgcgtgcgcgtggccacggtcattgaggccttgcaggtctcctggtgccccggcttgcggttcaagatggcgttcgaggcaaaggacctgtcccggatcagctggttcatgggcaccgtcgccggtgtcgggccggccgatcccgcccggtggccgctgtcgccctggcgattccttcaggtgacctgggacgagcctgagctcgtgcggaacatgaaccgcctgagcccgtggcaggtcgagctggtggcgaccatgcccaacctgccgcacttcgcggcgccgcctacgccgacgccgccgcgcaagaagccgcgcatgccgacgtacaaggagtaccaatcgcagggccggcaacttttcgatcccgttttcccgctcaacaacccactcccactgccacacccacaccaccaccctgcaccaacccacgactggaactgccacggtttcgtccattgttcctccttccccttcccggacagcatcgctcctgctgctgccgcaggcatacagggagccaggcatgcgaacttcgctcagttcttattttcggatcacctcctcagcaacctgcggcgaagcctggtgttgggtggcatccgccagtacccaggcgatcaccatgccgctcccgcgccacggatccccatccccaccgacgacgtgaagactggcagcgaaacgccccgctctccatcacatgcgaccaagaagcgcgacggagtcaagccgccggggataaggctcttcgggcaggagatactgaccgaggagcagatgaaaggcagccacgatgggaaagcgaccaacaacacctctggtcgctctggagcgcccgagttcgggctggagcccgggcagtgaagagtgttggtggagtcggtcgccttcgtcggatcagctagctagcgctgcagccgcagtgtagcttagaggagcacgtcggcgacgagactttgagtgcgtatgtgaaataaccggggaggatcgatcgaggtaccgaacgaatgacgctggcaggcagcgaccacacgccgagaaccgatgatcgaccagcagatatcggctgcgactgcgatattgtagagcgctatattcataggatgcgatagcgatacagccgaatgcaccaccgagcttgcggccacgtacgtttgaggtctcttcctggatcagtcttagagagtttacagcttaagctgatgcggttattcaattcagttattacgctgtgtttttaaggccactttggattgctgggttttttttatttctttcttatgttctctacggttttatgttcctgcagacgattcctataaattttgtcctat

SEQ ID NO: 100911 - DNA, 2732 bp, Zea Mays
atgcgggtggagacgatcgaggcacggtctaccttgcgctgttttcatcaaagacgacgactcggggcaatagatttatatgtcattagggtgagtggggatgcacatgccacgtgctatccagccgctgtcatttggcgcggtctccggatccgtgtctggttatactctaaagcagcagcagcttggatgttcgtcgacgtccttgcgcagctatggagcgattgggggctccggttctctgtaatttccagcttggtgacaatcgtcgtcctcagcctcttgtcctggacacgccggcgctcgacgtccggccgctggcggtcgatcctgctgtggttcgtgacgcgcgttgtctggttggcataccagggcgccgagatagccgcgacgggcgccctcggaagcctgtccctctccggctccgatgggtcagcggaggagcagcaggtgatagcgttctgggcgccgttcctgctgctgcacctgggcggcccggacaccatggccgcctacgcgctggaggacagcgccttgtccgtgcgcaagttcctcgagatggtcttccaggtcgggggcgccttctacgctcagtacaagtacatatatcgcgcgcgcacctggacgccgctggcgacggcgtcggccatcatgttgcccataggcattgtcaggtatgtggagaagtggtacgcgctatggaaatccaaaagcatgatggaggaggaggagggggaggaggaagaggaggagaagaagaaggtcgcgggcgcgggaccgggaccgggacgattcacatccgcaacaagcagcaacgacgcgctgtgccttgctcaggatctgttccatgtctgccgtcgtgccttgtccgattcttcggtgctcccgggcacggagaagcagcgtgccagcgaggagatcttcctgctgggatgggagcgcatgtgcaaggtggtggagatggagctctcgctcatgtacgaggccctgtacaccaaggccatcgtgctgcacacctgcccggttgcaggctacctcaaccgtctagtgtcgcccctcgccaccgctgccgcagtgttgctcttcaaccagtatatcggcagccgcagccgccgggccatcatcatcaggagatctttcgtcgacatcacctacctcttgctggttgttgccttcgccatggacctgatgtggctgctcagagcccttggttctacctggacgtacgccgccctcagagaggcgcggccatgggcatggtggcttcgccaccacttgctgtgcagcgggagatggcgccggatccaccgcgccgtcgacgccctgcatccgttgtcgtggttattcggcagcgatccagttagctactacaggacgtggtcgggcaccatcgggaggtacaacctgctgcaggcgtgcagcgttgctgctgctcaccgtggtgcccgccgtccatggtggacgcggttcgggagctggctggaaaaaaaattggagctggaggagacagagtatctgcgtgagcttcctcaggacgtcaaggaatcgctgatccagcgagtgcagcgaatactggtgtcgaccaaaaataataatgctgataagaagacggatgagaatggaattggatgccgctacaccctggtagacatcaggacactctggggtcagcaggccctggaggacgccaagacgaacctgttcggtcgcggccgtaaaaatggtaggaaaacaagtaacaagaaaccgaaattgcccagcttcggccgtgaattcgaggaggacgtcctcatgtggcatatggccacctgcattctcttctcgtcatcaagcggcaaggagagcatagtcagcataccagggggatcctcggccgacgccgccgatgcccatgtgacggcgatcaaggtgatgtcagaatacctcatgttcttcgtcgctgtacgtcgacacatgctgcctggccttgtgctccacagcctgctcgagaaaatccgccaaactttgcacgagatatgggacgacggcaagaagaaaactactggtggttcgtcgtcgtcgtcgtctacagcagccaaagatactccgcctcctcaagacaagcttgccgaaatgctgctagagagactgaaagcaggtcggagatggtttgaccgaaacgaaggcaggctcgttgttggtaatgcagctgcgcttgctaatacactaatagaggctggcatcagtgtgcagaagcgacagcaagtgccgcagctgctggagttcatcttcaacgtgtgggtggacaagctgctctatgcggccgccagatgcagcgtggagagccatgccaagcagctcagccgcggcggcgacctcaccaccatactgtggcttattgtccaacatgctgccctatttcgcatcggagaattaaaaccgaaggaagagcctcaggaggaggaggagaagaagaaggaggaggaggaggagaagaagaagaaggaggaggaggaattgaagcctttctggccacagtatccaatgccagcgccaccgtcgaagccagcatatgcatatccagttcattacattgcagatgaagaagaatctgacgatgccgaagaatctgacgatgccgaagaagatgatgacatgacgaggcatgctatactgtactagtttatattcgtgcgttgtaacgagaccaaatatagtctcattaaattaagtttacatgtctctactgtatc

SEQ ID NO: 100912 - DNA, 656 bp, Zea Mays
gttcttcctgatgacatccgtcgagcattgcttgttattgtggagtgttgcatgaagcgagattatctagcggcaatggaccaatacatcaagctggcaatcgggaatgcaccatggcccattggagtgactatggttggcatccatgagcgttctgcccgagagaagatctacacaaacagcgttgtccacatcatgaatgacgagaccactcgcaagtaccttcagtcaatcaagaggctgatgacgctttcccagcagcgttaccctgcactgccctcaaaatcagtggagttcaacagcctagcaaatgggagtgacctgcaggcgcttctatcggaagagaatgattcggttaaagcttctgaggaaaggctccggttgatgccagcatatgccttcgcagactagattggattacaagtagagcttgagatgcttgtgtaacatcaacaatcaatcctgcctgttttttatctttttttctttttctgtttgtacatgctaattaaatcgctttatcgcgacatctggtcggtcaaagtttttattaatatgtcagccaaattgagaaccattttttactatttatcatcgagcaacagccatgtttaccgtattaatcaattttggtgcttgtgtgattgtgtgagtac

SEQ ID NO: 100913 - DNA, 110 bp, Zea Mays
gttttcttttcactatttgaatttagttgtaggttatataaatgcacctcaaaatacaatcatcacccataactatatacttcatgagtttgaatagatacacaaccacc

SEQ ID NO: 100914 - DNA, 216 bp, Zea Mays
atgggggacggtggtggtgacattagtcactccatcaaccacgatttgaggctaccgggagattctggagtccctgagagccgtgctactgccactactgaccatggtagtggcggtggtagcagtgctgcagctcctatcgacctcgccgttggggaatctagcactggccaaggcgcagaagctcctgcggagtggtactggccatttgcttag

SEQ ID NO: 100915 - DNA, 811 bp, Zea Mays
aatccatgtctggacgtctgcaattccccatccattttcgtacgccgtacttccccatacacactcagccagtggttttgctagggttctcatccttccaccaccgcccctgcctgccacagcgatggccgccgccgccggcggagaggacgacgcggcgtgggagcgcgccatctccgccgccaccaagtccacctcggcgcccaagaacctcaccctcgacggcgccgtcaagtcctccacgggcggcctcccctccgccgtgctcctcgagcgcttcgctgcctccctggaggagctctccgtcgcgggggcgcgcctctcctcgctaacgagcctgccacacctcccggcgctccggcgcctctccctccccgacaaccacctctacctagggaacaaccggttcgcggaggtctaggagctcgcgccgctcgccggggtccgggtcgagtcgctcgacctgttccagtgccccgtcaccaaggtcaaggggtacagggaggaggtcttcgcgctgattcctagcctcaagtaccttgatggcgctgacgctgagggcaacgagcgtttggagacggatgacgacgaggacgaggaggaggacgacgacgagggagaagaaggggcggagggagaggaggagggcgatgaggatgatggagaggaagaacatgacgaggaggaggtggaggcgaatttctctttggatgttttgtcatgaaaattccatcaggccagagaatctgtacgcagagaaaatacagactaaattatggggggtgatcctgcacaaaaaatccattgataa

SEQ ID NO: 100916 - DNA, 2381 bp, Zea Mays
atggcgttcgcccacgagcaggcgagaggtgacgccgccggcggtgccaccagcagcgtcgtcgcggacgcgagcgagctcaggcagaggggcagcaagggtcacaagaagcccggcacggtcgcggaggacgacgacaaggagtcggggaggggcgcgggcgcgggcgcgggcgcggcggggggctgcgaggtcacggtcacggactcgatcgagcgggtattcgaggcggagccggtgccgccgtggccgcagcaggtgacgccccgggcgctggtgacgagcctgttcctggccgtcctgttcagcgtcatcgtcatgaagctcagcctcaccacgggcatcatcccctcgctcaacgtctccgcgggcctgctcggcttcttcctcctccgcgtctggacggcggccgtcaaggacccccggaggcccttcacccgccaggagaacaccgtcgtccagacctgcgtcgtttccgcctacggcatcgccttcagcggtggctttgggagctacctgtttggcatgagcgagacgatcgccagccaggcggccgaagaaaacaatgccgggaacgtgaaggagcccaggctggcgtggatgatcggcttcctgttcctcgttagcttcgtgggcctcttcgctctcgtccccctcagaaaggtcatgatcatagattacaggctcacgtatccgagcggcaccgctactgctcacctcatcaacggctttcacaccccggatggctctgaacgggccaagagccaagtgctgacgctgatcaagagctccgtggccagcttcttctggggcttcttccagtggttctacacggccggggacggctgcgggttcggccagttccctgcgctgggcctggctgcctatcagaacaggttctacttcgatttctcgacgacttacgtcggcgcaggaatgatctgcccgcacaccgtcaacgtctctgtcctgcttggagggatcctctcgtggggacttctatggcctctgatagcccagaagagagggagctggttcgatgcgaaactcccggacagctcacttgaaggaatgcaaggctatcgggtgttcatcgccattgccatcattctcggagacggcctgtacaagttcgccacggtgctccttcgcaccgtcgcctcgatagcggcgtcaaccgagaagaggaaattcttcggcgcgctccccgtgaacggtgacggcagcaacggcgccgccgctccagcgccaccaccctcgttcgacgacgctcgcaggaccgagttcttcaccaaggaccagatcccggtgccggtcgccatcggcgggtacgtggtgatcgccgccgtctccgtggccgccgtgccccgcctcatcttcccgcagctggagtggtaccacgtcctggcggtgtacctgatggcgcccgtgctggccttctgcaacgcctacgggatggggctcacggactggtcgctcgcgtccacgtacggcaagctcgccatcttcgccttcggcgcgtgggccggcaagccccacagcggcgtcctggtgggactcgccacctgcggcatcatgatgaacatcgtgtccaccgccgcggacctcatgcaggacttgaagacggggtacatgacgctggcctcgccgcgctccatgttcgtcagccaggtggtcggcaccgccatgggctgcgtcgtcgggcccagcgtcttctggctcttctaccgcgcgttccccggcgtgggcacgcacaggagcgcgtacccggcgccctacgcgctcatctaccgcaacatggccatcctcggcgtcgacggcttctccaagctccccgacaactgcctcacgctctgctgcgtcttcttcgtcggcgcgatcgccgtcgacatggcgagggacatggctccggagaaggtggccaagtttgtgccgctgcccatggcgatggccatcccgttttacattggcccgtacttcgccatcgacatgttcctggggagcgtggtactcttcgcgtgggaatgggtggacaaggatcaggcaaacttcttcgcgtatgccgtcgcgtccggcttgatctgcggcgacggagtatggtctctgccgcaggcgctgctctctcttttcaacgtcaagccgccgatatgcatgaagttcctatcgaggcatatgaatgacaaagtggatgatttcattgctactttgtcctagagaactgagaaaaaaaacaaacatatacacttagcttgaataattaggacggtgaaccttctagctgtgtggaaagaaaattgaattgcatgataagtgcctttgtgccaacaagaaatgttttatacttgctctaaaaagaatagatgttttatacaaacagttaa

SEQ ID NO: 100917 - DNA, 762 bp, Zea Mays
caaggtccatgttcatcagccaggtgataggcactgccattggatgtgttactgcaccatgtgtcttctggttgttttacaagtccttcgacattggtgcgagtggtggcgcttatccagcaccttacgccatcatgtaccgtaatatgtcaatcctgggcgtggatggcctgtccttgcttccaaagaactgcctcacgctatgctacatcttctttgctgtttccttcaccatcaatttgatcaaggatcttgtgccaaagaaggttgccaagttcatccccatccccatggcagcagcaattcctttctaccttggaccatactttgctattgatatgttcttgggcagtgtgatactcttcttttgggaatggaagaacaaagctgaagcagactcgttcggaccagctgttgcgtcaggcttgatgtgtggcgatgggctctgggcactgccccaggctgttctttctctagccaatgtgaaacctcctatttgcatgaagtttttgtcgaggtctttgaatgccaaagtggacaccttccttgggaactagacgagtgatagtttgatcggagtataattctcctttgtatgctaagatgaaagtggttaaataattctagtcttgtaaatttatattggtctattgtgtagtggtctatttagtttaggctggtgccaatggggcgacagcgttgaatgtactttctttcgatggttgctcctccattaaatcataatatactttggagactaaa

SEQ ID NO: 100918 - DNA, 2443 bp, Zea Mays
cggagcccgatcgtatcgttctgggattccaatcaccttccaataaatacaacgatcatcaattaccgagccacgaacaaattgacaatcaccatggcgactggcaccgccgccgccagcgcttccggcgtgggagccgactccttggagtcaggtgctatgctgctgcggcgacgccacgccggcggcctcgcgggcgcgggcgacgacgacggggtcggcaatgccgaagaggtggcggcctcagtggagcaggcgttcgcggacgagcccgtgccgtcgtggagggagcagctcacggtgcgcgccttcgtggtggggttcatcctcgccgtcttgttcagcgtcatcgtcatgaagctgaatctcaccaccggcgtcatcccctcgctcaacgtctccgccagccttctcggctacttcctcgtccgcctctggacgaaggcgatcgagagcgtgggcttgctgaagcaccccttcacgcgacaggagaacaccgtcatccagacctgcgtcgtctccgcctatggcctcgcctttagtggtgggtttggcagttacctgtttggtatgagtcgaaccattgctatacaagcaacagaggccaatgatgcccagaatatcaaggatccgcaactcggatggatgatagggtttatgttcctcgtcagttttgttggacttttcgttctggttcctctgagaaaggttatgattgtcgactacaaactgacctaccctagtggaactgcaaccgcttatctcatcaatggattccacacaccccagggtgccgaacgtgcaaagaagcaagttcgaactttgggcaagtacttctcactcagtttcctttgggccttcttccagtggttctacacagctggtgacgactgtggatttgcctccttcccaacactcggccttgaagcttacaaaaacaagttctattttgatttctcagctacttatgttggtgttggaatgatatgcccatatatcgtaaatgtctctcttcttcttggaggcatcatttcgtggggattaatgtggccacttatcagcacaaagaaaggaagttggtaccccgaatctcttcctgatagcagtctacatggactaaatggttacaaggtgtttataaccatagccgtaattcttggggacggcctgtacaacttcttgaaagtattcggtcacacaataggcgcattaatatcaatgtattggaagaaacatgcaaacagacttcctgtgtctgacaatatgacccctcctgccacagttgaaaccgagtcatttgacgacaagcgtcgcattgagctgttcgttaaggatcagattcccaagacagttgcattgggtggctatgtcgttctggcagctacatcgatcggctgcctccctctcatcatccctcagatcaagtggtaccagatttttgtggcatacatcttcgcacctatactagccttctgcaatgcctatgggtctggcctaacagattggtccctcgccagcacctatggcaagcttgcaatctttgtcatcggtgcatgggcaggggcttcacatggcggagtgcttgttgggttagctgcatgcggtgtcatgatgagcattgtgggaacagcttctgatctgatgcaagacttcaagaccgggtacctgactctagcctcgccaaggtccatgttcatcagccaggtgataggcactgccattggatgtgttactgcaccatgtgtcttctggttgttttacaagtccttcgacattggtgcgagtggtggcgcttatccagcaccttacgccatcatgtaccgtaatatgtcaatcctgggcgtggatggcctgtccttgcttccaaagaactgcctcacgctatgctacatcttctttgctgtttccttcaccatcaatttgatcaaggatcttgtgccaaagaaggttgccaagttcatccccatccccatggcagcagcaattcctttctaccttggaccatactttgctattgatatgttcttgggcagtgtgatactcttcttttgggaatggaagaacaaagctgaagcagactcgttcggaccagctgttgcgtcaggcttgatgtgtggcgatgggctctgggcactgccccaggctgttctttctctagccaatgtgaaacctcctatttgcatgaagtttttgtcgaggtctttgaatgccaaagtggacaccttccttgggaactagacgagtgatagtttgatcggagtataattctcctttgtatgctaagatgaaagtggttaaataattctagtcttgtaaatttatattggtctattgtgtagtggtctatttagtttaggctggtgccaatggggcgacagcgttgaatgtactttctttcgatggttgctcctccattaaatcataatatactttggagactaaa

SEQ ID NO: 100919 - DNA, 1112 bp, Zea Mays
cgaacaaattgacaatcaccatggcgactggcaccgccgccgccagcgcttccggcgtgggagccgactccttggagtcaggtgctatgctgctgcggcgacgccacgccggcggcctcgcgggcgcgggcgacgacgacggggtcggcaatgccgaagaggtggcggcctcagtggagcaggcgttcgcggacgagcccgtgccgtcgtggagggagcagctcacggtgcgcgccttcgtggtggggttcatcctcgccgtcttgttcagcgtcatcgtcatgaagctgaatctcaccaccggcgtcatcccctcgctcaacgtctccgccagccttctcggctacttcctcgtccgcctctggacgaaggcgatcgagagcgtgggcttgctgaagcaccccttcacgcgacaggagaacaccgtcatccagacctgcgtcgtctccgcctatggcctcgcctttagtggtgggtttggcagttacctgtttggtatgagtcgaaccattgctatacaagcaacagaggccaatgatgcccagaatatcaaggatccgcaactcggatggatgatagggtttatgttcctcgtcagttttgttggacttttcgttctggttcctctgagaaaggttatgattgtcgactacaaactgacctaccctagtggaactgcaaccgcttatctcatcaatggattccacacaccccagggtgccgaacgtgcaaagaagcaagttcgaactttgggcaagtacttctcactcagtttcctttgggccttcttccagtggttctacacagctggtgacgactgtggatttgcctccttcccaacactcggccttgaagcttacaaaaacaagttctattttgatttctcagctacttatgttggtgttggaatgatatgcccatatatcgtaaatgtctctcttcttcttggaggcatcatttcgtggggattaatgtggccacttatcagcacaaagaaaggaagttggtaccccgaatctcttcctgatagcagtctacatggactaaatggttacaaggtgtttataaccatagccgtaattcttggggacggcctgtacaacttcttgaaa

SEQ ID NO: 100920 - DNA, 2522 bp, Zea Mays
gcaccagtcagtccacacagcctacggcctgctctggctctgcctgtagagggctagagctacaagctacaactctgaaagtctgaacagtgcgccgcccaaccagagatggcgccgcataccaccgcagccgccggcggcggcggcggcgaggaggcgctggaggaggccagcactctccggcaccgccacagcgctgccaaggacggcggcgaggagggccaggccaacaacggggtcgccgccgccgccgacgacgacggggaggggaacgcgctgtcggtggagcgcgcgttcgcggaccaggcggttccgtcgtggcgggagcagctgacggtgcgcgccttcgtggtcagcttcttcctggccatcatgttcagcgtcatcgtgatgaagctcaacctcaccacggggatcatcccctcgctcaacgtctccgcggggctcctcggcttcttcttcgtacgcctctggaccgccgccatcgagagggttggcctcctcaggcagcccttcacgcgccaggagaacaccgtcatccagacctgcgtcgtcgcagcctacgacatcgccttcagcggtgggtttggtacatacttgtttggcatgagcgaaaccatcgccaagcaagcaacagaggctgacaatcctcagaatgtcaaaaaccctcacatcggatggatgatagggtttctcttccttgtcagtttcattggcctatttgctcttgtgcctctgagaaaggttatgatcgtcgactacaaacttacgtatcctagtggcacggcgactgcttatctcatcaacggtttccacacgccagagggtgccaagcttgcaaagaaacaagtgaagactctggggaaattcttcttgatgagcttcctctggggcttcttccagtggttctacactggtggagataattgtggattccagaacttccctacattaggccttcaagcttataagaacaagttttacttcgatttctctcctacctatgttggagttgggatgatctgcccccacattgtgaacgtttctgttctactgggaggcatactttcctggggaataatgtggcctctaattggcaaccagaaggggaattggtacgacgccagtctcccagaaagcagtctccatggactgcagggttacagggtttttatatccatcgcaataattcttggagacggcctgtacaacttcgtgaaggtgctcattcgcaccaccgcggggttcatatcgatgatgaagaaaaacagcacgcttccggtttcaaacaatggcagccccatcactgaaggtgtttccttcgatgacgaacgccgcagggacctgttcctgaaagaccagatccccagatcagttgcctacggagggtacgtggctgtcgctgccatctcaatcggcacccttcctcaggtcttcccgcagctcaagtggtactacatcctggtggcgtacatcttcgcgcctgtgctggccttctgcaacgcgtacgggactggccttaccgactggtccctcgcgtccacctacggcaagctcgccatcttcatcttcggcgcgtgggccggcgcgtcgaacggcggcgtcctcgtcgggctagctgcctgcggcgtgatgatgagcatcgtgtcgacggccgccgacctgatgcaggacttgaagaccgggtacctgacgctggcatcgcccaggtccatgttcatcagccaggtgatcggcacggcgatgggctgcgtcatcgcgccctgtgtcttctggctcttctacaaggccttcgccgacatcggcctcagcggcagcgagtacccggcgccctacgccatcgtgtaccggaacatggccatcctcggcgtggacggcttctcgtcgctccccaagaactgcctcaccctctgctacatcttcttcgcggcggccatcgtcgtcaacctggtcagggacctggtgccgaagaaggtcgccaggttcatcccgctcccgatggccatggcgatcccgttctacctcgggtcattcttcgccatcgacatgttcatcggcaccgtgatcctcttcgcgtgggagacgatcaacaaggccaaagccaacgccttcgcgccagcggttgcgtcggggctgatctgcggcgacggcatctggaccctgccgcagtccattcttgcgcttgccaaggtgaagccgcccatctgcatgaagttcttgtccaggtcggtgaatgcccaggtggacggcttcctcggaagttgaaaactgttgaaatcgtgacgtgcatgtatattgtgttgatgcaccatgcgtgctgtaaaacgtaccgggtaatgttgtgtcgacacgttctggttttgatgtacatgagtaagtacactagtcgtagggattgctaaattaatgtttggcgtatacgcgtcagcattagtaatgtacatgagtaagtaccaacatctgtatgttacctgggttcaaatttcataactactttcccgtaaaatcttcgatatatctgc

SEQ ID NO: 100921 - DNA, 132 bp, Zea Mays
atggcgtcagaggacgaagcgaatgctgctgcggcggcggaggtggaagaggaaaagaactggcggcagaagggaagcaagacaacccaagccgtgggacaagaatcccaacatcgatcgctagaagattga

SEQ ID NO: 100922 - DNA, 1964 bp, Zea Mays
acgcctcacgccatgcgactcgtcacggcctcggcgtgccgcctgcgtgcccggtgcccgtgcggccgtgacgaacgacactgacgagcaaagcaaagccaacggagccgagcgagacgacgagaccgcgattgctagctagctagttcgggcagcgagcggggtgagacggctatggcgtgctgctccgccgtcctgcaccatccgctgggcttctcactcaccccgtgctccgcctcccgagccccaccgcgcatccagcgcgtgggcgtggcaactccctcggccgcctccgcccgccctctttctcgcgccaggatctcaccgcgctgcacctactccggtggcgccagcgctgcccctggtcctggggagctacccgcggcggcgctccgacgggtccttgagatgccgggtgcgcaccaggcgcccgcctgctacgacgcgctgagcgcacgcctcgtcgagcgcgccgagttcagggcctgcttcacgagcggtttctcaatctctgccgcacggcttggattaccagatgttggtctcatctcgtacggggaaatgatcgatcaggggcgtctgatgactgaagcagtttcaatccctgtgatcggtgatgcggataatggttacggaaactgtatgaatgttaagaggacagtgaaaggatttattaatgctggttttgctggaattattcttgaagatcaggcatgtggacacacacaaggaaggaaggttgtctcaagggaggaagcaattatgcacataaaagctgctgttgatgccaggaatgagagtggctctgatattgttattgtggcaaggacagattctcgtcaagctgtgtctcttaatgaagcattatggagagtacgggcctttgctgatgctggagcagatgttctattcattgatgccctcgcctcaagggaagaaatgaaggcattttgcgctatcgcgcctggagttccaaaaatggccaacatgttagaaggtggtggtaaaactcctatactgagccctgttgaactggaagaaataggttataaaatcatagcctatccattatctctaattggtgtatcgatgcgtgcaatggaggatgctcttattgctataaggggtggtcgcatacctcctccaagcagcttgccaacatttgaggagatcaagaatactcttggcttcaaccactattacgaagaagacaaacgatatgcggtgacaccagcccaaccattgtacgggactggctatgataattatacaagtgaaccgaacagtccgggagattccaggtccagggctaaaaaaacacaagaacctgttattgacatattgcctcagctctatgatattggttccagtgacagcagaggaccttcaactggaatgtggtctcgaactcttcgactaaagattacaggaagagatgggatccagaaaatcgatgccaggatacctgctgggttcttagaagggatgacaagaattattccaggcttggctggagctaatattatggaaaggcttcggaatgctcctgttgatacagacaacccccagaatggtcaaatactgcttgattttgaggacgccatgggagataggatccaggtgtttattgcatgagctgacggtgtctttgctagaatgctcgtgcacagcaaactctggaagcatggtcgtttcaagtagcatcagggtacatgcatcttgctattggcgcaaccctatctagtagttgaattagataatttggacatcgattatatcttggcgaactagtatttacaaataacagacttgttcctattcatcgaggctgggtgtacatcgttgggattccattaaaacacagctggggactgcgggataagtttttctccgtagcgttgtttctgtgttgaaaaaaaaccctgaagttgaatagaaataaagaagtaaactcttgttgagtt

SEQ ID NO: 100923 - DNA, 1976 bp, Zea Mays
acgcctcacgccatgcgactcgtcacggcctcggcgtgccgcctgcgtgcccggtgcccgtgcggccgtgacgaacgacactgacgagcaaagcaaagccaacggagccgagcgagacgacgagaccgcgattgctagctagctagttcgggcagcgagcggggtgagacggctatggcgtgctgctccgccgtcctgcaccatccgctgggcttctcactcaccccgtgctccgcctcccgagccccaccgcgcatccagcgcgtgggcgtggcaactccctcggccgcctccgcccgccctctttctcgcgccaggatctcaccgcgctgcacctactccggtggcgccagcgctgcccctggtcctggggagctacccgcggcggcgctccgacgggtccttgagatgccgggtgcgcaccaggcgcccgcctgctacgacgcgctgagcgcacgcctcgtcgagcgcgccgagttcagggcctgcttcacgagcggtttctcaatctctgccgcacggcttggattaccagatgttggtctcatctcgtacggggaaatgatcgatcaggggcgtctgatgactgaagcagtttcaatccctgtgatcggtgatgcggataatggttacggaaactgtatgaatgttaagaggacagtgaaaggatttattaatgctggttttgctggaattattcttgaagatcaggtgtcaccaaaggcatgtggacacacacaaggaaggaaggttgtctcaagggaggaagcaattatgcacataaaagctgctgttgatgccaggaatgagagtggctctgatattgttattgtggcaaggacagattctcgtcaagctgtgtctcttaatgaagcattatggagagtacgggcctttgctgatgctggagcagatgttctattcattgatgccctcgcctcaagggaagaaatgaaggcattttgcgctatcgcgcctggagttccaaaaatggccaacatgttagaaggtggtggtaaaactcctatactgagccctgttgaactggaagaaataggttataaaatcatagcctatccattatctctaattggtgtatcgatgcgtgcaatggaggatgctcttattgctataaggggtggtcgcatacctcctccaagcagcttgccaacatttgaggagatcaagaatactcttggcttcaaccactattacgaagaagacaaacgatatgcggtgacaccagcccaaccattgtacgggactggctatgataattatacaagtgaaccgaacagtccgggagattccaggtccagggctaaaaaaacacaagaacctgttattgacatattgcctcagctctatgatattggttccagtgacagcagaggaccttcaactggaatgtggtctcgaactcttcgactaaagattacaggaagagatgggatccagaaaatcgatgccaggatacctgctgggttcttagaagggatgacaagaattattccaggcttggctggagctaatattatggaaaggcttcggaatgctcctgttgatacagacaacccccagaatggtcaaatactgcttgattttgaggacgccatgggagataggatccaggtgtttattgcatgagctgacggtgtctttgctagaatgctcgtgcacagcaaactctggaagcatggtcgtttcaagtagcatcagggtacatgcatcttgctattggcgcaaccctatctagtagttgaattagataatttggacatcgattatatcttggcgaactagtatttacaaataacagacttgttcctattcatcgaggctgggtgtacatcgttgggattccattaaaacacagctggggactgcgggataagtttttctccgtagcgttgtttctgtgttgaaaaaaaaccctgaagttgaatagaaataaagaagtaaactcttgttgagtt

SEQ ID NO: 100924 - DNA, 1276 bp, Zea Mays
cctttctgagccgctggtgactcggccggccccgcctgctgactccgcaaatccactgcctttgccaaagccgctccgccccaaagggtgttccagttccacttccaccaccgcggccgccgcgccctataaatggccgccatcggcagctgcactccggtaccaatccccgattccttacacgctaagccacgcaacgcaacgcaactagccatgacgatgaagtccagcagcggcggcggccatgtcatcggggtcccggtcacctccaaggcgcacgggatagaggaggtgtccagggatccgtccttcggcaagggcgccggcgatcacctcgccgtctcgttgacgcaccccagcccttacgcgtctttcggctacaagcacagcagcaaaggccaggtgacccactgggtgagcaagctgagcagaagggcgcagggcttcagagagcatgtgaccttggggccgaagctgtcggagacggtgaaggggaagctgagcctgggcgcgcggatcctgcaggccggcggggtggagcgcgtgttccgccaggccttctccgccgccgacaagggcgagcggctgctcaaggcgctgcagtgctacatctacaccacgggcgggcccatcgccggcatgctcttcgtctccaccaggaaggtcgccttccgcagcgaccgccccatcaccgtcacctcccccggcggcggcggcgacacggcgcgggtcacctacaaggtggccatcccgctgcggaggatccgcagggtgcggcccagcgagaacgtccacaggcccgaggagaagtacatccacgtctccaccgtcgacggcttcgagttctggttcatgggcttcgtcagctaccagaggtcgtgcaagtacatgcagcaggccgtctcggagatgcgatgaccggtgtctgtatcgctgccccctgtcggaacgatgtgaagtgactaggatgttatgggtctcgcttcgccatcttttgtcgccaagcagccgtagctaaaaagattgccctgtctttaattttggatcggtgcaattgtgttccttccgcgtacgaatttggaccagcatctctgttgttcccaaagtggttgctctcgatctactagtacacatggaccgaaaaaattaaccatttgtgcatctttgttgaatgcaacagttctatgtgtttctgattagtttatttctctctaccagtagtaggtaagcgtcaaaacataaataatgcaaaatacaatttgacttgtgctgtgtt

SEQ ID NO: 100925 - DNA, 1202 bp, Zea Mays
cctttctgagccgctggtgactcggccggccccgcctgctgactccgcaaatccactgcctttgccaaagccgctccgccccaaagggtgttccagttccacttccaccaccgcggccgccgcgccctataaatggccgccatcggcagctgcactccggtaccaatccccgattccttacacgctaagccacgcaacgcaacgcaactagccatgacgatgaagtccagcagcggcggcggccatgtcatcggggtcccggtcacctccaaggcgcacgggatagaggaggtgtccagggatccgtccttcggcaagggcgccggcgatcacctcgccgtctcgttgacgcaccccagcccttacgcgtctttcggctacaagcacacaggcagcaaaggccaggtgacccactgggtgagcaagctgagcagaagggcgcagggcttcagagagcatgtgaccttggggccgaagctgtcggagacggtgaaggggaagctgagcctgggcgcgcggatcctgcaggccggcggggtggagcgcgtgttccgccaggccttctccgccgccgacaagggcgagcggctgctcaaggcgctgcagtgctacatctacaccacgggcgggcccatcgccggcatgctcttcgtctccaccaggaaggtcgccttccgcagcgaccgccccatcaccgtcacctcccccggcggcggcggcgacacggcgcgggtcacctacaaggtggccatcccgctgcggaggatccgcagggtgcggcccagcgagaacgtccacaggcccgaggagaagtacatccacgtctccaccgtcgacggcttcgagttctggttcatgggcttcgtcagctaccagaggtcgtgcaagtacatgcagcaggccgtctcggagatgcgatgaccggtgtctgtatcgctgccccctgtcggaacgatgtgaagtgactaggatgttatgggtctcgcttcgccatcttttgtcgccaagcagccgtagctaaaaagattgccctgtctttaattttggatcggtgcaattgtgttccttccgcgtacgaatttggaccagcatctctgttgttcccaaagtggttgctctcgatctactagtacacatggaccgaaaaaattaaccatttgtgcatctttgttgaatgcaacagttctatgtgtttctgatta

SEQ ID NO: 100926 - DNA, 1261 bp, Zea Mays
tcttcccatttggagcacggagctcgagcagccagcgacgacaacccacgcgcacaccaaccaacaagccacaccggcccacaggccacagctcaccagctaggctagcaaccacctcgatcgcagaggcagaggccgccggaagctcagccgtgaattcggcaggaaggaaaggaaaaagtcttgggtggtttcaacaagagatagaagatggagaaggcagggcagcacgagcatgtgatcggcatccccgtgaacaacagggcgttcggtatcgaggagccagatttccccagcaatggccccgccaagaacgcagccgccggcgccgggggacggcgccgggtgaccggggacagggtcgcccaaggcctgaaagagcacgtgacgctgggcccgaagctgtacgagaccgtgaagggcaagctgtcgctgggggcgaggatcctgcgggcgggcggcgtggggaaggtgttccggcgctggttctcctcccccgtcggcgggggcggcgagcggctgctcagggcgtcgcagtgctacctgtcgaccacggccggcccgatcgccggcatgctgttcgtgtccaccgagagggtcgcgttccggagcgaccgctcgctggcgctgccgctgacgtctccggccggcggcggcagcggcagcggcacgacgacggtgctgcgggtgccgtacaaggtgtccatcccgctgcgcagggtcgcggcggccaggccgggccagaacagggaccggccggagcacaagtacgtgcaggtcgtcacgcgcgacggcttcgacttctggttcatgggcttcgtcaggtaccaggcgtccctgcaggagctggagaaggccgtcgcgcagtcgcagtcgcaatgacctcaggcgatccgccggccggcccggcgattgttgtgctcctgtgtggtctgcttcatctgtgtgcatatgtagtagggtttcggttttcttgatgatggattattgcttggcgtttttggcattggagcaagtccggtatacattatacaggaggaaaaaatgggatattagattgattgcgtaatcggtgatgctgagtaaatcttctacggcgccagcgtaaaagtgtctcggatgaggtttacatgtaacatgtgtcatgaaaaccacaaatgcttgtgcgacgaactagattgtgtgaactgaactctgttcccatcttttacatcgaggcaaccgcgcgtactgatgaatgctatactatttcttattgtaa

SEQ ID NO: 100927 - DNA, 1071 bp, Zea Mays
caaacttcgaaaccaacacccatggatgcttacgggctctgggaaacccccattaccgtctgatgtgcatctaccttctagagtgatattgcttgaaggatggggtgctctttggagagggctcagatcagggatagctcgagactgtgtatttggtggtatgttcttttctacttggcaattcctacacacagtgatgctcacctggaaggcagttaatatgagccctaaacctagaaatctagaagcagcaggacctgtacccccttttgcctctagtgttgctgcaggctttgcaggagcgatagcagctgctgcttcacatacatttgatactgctaaaagtcgttcagagtgtactgtggtgcctaagtatatcgcaatggagaggaagtttcttaagtggaaagcaccaggaacgtggatagagaggaagacaggaatatcccctgctgataggaatgttttgttccgtggcattggcctacgaaccgcccgtagtggaatcgcatcatttgtgttagtcggctcatactatttagctgtgaatcacctctcgtagttgatcaagagaaatcatatggagatttttttttgcattcagaagttcaaaactaaaattttatgactgtatatgcatgcactgaatggctggaagctgactttgccacagtatccactgattatttgaaaatcctgttcacctaagtgctcagatgaaactgattgtcccacggcatgttttaaggtgccgatgtaaatgttttatggcaaaaaaaaatttgaaggctgccactttcgatcagaggctagtttacagttctacataaattgctgaaaatctgtttttgacaaaatgcaagcatcaagatgcacaatgatcaaggaaccctttgacatagcatttcccttgtcagaagaagaatcgcctgtacaaagctcttcagattgtcttcaggccttgcgtaaatttgtgaacatgtatttttgtttgaaaatactttgtacacttcattcattacacatcagctcttgacatggcagatcttggtccttcctttctctccagag

SEQ ID NO: 100928 - DNA, 2238 bp, Zea Mays
gtaaagtggaggaaaccacacttcggggcttcccatgtacacatacctgcggcaagcgcctcaagggaggacggaggcggggcagaagacggcggcgacggctccacgacgggtggagaaggctcctccgacggacgggtagcctggctctcgacctggcccatgaagagaggcagagcgggagaaggcggcggccaccctcgtctcttccggtaggtgggttagtagggagaggcgagaacgatagggcggcggagtaggctgcaattgcaacgctggtcaaagtcgaggcagcgacactcaccgccaacgtcggaaggaaacttcaaccgcagttcgactagcgccggcgcgtcccagactcccagccgtcggatcgctggacgctgggcgcctgggcgactcgcgtgatggtcacgatcttcactgggccacggaactatatgggccggtcgccgatgcccgaggtgggcttctgctaatggacccccagattcccccgcggctcctctcttcctgtcttacgtcgctcgccgcatttcgccatttttggggagggtgtgttccagccttgcaggccgccgagatggtgggaggcagcaagccgctgggggaaagcgtattcgcggtccacgcggtcgccggtgcggcggcgatcagcgcctccgccgtcgccgtgtaccccctcgatacggtcaagacactcctccagctgggagcgacggggcagaagcagaagatggggctccggcaggtggtggaccggctcatggccgcttccggccctgcaggtttttacaatggcattggatggtccatattgggtaaacttcctggattgggagcacgttttgggacctatgaacttttaacagccttctataaagatggaagggaggacaactatgtctattattctgaggctatgaaggctggcatagctgctggtgctgtagaggctgttttctgcacaccatttgaacttttcaaacttcgaaaccaagttagttctgtgattccttcaaaagctatgggccctgcaaatgttgctcaagaatcatttccactgctttccaaactgttgcctggatatgttcctgatataagggtgtggaacaacaccatgagccttttatctgatctttctcccaagcatcctgacatgttgggtgctctgaaacagcacccatggatgcttacgggctctgggaaacccccattaccgtctgatgtgcatctaccttctagagtgatattgcttgaaggatggggtgctctttggagagggctcagatcagggatagctcgagactgtgtatttggtggtatgttcttttctacttggcaattcctacacacagtgatgctcacctggaaggcagttaatatgagccctaaacctagaaatctagaagcagcaggacctgtacccccttttgcctctagtgttgctgcaggctttgcaggagcgatagcagctgctgcttcacatacatttgatactgctaaaagtcgttcagagtgtactgtggtgcctaagtatatcgcaatggagaggaagtttcttaagtggaaagcaccaggaacgtggatagagaggaagacaggaatatcccctgctgataggaatgttttgttccgtggcattggcctacgaaccgcccgtagtggaatcgcatcatttgtgttagtcggctcatactatttagctgtgaatcacctctcgtagttgatcaagagaaatcatatggagatttttttttgcattcagaagttcaaaactaaaattttatgactgtatatgcatgcactgaatggctggaagctgactttgccacagtatccactgattatttgaaaatcctgttcacctaagtgctcagatgaaactgattgtcccacggcatgttttaaggtgccgatgtaaatgttttatggcaaaaaaaaatttgaaggctgccactttcgatcagaggctagtttacagttctacataaattgctgaaaatctgtttttgacaaaatgcaagcatcaagatgcacaatgatcaaggaaccctttgacatagcatttcccttgtcagaagaagaatcgcctgtacaaagctcttcagattgtcttcaggccttgcgtaaatttgtgaacatgtatttttgtttgaaaatactttgtacacttcattcattacacatcagctcttgacatggcagatcttggtccttcctttctctccagag

SEQ ID NO: 100929 - DNA, 2254 bp, Zea Mays
acctcgcctccctggcgctgcccctcttcctctccaccgcgttcgaatcccatgggtctctgtttcagcaagaagcagcaagagaagcgccgagacgtgcagccatccagtgacgccaagaagagcggatgccggaaatccggcagggacaccgtgcttgtcgccgatgccaagaaggctcctcaggcaaaggcgccagcacttcccaagaaggctgtagccaggccggaggaggcaacagctgacaagaggaccgtgttcgtcgtcaaggccgcggcagcggcggcggccgccgaggttgcggccgccgcgaagggaagacccgaggatgcgcaggcgaagagggcggcgccggaggaggagctgaggcccggcgctgtgggccgggcgccagtgcggacgtcgagctgcaccaaggaggagttggacgcgatcctgatccagtgcggccgcctcagccgtagctcgtcgtcgtccgggaaggcgccgtcgggcgagcaccggaggtacgccggatccaagcggagctacgacttcgaccacgagaggaggggcggtggcggcgacgtcgacgaatgcgattggggcagggagggggccgcggtggccaggccctcaccgcgccggaggtcgccagaacggaagcgctcgtcgagccacgatggccgtgctggcagcgggagcgggagccagagccggaggattagcaggtcaccggggcggcgagcggacgtcgttcccgccccggggagctccgcgaccggcgagcgaggcgcgaggcagcagccgggcaagatggtgtcggtcccggccagggagaaggggcgcgcgccgtcgcccgtgaaggctgcttcgtctggcaagaggtacccatcaccaaggtcaaactcgcccgcgagggcagcggcctcgggtaatgagaatgccggggtgcagtcgacgcacggtccctcgctgagccgcagcacctctaggaaggccgagcagtcgccgttccgtcgcaaccccatggcggaactcgacgagaacacgctcggcaaccaccaccaccataacagcaacggcaggcctctaaagaaatccgttgatggtgccgttgtattgccacaaaagaccgcggagcggacaaaggatcagatctccagctgccgaactgcgaaggagattgcggatgaggccgtggcttcggacaccaaagcagcgcctgcaaggatgaacgcgacccactcggtgagcattgtggccgagaacgtcaccaatccgaggccggggagccggtcgtcgaggcgctcctcacgcgacttcgagcacaatggcaacacctacgcatccctgttactggaggacatccagaaccagcagcagcagagcaccagcgctgccactgtcgctgcagcgccgaccttcgcgcttccggcgtgtgtgtcgaaggcctgctctatccttgaagcggtcgccgacctcaactcctcgtcgtccgagaacaagaacttcgagctggagaggtcggtcaacgataaggaatccgtcaacggcaggtacggcggaaagggtgcggtcaccctcgtgatggagtcggaggtcggcgtgaaggacgatctcatggagccgagcatgcacaagtacgtctcggtgcgtgacattcgtggggagaccgagccgcaggagtcagcagggagcaacagctttgccggcaacgcctggacgtgctcgtgggagcccaattccgtcgactccgcagaccggacctggacggcctcgcagtcgtacaacggcgacgaggtggagcagtcatggcagagcaagcagaagccgtcgtcatccaaggagcccagccacgttggttctactagcgatgttcaggtccagcgcgtgcggggtgctcaccgcctccgcggcagcagcagtgctgtcaacggccagtccgatgttcggggtgtctcggcgagttcgtcgatcgcttaaggatgcaactggaggttttaggagtcatatgctccagttggtcacggtatcaagctgttgtggcaagataggttgctgtttcagactagtgtttaagcgtttggattctttgcttagtttgatgatatactctcctcgttctttttttatttatcacgttttagttaaaaataaactaacgaaaacgaagacagtacattgtttagatgtgatcaagcagtgatattggcaatgtatactcttccgttcacttgctaatgcttagcgtcagcaaacatatctgcacgta

SEQ ID NO: 100930 - DNA, 258 bp, Zea Mays
actatttttaaaatatgctttatgtttcctggaaacgatttgcactggcggttttattacgtcgaccgccagtgaaaatcgattttcactggcggttttattacgccgaccgccagtgaaaatcgattttcactggcggtcctcagttacccgcctgtaaaaatgatgatttctactggcccctagcactggcggttacgaaaaacgccactataaataggtttacaaccgccactatagaacttctctgtactagtg

SEQ ID NO: 100931 - DNA, 1354 bp, Zea Mays
gccgacgaaaaacatttcatttccttccgtcttctcccgccctcctctccgccatgtcatcgctccgcgtgaaaagcgcatcgcgaccgtccgttagaagaagcaccaacggcccacgccgcttgaagccagcgatccgcggcacctgcccctcaaccaattagcgcacacctctcccgtcctataatagacgcaccgcccccgtatcctgtcccaacaacagcgaacacatctcctcgcatttcttcccatccgatccccccttcgcaaccaaaaccccaactcgccccgcatcgatggcgcccaaggccgagaagaaacccgcggcgaagaagccggcggaggaggagcccgcggccgagaaggcgcccgccgggaagaagccgaaggcggagaagcgggtccccgctggcaagtccgctgccaaggaaggcggcgagggcaagaggggcaagaagaagggcaagaagagcgtggagacctacaagatctacatcttcaaggtgctgaagcaggtgcacccggacattggcatctcctccaaggccatgtccatcatgaactccttcattaacgatatcttcgagaagctcgctgctgaggccgccaagctcgcgcgctataacaagaagcctaccatcacctcccgtgagatccagacctccgtgcgcctcgtccttcccggggagctcgccaagcacgccgtctccgagggcaccaaggccgtcaccaagttcacctcggcctaggctgcgcggccgccgcttgcaggattctctcctgtgttcacgtctcttgctgtagttaggtgctgctgcctgctggcttctatgtatgttatctatctgtctgtagcaactgtgttatctgataggaccgtaatggtgcttattcaacccagctatatgtttctatgtgaatcatctctctatcggttgttgagtaactttatattgtgatgaagatgtgaatgtgatttataaaatgcgtcagtttctacggtaaggttagctgctggccatcaaggtccttgctaggtgtcaggtgcatacatcgttggattggaatgtagtcttgttctgattcagtttgattgtaatatgatgttttgtttgcacattgatctgtgaacaactgaactttgaaggtcactaacgtgttgctgatagaacccatggctgaaacaaatgtttttccagcagtgatttaagttgtggatactgaaacaagaacacatgagtggctacaaatgttttctactctgctgaagttgtatataacaacataggtttctgttccgttctcttgcgtgcttggtagcactgaaaagtcttggtcctgcaattggagatgt

SEQ ID NO: 100932 - DNA, 89 bp, Zea Mays
ctggcagcaaatgttacaaaggctattttgctttgacaagtggagaaagcaaaggaagacatgcttaaccagatatacagctcgataag

SEQ ID NO: 100933 - DNA, 1385 bp, Zea Mays
ctattcattgtttcctgatcagagtacacagcacatgctgtcattaccgaactaaagcagtttctgagagcaagcgtcacaatcgccatggaagctgggagaatggatcagccttgcatggcttctatcaatagccagcctttcgtggctgatactgagccagtgaagaaagccagtggggacatgcctgcggcgccgacaggaagcgggtgcttcgactgcaacatctgccttgattttgcagcagaaccagtggttaccctctgtggtcatctctactgctggccttgcatctacgagtggctgcgccctggggtggagtcaaccgccagcgacaacggcagttcggcaaggcggcaatgccctgtatgcaaggcaacactctcaccggacacccttgtgccgctatacggccgcggagggagctcaaagaagtcactggatggcatggccatcccgcgccgccccatggtacaccgggaggctgtcgagcaacagaatgcacggagccatgtcaatgaccagcactaccaccagagcacgggagacagccctcagcaccagccattgatgcaggcgcaccaccatcccgtcccccctgggttcgacttcatataccctccagcgccggtagggcgtggtttgatccactcgactgccggaggggtgctcggagggatggcagaggttgtgctcccgtgggtgctccgtggccagctgccagccagcttgcactacacgagcccataccatgttgcggcacagaacgtgaaccccaggctgaggcggcaacagatggaaatagagaggtccctgcaccagatctggttcttcctctttgtgtttgtgctgctgtgcctgctcttgttctgagacagaggactgttctatatgcctctctgtagatattgaagagggggagagagggatactaatggatgatgcgtatagtagacagggtaatggtctgtatcgacaagcatgctgatatagagttgtaatatgatgagacatgggaggtgaaatgtatatttcattcttctcgtcataacgtcagcggtttcctgatctatcgctgttggcctgttaggtaggttgcctacctgacatgtcttcatgtcagggccttcgatttgctcatttgcatatgtaaatcgaaaatgatgttttggctaccaatgtctgcgtcctcttcaatccctgttccgaaattgatacggcaattttgtagccaggacctcaggtgcacaacagcacaagtgcattttccttctatatgtgattacatgcatctgacgctgatccgggccattatatgtatgtggtatattgatcggagccaatatagattggcgtgaaagctaacagggaagagaaaaaaaaac

SEQ ID NO: 100934 - DNA, 1640 bp, Zea Mays
cgttatatacccctacggagcctcttctcatcagcctgctccttatcgccggctgccgtgccgccgcgtcctgctccccgctcccgtgttcgtcgtccgaagcaccgccgagcgccgcggcctcgcgccagcgccaccgcccagaaaccatctttccctcccgcgccgctgagcccatagcccatatcggggcctcgttcgacttcgaccgaagcgcgctgtgtcaaatttctgcgaccttgccgccgccttcatcattctggagctcggattgatttcttcctttgctgtgctgtcattaccgaactaaagcagtttctgagagcaagcgtcacaatcgccatggaagctgggagaatggatcagccttgcatggcttctatcaatagccagcctttcgtggctgatactgagccagtgaagaaagccagtggggacatgcctgcggcgccgacaggaagcgggtgcttcgactgcaacatctgccttgattttgcagcagaaccagtggttaccctctgtggtcatctctactgctggccttgcatctacgagtggctgcgccctggggtggagtcaaccgccagcgacaacggcagttcggcaaggcggcaatgccctgtatgcaaggcaacactctcaccggacacccttgtgccgctatacggccgcggagggagctcaaagaagtcactggatggcatggccatcccgcgccgccccatggtacaccgggaggctgtcgagcaacagaatgcacggagccatgtcaatgaccagcactaccaccagagcacgggagacagccctcagcaccagccattgatgcaggcgcaccaccatcccgtcccccctgggttcgacttcatataccctccagcgccggtagggcgtggtttgatccactcgactgccggaggggtgctcggagggatggcagaggttgtgctcccgtgggtgctccgtggccagctgccagccagcttgcactacacgagcccataccatgttgcggcacagaacgtgaaccccaggctgaggcggcaacagatggaaatagagaggtccctgcaccagatctggttcttcctctttgtgtttgtgctgctgtgcctgctcttgttctgagacagaggactgttctatatgcctctctgtagatattgaagagggggagagagggatactaatggatgatgcgtatagtagacagggtaatggtctgtatcgacaagcatgctgatatagagttgtaatatgatgagacatgggaggtgaaatgtatatttcattcttctcgtcataacgtcagcggtttcctgatctatcgctgttggcctgttaggtaggttgcctacctgacatgtcttcatgtcagggccttcgatttgctcatttgcatatgtaaatcgaaaatgatgttttggctaccaatgtctgcgtcctcttcaatccctgttccgaaattgatacggcaattttgtagccaggacctcaggtgcacaacagcacaagtgcattttccttctatatgtgattacatgcatctgacgctgatccgggccattatatgtatgtggtatattgatcggagccaatatagattggcgtgaaagctaacagggaagagaaaaaaaaac

SEQ ID NO: 100935 - DNA, 853 bp, Zea Mays
acctcgccggcgaacaccaggaggaacggcgggagggagcccagctcgtaaatcctggcctcctgcttctgcacctccatccagtattccagcttcgcggtgtacccgccggagcgccacctgtccaggtcgatgaccattaccccggtgttgaagtagcagggggcgcgcgtccggttggcgaagacggcggcgtactcggggtggcgccagaacgcaggcgggcgacgtcgtcgaccacgaggaggtcggagtcgaggtagagcacgcgggggacggagcgcggcaggaggtccgcgaggtagatgcgagcgtagttgaggggctggtcgagcgcgcgccggacggaggaggagatcttgccccggacgaggcgcgcgtcgaagcggtgcacggtggccgggagcgtggggaaggcggccgccagcgcgcggcggagcgaggcgaggcggcgcgccggggacgccgaggaggccacgaagtggaaggcgatggactccgggcacgcggcgtggcggagcacggagaggacgccggcgagggagccccgcaggtaggtggcgtccagcgtcatcgcgatgtggatcgtcggcgcgcccgcgcaggccgcgccgttgcggaacgcaggagcctcccggaactccggaagctccccgccgcctccggccgccgccgccgcgcacgctgcggcgaggaggaccacggcgaggacgcgcattgcgcccactgggtgcccttcagctaccctccccctcccggagaatctgatgggtacgggtgtggggaagacgagattggaagggtttgatgacgggggaccggaggacagggtggacggaggaggatgtgtaac

SEQ ID NO: 100936 - DNA, 586 bp, Zea Mays
tcacccgatcacacacagtcacagcagctgagcagccccgctctccagtctccacacctcctgcggccggcccgacggccccccgacaccgaacatgaagagggagagacgtcacggcatgagcgcacggctaccgaccatgctgctggcaatgcttctgctgctggcgaccgagctcgcctccttcggctgctgcggccacgggattcccagagcggacgtggcggcgtggaggcatagacgggtggccgtgccggcggcggcggcggcggcggcggcggcggcgacgacgacggcaggcgcgcgcgctactacgtcgccctcccccacggcagcccgggacgacgccgaggcggcgctcggcgagtccaagaggctggtgccgcagggctccaacccgctgcacaactaggagcgtgagcgtgagagcgaggaagcaaagcaggcgcgtgcaggttcttcgttcggctagctttcatgtatttttttttactccctcgctaggtcacacacaggcacacggccattgatgtgcgcctgtaactgtaattagctagcgacgcaacacacggcagcagtagggcta

SEQ ID NO: 100937 - DNA, 842 bp, Zea Mays
tagagcttacacgatctgagcagctttaagtgccctcacagcatttgatgtgcccatttggaatacaaccctgcccctttcttgtgggcatgtacggaaaactacactgtcagtccctttctccacaaaatcagtagtcccaagagattctggtaaacaatgcgtagcatgataaggatgtgtcaaatcatatagccccagagcaaatgcaatcaatctgaacaactgatggagcaaataggtaagataatggaagtgctttgaaggcgccctagcttcacaagtaaaatagctttctcttcacttcataaagcattcataaacttattctagcattcatccaatcattccccaaaccccaattacaggaacttcatcatccaggagtcaattaagaagaatatatccaattaattaattatcaacttcagatgcaacatattagggtaaagttatttgcaatcctatggtactcaacttattagatcttaaaaagcagttggatacttggatgagtaaactaaaacactgatgcagtggagacagttgtaggaccaatagaccacatcagatgccaaatatcaattgaactacaataccatttgtaacacgctcacacttcaagaatttgtgatcaataatttcttctccataagtaatatcagcaccatattcagcagccagtagcctaaatggcaagttaccacgcggaccatgggcgccagcacgagcttgtcgcggtactccatccccacctcgtcgccgtgccgcagcgcagaccgcgactgctccggcagaaaccttggcccccgcgaaacctggagacgaagacgagacgaggg

SEQ ID NO: 100938 - DNA, 630 bp, Zea Mays
atggaatgcagtgccccacctaagaaacgttttcttcatatcagaaacaaagcaccgctgctccatacagaccttttgtacaggacctactaccagcctaccaccacacaagacaaaactaaagaacaacctgtggctccccatgtgcaacagcagaaagctagaaaagctggtgaatgctggagatgtggtgagaaatgtgtccctggtcacaaatgcaagttaatccctactatcaatgtcatgcaggaaacttgcacactaaatgatgccacagacgagactgcagcacaaaaagaagaaatgaaatcctacaggatcaggactcccatccaaatgagtatctcatggatatttcagctcatgcagtttcagggatggtcactgctagaacattctcagtcaaggtcactgtcggtgaacaaacaggcattatccttattgatactggcagtaagtgcattcattgttttgtcttacacagttaaaaccacttgccatatccaaaaaaaatcagcaaaaatagctgtggctgggggagggcaacttacatctggggcaatcataacaggcactgcattctctattcaggaacatgccttgaacaacacccttgactcctggaattga

SEQ ID NO: 100939 - DNA, 2671 bp, Zea Mays
gtttggagccagaaatttgggctccggctccgtgggctgttttggctcctgctctttgatgagagccgtttcatcaagatgcgtttgggagagctccgggtaggagctggagccggagccgtgggagagccctcccaaacgggggctcagacagcgacggctctagctgaaatctagggacgctactccgctcaccatccggcatccacgcgtaagccagtcgcatcgcaagatgaggattcacgatcaaggcttgcttacgctctgatgacgtgagaatccggtcagcttcacaccgccagagccaaaagggaagtgaaagacgcatccggcggccgcgttaagcaccgggagccaaatcattcgccactccccaaccgtcccaggctcagcactagcagccatgccgcacctcgtcctgcttctcttcctcggcctcggcgggctcctgcccgcggcgtcggccgccgacgagcagttcgtgttcgacggcttcaagggcgcgaacctcagcctcgacgggatggccacggtcacgccggacgggctgctcatgctcaccaacggcaccagccagctcaagggccacgccttctacccggcgccgctgcggttccacggggcgcccgacggcacggcggcagcgatggagtccttctccacggccttcgtcatcggcatcatcggcgcgttcgaggacctcagcagccacggcatggcgttcgtggtcgccaagagcaccaacttcacctccgcgcttccgggccagttcatgggcctcgtcagctccgccaccaacggcaacgccaccaaccacctgttcgccgtcgagttcgacaccatcctcaactccgagttcgacgacatgagcggcaaccacgtcgggatcgacgtcgacggcctcaactccctcgacgccgacaacgccggctactacgacgacgccacgttcaggaacatgagcctggtgagccgcaagccgatgcaggtgtgggtggacttcgacggccggaccatgcaggtcaacgtcaccatggcgcccctggaggctgcccgccgccggcccaggaggcccctgctctccaccaccgtcaacctctcctccgtcatcgacgacggcaccgcctacgtcggcttctcgtcggccaccggcatcctcttctgccgccactacgtgctgggctggagcttcaggatgaacggcgccgccccgccgctcaacgtctcctccctgcccaccctgccagtcacggcacccaggccgaggtccagggcgctggagatcgtgctgccgatagcgtccgcggcgctcgtcttcgcggcggccgccgccgtcttcgcgttcctgcgcaggcggcgcatgtacgcggaggtcagggaggattgggaggcctcgttcgggccgcacaggttctcgtacaaggacctgctccacgccaccgacgggttcagcgacaagcggctgctgggcatcggcggcttcggcagggtgtaccggggcgtgctggcgtccaagacggaggtcgcggtgaagaaggtggcgcacgggtccaggcaggggatgagggagttcgtggccgaggtcgtcagcatcggccgcctccggcaccgcaacctcgtgcagctgctcggctactgccggcgcaagggcgagctgctgctggtctacgactacatgcccaacggcagcctcgacaggtacctctacgaccggagcaggaccgcgctgagctgggggcagaggttccgcatcatcaagggcgtcgcgtccggcctgctgtacctccacgaggactgggagaaggtggtggtgcaccgggacatcaaggccagcaacgtgctgctcgacaaggagatgaacgcgcggctgggtgacttcgggctggcgcggctgtacgaccacggcaccgacccgcacaccacgcatgtggtgggcaccatggggtacatggcgccggagctgggccacacgggcaaggcgtccaaggcgtccgacgtcttctccttcggcgccttcatgctggaggtggcctgcgggaggaagcccgtggtgcaggacgagcgcgacaaccgcctggtgctggtggactgggtgctggaccgctggcgcgctggctgcgtcacggacaccgtggacccgcgcctgcagggcgacttcctcgagcgcgaggccagcctcgtgctgaggctcggcttgctgtgctcacacccgctgcccggcgcgcgcccggccatgcgccagatcgtccagtacctcgacggcgatgcgccgctgccggagctgtcgccgacgtaccagggcttcaacatgctgtcgctcatgcaggaccagggtttcgacccctacatcatgtcgttcccgatgtcgtcgacggggatcagcaccatatctgatctgtccggaggaagatgaagttttgttgatcgtccatcatcgtgtcagtttagttaccgtactcagtgtctaactggagttcactcttgttctgcacttagcaattcagaattcagacgttttttctctccttttttttagaacgcaaagttcagaaatgcaaaagtgactagtcaacctgattgtagtgtggatgacttgaatgtaaagttatggtcgggcaacttaatgttcggattataaatttctaatcacacctggagattggggtttgat

SEQ ID NO: 100940 - DNA, 269 bp, Zea Mays
gtatggatggatcgtccatagatgcggacagtccgtgatatgattagatcaggcaaattaagctcctttttccacgcgtgtttatccctctaaactcgtgagacttgttggagaacgtctatgaacacatccagacctccccaatcccccttatatatttgaaggcgaccgattgaacaatgaacaatcaaactaatcaatatatttatcgttcttctgctttttttaatgccctaggagtaacagtaacttggtattatcatctctga

SEQ ID NO: 100941 - DNA, 1920 bp, Zea Mays
aagccacctccagcacgaacacgccgaaggcgaacacgtccgtggccggggtcgccctccccgtgcgcaccagctccggggcgaggtagcccatggtgcccaccacgtgcgtcgtctgcgggtccacgccgtggtcgtacagccgcgccaggccgaagtcgcccagcctgccgttcatgtcgccgtccaggagcacattgctggccttgacgtcccggtggatcaccaccttctcccagtcctcgtgcaggtacagcaggccggcggcgacgcccctgacgatctggaacctctgcccccagtccaggacgggcctggcggtcctgtcgtcgtagaggtacttgtccaggctgccgttggacatgtagtcgtacaccagcagcagctcgcccttccgccggcaatagcccagcagctgcaccaggttccggtggcggaggtggccgatgctcaccacctccgcgatgaactccttcatcccctgcttcgagtcgtgcgacaccctcttcacggcgacctcgagcttggacccggagagcacgcccttgtacaccctcccgaagccgccggtgccgagcagcatcttgttcttgaaccccttggtcgcctggtagagctccttgtacgagaagcggtgggggccgaactccgcctcccagtcctcgcgcacctcggcgtacctcacccgccgccgcacgaacaggaaggcgcccacgaccagcgcgaggacgagcgccgcggtggcgaccgggagcacggtctccagcaccttggaccggggcttgggcccgaaccgcggcagcgcgggaagcctggagatgtccagcggcggggccgcggcgcccgtggcgaagctccagcccaggacgtagtggcgcgtgtagatgacgcccgtggccgccgagaagccgacgtaggcggtgccgtcgtccgcgccgaccgccgagaggttgagcggcgtggagatgagcggcttccgcggcctgggcacgccggcgggcgccatggccacgtccagccgcgcggcggcgccgtcgtagtcgacccagacctgcatgggccggcggctgatgaggctgaggttggtgaacgcccccgtggcgtcgtcgtagtagccggcgctgtggttccgcagcgacctcatgctgttgacgttgacgccgacgtggttgctgttcatgtcctggaactccgggttgagcatggtgtccagctcgacgaagaagacgcggttgccgtccctgccgttgtcggtgacgttgaggacgcccaggtactgccccgcgttgaaggcggagagcctggtgctcggcgcgaccaccagcgccatgccgttgtcgctgagcacggtgtagttggacacgatggcgaagacgaaggccgccgagaaggacctggcggcggcggcggcgccgtcacgcaggcggaacggcgccgggtggaacgcgtggccggccatctggctggtgccgttgctgagcgccagcaggccgttcggcgccaccgcggccatgccgtcgagcaacaggtcgctgcctccgaagccgttgtaggtgaactcgtcggcggcggcgagcgcgaccgcgtggaggaggaggaggaggagcggacgggggcaacccatcgcgtttcgcgtccagtagccgcaaccgcaacgctcccaacacaggatccggacaggggcaactggactggactgaacactgaagtacagcgtgaggtctgaagtctgaacgacccgatgctttgagtttgtctttgaccccgacggcgacttgctgttcaaagccgccgcccaagatcacaagaattcaatagggccggacccgtcgctatgccaaccgcgtcccattgaatttccagtgcactactgatcgaagtcaaggaaataccgatagaatatcctagcagcagccagcg

SEQ ID NO: 100942 - DNA, 1240 bp, Zea Mays
atattcatataaatacgcatacactacagcaccagccaccaggttgaccagaagaagcagagctcgtggcgcacgctcatggaaggagccatctctacttccccaggcgcaaggatcgccgtggtcaccggcgggaacaaaggtattgggctagaggtgtgccggcagctggccgggaacggcatcaccgtcgtcttaacagccagggacgagacgaggggcgcagctgccttggaggagctcagagcgctgggtctttccgacgtcgttttccatctgctggacatcacggacgcgtcgagcatcgctaggctagccggtttcttgaaggcccgtttcgggaggctagacattctgataaataatgccgcgtttggcggcgtcgaatacgcccggggtcctgctgctgctgctgggtcagtgacaagtgaagaagaattgagcggcatggatagggatcagaggcttgaatggctgtggaggaatacccgggagacttacgacgctgcaaagaaaggcctgctgacgaactactacggcaccaagcatgtgatcgaagcgttgctgcctctgctccgagcctcctctgacggaagaatcgttaacgtctcctccgactttgggctgcttaggttcttccgaaacgaggagctgaagcaagagctgcacaacgtcgagaagctgaccgaggggaggctggacgagctgctggacgcgttcctggaggacttcgaggccggcgaggccgacgcgcgcgggtggccggcggcgttcgcggcgtacaaggtgggcaaggcggccatgaacgcgtactcgaggatcctggcggcggagcagccgacgctgcgcgtcaactgcgtgcatcctggctacatcaagaccgacataaccttgcgctcggggctcctgacgcccgaggaaggcgcgggtaacgtggtcaaggtggcgctgctgccgggaggcggggtcaccggcgccttctttgaagacggccaggaggcgtcgttcgtgtgacgtcatctgttggacacttggaccggcattcagaaaggagagctggagttggcgatggtgtggcgtgcacatgggatatttaaatttatacccttagttttgtcaccttcctcatttttatctttagttgaattttttactcagttttatctttctgctctataacattggattaaatagctcaatgattaatagtggcatcacttattgttagatcatttattcc

SEQ ID NO: 100943 - DNA, 1352 bp, Zea Mays
atattcatataaatacgcatacactacagcaccagccaccaggttgaccagaagaagcagagctcgtggcgcacgctcatggaaggagccatctctacttccccaggcgcaaggatcgccgtggtcaccggcgggaacaaaggtattgggctagaggtgtgccggcagctggccgggaacggcatcaccgtcgtcttaacagccagggacgagacgaggggcgcagctgccttggaggagctcagagcgctgggtctttccgacgtcgttttccatctgctggacatcacggacgcgtcgagcatcgctaggctagccggtttcttgaaggcccgtttcgggaggctagacattctgataaataatgccgcgtttggcggcgtcgaatacgcccggggtcctgctgctgctgctgggtcagtgacaagtgaagaagaattgagcggcatggatagggatcagaggcttgaatggctgtggaggaatacccgggagacttacgacgctgcaaagaaaggcctgctgacgaactactacggcaccaagcatgtgatcgaagcgttgctgcctctgctccgagcctcctctgacggaagaatcgttaacgtctcctccgactttgggctgcttagggtaacttgttctgatcacacgctgggctccaaactctgatccaaggataaacttaaaattttgccatctcgttgacaagctacatgtactgcgatcgcaaatgcaaacgcagttcttccgaaacgaggagctgaagcaagagctgcacaacgtcgagaagctgaccgaggggaggctggacgagctgctggacgcgttcctggaggacttcgaggccggcgaggccgacgcgcgcgggtggccggcggcgttcgcggcgtacaaggtgggcaaggcggccatgaacgcgtactcgaggatcctggcggcggagcagccgacgctgcgcgtcaactgcgtgcatcctggctacatcaagaccgacataaccttgcgctcggggctcctgacgcccgaggaaggcgcgggtaacgtggtcaaggtggcgctgctgccgggaggcggggtcaccggcgccttctttgaagacggccaggaggcgtcgttcgtgtgacgtcatctgttggacacttggaccggcattcagaaaggagagctggagttggcgatggtgtggcgtgcacatgggatatttaaatttatacccttagttttgtcaccttcctcatttttatctttagttgaattttttactcagttttatctttctgctctataacattggattaaatagctcaatgattaatagtggcatcacttattgttagatcatttattcc

SEQ ID NO: 100944 - DNA, 1040 bp, Zea Mays
atccccgatgcgagcctcgtctatttactcgctcgcccgagcggaggcgagaagcgattgggatcgggaggcgagagtgcgtgcgtgcagccacaggcaggcgtcggcaccatgtcttctttcaccggcacgcaggacaagtgcgcggagtgcgacaagaccgtccacttcatcgacctcctcacggccgacggcgtcacctaccataagacatgcttcaagtgcagccactgcaaagggatcctctcgatgtgcagctactcttccatggacggtgtgctgtactgcaagacccacttcgagcagctcttcaaggagaccgggagcttctccaagaacttcacgccaggtggcaagtcttcagacaagggtgaactgacaagggcccccagcaagctatcatctgcgttttctggtactcaggataagtgtgcagcttgccagaaaacagtgtacccgctggagaagttaactctggaaggcgagtcctaccacaagagctgcttcaagtgctcgcacgggggctgcatcctcaccacctcctcctacgccgcgctcaacggcgttctgtactgcaagatccacttcgcgcagctgttcatggagaaggggagctacagccacatgatgaagaagagcccgtcccaggatacgctgccggacatggcagccgacgagcaaccgccggaaccggcgccaccgcaagacggggaaggagaggacaactaggaggaagggaccgccaccaatatatatcacacacacacacacacactcacacattctcacactcaagtctgcgtttgccatttttcttttctttttctctacgacttcgttattccctcctttcatctatctctccgtgaactcggtttgtcgtccagctggctgtaagtgtaccagatgccttcgttacgtctgatgaggctcatgacaatggcgattttggcatggagttgtgttagcctcgcggaaaaactgtaactgtgtaagcagaactgctatatattgttcctaacaatgttgtccttaatcct

SEQ ID NO: 100945 - DNA, 400 bp, Zea Mays
ggtacccaaagaattacacaatccttaaatgtttacacttcaaggatacatcccgaattatacttcagcatgcatcaagacgattcagacgaacagagcgagggagatgattggttccgcagaccaccgcaccaatgcggagatgatttggttctcgtttccaaggttcggtttgtcttttcctcactccaccctttttctgggtttaaaaaaatgggacgagggagatttcgtccgtccgtcattctgtccaggattgcagaatccaagaagctagcatcaaggctgccgtgccatgctgatgcttgtcaatcatcgcctccaccaccatgagagcttgattgaggggggtcacggtcaccaccagccacctagctactccctccatttccagcccacc

SEQ ID NO: 100946 - DNA, 101 bp, Zea Mays
atgtttcctgataaatctcagaacctaaatgcattgccgcaaaaaattagagaaatacagaagcacatgaagttggataattatcaaacaagtatggccac

SEQ ID NO: 100947 - DNA, 874 bp, Zea Mays
ctagcagacagcaacatgaccgaggaggaggccaaaaaggtggaggtggaagtggaggtcaccaaggcggcgccggcgaaggagaacgccgccgaagagaaggccgtcatccccgcgaccgagccgccggccgcccaggagaagccgccagcgccggccgacgactccaaggccctggccatcgtcgagattgcagataaatctactcctgagaagcctatcgctgagaagcaagggggctccagtatcagagatctcgctcttgcaagggtggaaacggagaagaggaactctctgattaaagcatgggaagataatgagaaggcaaaagctgataacaaggctactaagaaagtatctgttattctttcatgggagaacacaaagaaagcaaacatagaagctgaaatgaagaagattgaggaacaactggaaaagaagaaagctgaatatgctgagaagatgaaaaacaaggttgcaatgatccacagggaagccgaagagaagcgagcgatggtggaggcaaagcgcggcgaggaggtcctgaaggccgaggagatggctgccaagtatcgggccaccggccacgcccctaagaagcccattgggtgcttcggagcctaagaaatgttccaagtcacaccgagcagaaagtgagaaacctcaaccagtgattgcttggtcacctcgctctatcaagtgtgtagtgtgtgttcgaaagtgtgtaagtcctactgctcctgtatatatagatatcgcttccaagacgtgtacatgttggatgcttgatgtgaaacttttttatgtatagttaaggagtcacactgttgttttcgttgttgttgacatttaagtggatttttttgttgttctc

SEQ ID NO: 100948 - DNA, 1135 bp, Zea Mays
ttaaacgagtagtagcgaccgataagatagaaacaacgattcggcgaggatacagtactacggaagggacggcccaatggcgagcggcattttaatatccacgcacgatgcaaggaacagaaagcatatggtcaccgatggttcgtagcgacgtcgccgcccacgcatttatgccgccgcgcgccgcgctggtacgttcgagcgagccctgtggtctggtctctcgacgtttgcccggctaagctgcggagccgtccgacgacctgcccggccgcgtgctactgcatatacactgcacgtccccgtggtctgtcgttctgtcaacagtgcccacgggacgggcccccgggcacgacgacgttgaacgaaacgaacgttgctgccttgctggcgtgaaaggcgacgcgcgtcgtgcgacggccaccagagagtctccgcgctcacgggatccgagcgcccagcggtgcgggccagctcgtctcgtctgagcacacagcacagggcgattgcgctgggagccaatgcgctgcgcccgcgggccacggcgggcccaatgccatgatgcgccggcccgggtcgccgtcacgtacgcgcgcatgggttccttcatcccttgccgactcccctgtcagaaaaaaaaaatacgaggccgtgtccttcctgtcagaatttagaaacacatcaaaccttccgctctcttcccttcctttgcgggctgctctccagttcaggcgtccagcttcgcccagagtccagacacggccaacagttaaacgcgccaccgccaccacgctcgcacgcacgccccacaggtacagctagctcccacccctcaacagcaacagctaagcttctcctagcagacagcaacatgaccgaggaggaggccaaaaaggtggaggtggaagtggaggtcaccaaggcggcgccggcgaaggagaacgccgccgaagagaaggccgtcatccccgcgaccgagccgccggccgcccaggagaagccgccagcgccggccgacgactccaaggccctggccatcgtcgagagtgagtacaacttgctctgcttaattctccctctgtgtagtggaaggcttgcgatggaaaggtggtgttggcgtactggtttctgctct

SEQ ID NO: 100949 - DNA, 396 bp, Zea Mays
agctatgattgcagtaactatcaattttagaattggtttgttccacggaagaacataacctttctattcaattttgaatagccactcaattccatctaatccccttctctcaaacaagttagtagaatcataaaatccccggtcaactggacttgacaagctgcaactacaaaggttatgtgcaatggctttatgtccgctactattccaacaatgttgatgcaatgtcacaggttaggccatgcaaaactagagtacaagcatctgcagaccagcaacactcgtcatcctcacttctcatgctcctgcaacatgttgcattgagatataatgctgcggaaatcctcgaggtttatctgtggaacagcaaaatcaagatgtaagaaaatactcctt

SEQ ID NO: 100950 - DNA, 1625 bp, Zea Mays
cagcccaatttaccgtgccgtgcctgggccgaccctacgggcccaagtggtggcccaggcacggcactaagaacgggccgtgcccggcactggcactaaaaggtccgtgccgtgccgtgccagtgccgtgctttttagtgccgtgccagtgccggcccgtcgtgttagtgccatttggccaactatacccacagccccacgacacctttctgacagacaggtcgcaccagccgtccaggtccagcccgcattccttccctcctccgctcctcctagttcctaccaactcccgttgttgcctacggcgattccaaattcccatctgccctcctgctgctccactccactccactccaggctcttttccctgctcctgtgggctgtggcgagcgcaaaccagcctcgcttcccaaaccctagctcctcgctctcccgcccgcgtggcctgccaggcaaccacccccggatcaactccgtacagcgtgcctccgcctcccggactccagcggcggcgggatgtggtctcactccaaggacttgctcgagatcgagcccctcgagctccgattcccattcgagacaaagaagcagatctcgtgctctatgcagttgacaaaccgaacagatgactacatcggctttaaggttaagacgacgagcccgaagaagtactgtgtccggcccaacagcggcatcgtgccacctcggtccaccagcgatgtcattgtgacaatgcaagcacaaaaggaggcgccaccggacatgcagtgcaaggacaagtttcttgtgcaaagtgtcgttgtggcggaagggaccttagtcaaggacatcactggcgatatgtttaccaaagaatcagctaatgtggtggatgaggttaagctgaaggtcgtctacatcccaccacccaaaccgccatccccagtgcatgaggaatctgaagaaggctcatcaccccgaccttcattgtccgatggaattaacttgaattatcaagagatgcagacaacgagggaatctgatgagtcactgttgttctcggctgtaaaaactcatatagatcaaaaggactacacctccgagacatctgctttgatttcaaagttgacagaagagagaaactctgccattcagcagaacaataagcttcgagaggaactggaccttacgaggagggaagccaacaagcagaatggtggattctcctttgtggtcgtggtggccattgctctcctgggaatgctactgggatatatcatgaagagatagatgggctcataatgactcggcctcatgttagaccgttttcctcacagtattgaatattgtctaatgcacttatcacatgcacactgctactccatagcatattcatctggtgtcttacgtgatctgtttcgtgcttgggattgggatgactagtcaccagtcgcaacacaggctgtcaaacaatggtctgtgtgcttaatcttgttttagctgttatgttagtgtgtgcaactaaaactgggtaattaatgatgtcgttttggtcgaccgtttgtgtaacagcgaagtcaacttgctgtgggacagcttttgtttcatgactagaacttgccattgccgccaattaggcatgccgc

SEQ ID NO: 100951 - DNA, 1619 bp, Zea Mays
cagcccaatttaccgtgccgtgcctgggccgaccctacgggcccaagtggtggcccaggcacggcactaagaacgggccgtgcccggcactggcactaaaaggtccgtgccgtgccgtgccagtgccgtgctttttagtgccgtgccagtgccggcccgtcgtgttagtgccatttggccaactatacccacagccccacgacacctttctgacagacaggtcgcaccagccgtccaggtccagcccgcattccttccctcctccgctcctcctagttcctaccaactcccgttgttgcctacggcgattccaaattcccatctgccctcctgctgctccactccactccactccaggctcttttccctgctcctgtgggctgtggcgagcgcaaaccagcctcgcttcccaaaccctagctcctcgctctcccgcccgcgtggcctgccaggcaaccacccccggatcaactccgtacagcgtgcctccgcctcccggactccagcggcggcgggatgtggtctcactccaaggacttgctcgagatcgagcccctcgagctccgattcccattcgagacaaagaagcagatctcgtgctctatgcagttgacaaaccgaacagatgactacatcggctttaaggttaagacgacgagcccgaagaagtactgtgtccggcccaacagcggcatcgtgccacctcggtccaccagcgatgtcattgtgacaatgcaagcacaaaaggaggcgccaccggacatgcagtgcaaggacaagtttcttgtgcaaagtgtcgttgtggcggaagggaccttagtcaaggacatcactggcgatatgtttaccaaagaatcagctaatgtggtggatgaggttaagctgaaggtcgtctacatcccaccacccaaaccgccatccccagtgcatgaggaatctgaagaaggctcatcaccccgaccttcattgtccgatggaattaacttgaattatcaagagacaacgagggaatctgatgagtcactgttgttctcggctgtaaaaactcatatagatcaaaaggactacacctccgagacatctgctttgatttcaaagttgacagaagagagaaactctgccattcagcagaacaataagcttcgagaggaactggaccttacgaggagggaagccaacaagcagaatggtggattctcctttgtggtcgtggtggccattgctctcctgggaatgctactgggatatatcatgaagagatagatgggctcataatgactcggcctcatgttagaccgttttcctcacagtattgaatattgtctaatgcacttatcacatgcacactgctactccatagcatattcatctggtgtcttacgtgatctgtttcgtgcttgggattgggatgactagtcaccagtcgcaacacaggctgtcaaacaatggtctgtgtgcttaatcttgttttagctgttatgttagtgtgtgcaactaaaactgggtaattaatgatgtcgttttggtcgaccgtttgtgtaacagcgaagtcaacttgctgtgggacagcttttgtttcatgactagaacttgccattgccgccaattaggcatgccgc

SEQ ID NO: 100952 - DNA, 1743 bp, Zea Mays
cagcccaatttaccgtgccgtgcctgggccgaccctacgggcccaagtggtggcccaggcacggcactaagaacgggccgtgcccggcactggcactaaaaggtccgtgccgtgccgtgccagtgccgtgctttttagtgccgtgccagtgccggcccgtcgtgttagtgccatttggccaactatacccacagccccacgacacctttctgacagacaggtcgcaccagccgtccaggtccagcccgcattccttccctcctccgctcctcctagttcctaccaactcccgttgttgcctacggcgattccaaattcccatctgccctcctgctgctccactccactccactccaggctcttttccctgctcctgtgggctgtggcgagcgcaaaccagcctcgcttcccaaaccctagctcctcgctctcccgcccgcgtggcctgccaggcaaccacccccggatcaactccgtacagcgtgcctccgcctcccggactccagcggcggcgggatgtggtctcactccaaggacttgctcgagatcgagcccctcgagctccgattcccattcgagacaaagaagcagatctcgtgctctatgcagttgacaaaccgaacagatgactacatcggctttaaggtaagctcggcattctgaatcccctctttcccgcccagctagattgctttgtcaaggtcatagaagtcagcaactgcgtgaaacgttgagttactattaatgattttgagtccgacaggttaagacgacgagcccgaagaagtactgtgtccggcccaacagcggcatcgtgccacctcggtccaccagcgatgtcattgtgacaatgcaagcacaaaaggaggcgccaccggacatgcagtgcaaggacaagtttcttgtgcaaagtgtcgttgtggcggaagggaccttagtcaaggacatcactggcgatatgtttaccaaagaatcagctaatgtggtggatgaggttaagctgaaggtcgtctacatcccaccacccaaaccgccatccccagtgcatgaggaatctgaagaaggctcatcaccccgaccttcattgtccgatggaattaacttgaattatcaagagatgcagacaacgagggaatctgatgagtcactgttgttctcggctgtaaaaactcatatagatcaaaaggactacacctccgagacatctgctttgatttcaaagttgacagaagagagaaactctgccattcagcagaacaataagcttcgagaggaactggaccttacgaggagggaagccaacaagcagaatggtggattctcctttgtggtcgtggtggccattgctctcctgggaatgctactgggatatatcatgaagagatagatgggctcataatgactcggcctcatgttagaccgttttcctcacagtattgaatattgtctaatgcacttatcacatgcacactgctactccatagcatattcatctggtgtcttacgtgatctgtttcgtgcttgggattgggatgactagtcaccagtcgcaacacaggctgtcaaacaatggtctgtgtgcttaatcttgttttagctgttatgttagtgtgtgcaactaaaactgggtaattaatgatgtcgttttggtcgaccgtttgtgtaacagcgaagtcaacttgctgtgggacagcttttgtttcatgactagaacttgccattgccgccaattaggcatgccgc

SEQ ID NO: 100953 - DNA, 1465 bp, Zea Mays
accacttcatacacgttcgactgcccgagagatatacgctcggccgttttctgcatcaacattcaacggtggcaggcggagcaaccgaacacgcccgccgccgccctactcccacctgcccctgtattcgttgccggcgacgagcacccactacaccagattaacatcctataccatggcctctctgccttgttcacaaataaagttaagcaaaatacttgtcaggaggaagtttcatgagagtggacagaccaatttgccaagtcatcttcactggaaacccttgcgacctggccgttttgaaaattttgtgctgcgatgcaccaagaatttgtcatgggaaacatctcttccatatgcctctgcacaggatgatgccagtatcatcaagggaacaggtgttgttgaacctattgatacagaagaagctccacagattccaatcctccagagtgatgaagatgttgtagaggtgaagaatgaaccttcttggcatcttaaggcatttaaactgccaatgtggctagtagggccttcaatcctgttggttacgggtatagttccaactttatggctgccattgtcttcagtgtttcatggtcccaacatcgctggccttctatctctagtcggacttgacttcatttttaatatgggagcaatgttgtttttccttatggctgatgcatgcgccgtcaagagaacagtatttttgacctgaaaaggcagataccaatttcctacaggttctggaatctggctgctaccatagtaggctttgtggttccatttgccctgttttttgcatctcgcaggggcactctgcagccacaactaccattcgttccatttggagtgctgcttggaccgtatcttttactcctatctgtacagatgttgactgaaatgcttacatggcactggaaatcgccggtatggttggtagctcctgtggtttatgaaggctatcgggtactacagctgatgaggggtctccagttagctgacgaaatcagtgcgcctgactggatggtgcaaagtcttcgtggcctggtatcctggtgggtactcgtccttggaatccaattgatgcgcgttgcctggttcactggactcaattttgctagaaattcaagctatggagcaagtggtgatatgaaccaataaatcatgcaagaaaaacttgaggccgaacatctttgagaacctgcaatgcttgagcaggaaccaggctgtggtaaatagtgcagtttctcttttgctggagcaggaaccaggctgctagatacttcatactctgaactgtgtaagtattgtattgtagttagtatacaggaacatgaacatttgactgagcatcgtgctgaacacagaaacatcactgtatatattccttgaacatactacaccgtaactactcactctatcccaaattataagatattctattttttagatgtatctc

SEQ ID NO: 100954 - DNA, 1399 bp, Zea Mays
accacttcatacacgttcgactgcccgagagatatacgctcggccgttttctgcatcaacattcaacggtggcaggcggagcaaccgaacacgcccgccgccgccctactcccacctgcccctgtattcgttgccggcgacgagcacccactacaccaggaggaagtttcatgagagtggacagaccaatttgccaagtcatcttcactggaaacccttgcgacctggccgttttgaaaattttgtgctgcgatgcaccaagaatttgtcatgggaaacatctcttccatatgcctctgcacaggatgatgccagtatcatcaagggaacaggtgttgttgaacctattgatacagaagaagctccacagattccaatcctccagagtgatgaagatgttgtagaggtgaagaatgaaccttcttggcatcttaaggcatttaaactgccaatgtggctagtagggccttcaatcctgttggttacgggtatagttccaactttatggctgccattgtcttcagtgtttcatggtcccaacatcgctggccttctatctctagtcggacttgacttcatttttaatatgggagcaatgttgtttttccttatggctgatgcatgcgccgtcaagagaacagtatttttgacctgaaaaggcagataccaatttcctacaggttctggaatctggctgctaccatagtaggctttgtggttccatttgccctgttttttgcatctcgcaggggcactctgcagccacaactaccattcgttccatttggagtgctgcttggaccgtatcttttactcctatctgtacagatgttgactgaaatgcttacatggcactggaaatcgccggtatggttggtagctcctgtggtttatgaaggctatcgggtactacagctgatgaggggtctccagttagctgacgaaatcagtgcgcctgactggatggtgcaaagtcttcgtggcctggtatcctggtgggtactcgtccttggaatccaattgatgcgcgttgcctggttcactggactcaattttgctagaaattcaagctatggagcaagtggtgatatgaaccaataaatcatgcaagaaaaacttgaggccgaacatctttgagaacctgcaatgcttgagcaggaaccaggctgtggtaaatagtgcagtttctcttttgctggagcaggaaccaggctgctagatacttcatactctgaactgtgtaagtattgtattgtagttagtatacaggaacatgaacatttgactgagcatcgtgctgaacacagaaacatcactgtatatattccttgaacatactacaccgtaactactcactctatcccaaattataagatattctattttttagatgtatctc

SEQ ID NO: 100955 - DNA, 1454 bp, Zea Mays
accacttcatacacgttcgactgcccgagagatatacgctcggccgttttctgcatcaacattcaacggtggcaggcggagcaaccgaacacgcccgccgccgccctactcccacctgcccctgtattcgttgccggcgacgagcacccactacaccaggtaaagatttctactggcatcagttcattcaaagtttgattaacatcctataccatggcctctctgccttgttcacaaataaagttaagcaaaatacttgtcaggaggaagtttcatgagagtggacagaccaatttgccaagtcatcttcactggaaacccttgcgacctggccgttttgaaaattttgtgctgcgatgcaccaagaatttgtcatgggaaacatctcttccatatgcctctgcacaggatgatgccagtatcatcaagggaacaggtgttgttgaacctattgatacagaagaagctccacagattccaatcctccagagtgatgaagatgttgtagaggtgaagaatgaaccttcttggcatcttaaggcatttaaactgccaatgtggctagtagggccttcaatcctgttggttacgggtatagttccaactttatggctgccattgtcttcagtgtttcatggtcccaacatcgctggccttctatctctagtcggacttgacttcatttttaatatgggagcaatgttgtttttccttatggctgatgcatgcgccgtcaagagaacagtatttttgacctgaaaaggcagataccaatttcctacaggttctggaatctggctgctaccatagtaggctttgtggttccatttgccctgttttttgcatctcgcaggggcactctgcagccacaactaccattcgttccatttggagtgctgcttggaccgtatcttttactcctatctgtacagatgttgactgaaatgcttacatggcactggaaatcgccggtatggttggtagctcctgtggtttatgaaggctatcgggtactacagctgatgaggggtctccagttagctgacgaaatcagtgcgcctgactggatggtgcaaagtcttcgtggcctggtatcctggtgggtactcgtccttggaatccaattgatgcgcgttgcctggttcactggactcaattttgctagaaattcaagctatggagcaagtggtgatatgaaccaataaatcatgcaagaaaaacttgaggccgaacatctttgagaacctgcaatgcttgagcaggaaccaggctgtggtaaatagtgcagtttctcttttgctggagcaggaaccaggctgctagatacttcatactctgaactgtgtaagtattgtattgtagttagtatacaggaacatgaacatttgactgagcatcgtgctgaacacagaaacatcactgtatatattccttgaacatactacaccgtaact

SEQ ID NO: 100956 - DNA, 630 bp, Zea Mays
ctgagtgcttgtacttctactgtagcaattaacaaatttatttgttgaatatttgtttagtgatgtgtgcgatatttgtaggcactatcttgtcatacccattgatcatataccaactgtaaatagcctccgcaaaaccaaagatgatcaccagttagtgagccacatggtgaaggtggggaaagacttcctcaatcaagatgctccaaattctgaggaacacaggtttgggttccatcagcccccatttaatagtattgatcaccttcatcttcattgcctggcactgccatttatccccagttggaggcaagtaaaatatacccctctgggacctttaggggggtttatcgcagcagaaaagctattggaaagaataaaaccagaagcagaagcatacagttagcatcaatatttttactgatacctgctatccctgcttatttgcattattttgtactcttatttatgggtcaatcacaatcagtacatttatgtgagtatttactctcttccctcttctgtaatcagctgacgcgtattgtgtattgtattcactgtttggacttctcaaagactagatctgtaatgttgaactcaatgaaactaaccactctagaagttaaactg

SEQ ID NO: 100957 - DNA, 914 bp, Zea Mays
cacacggcggcatcccggaactcgccttcgactccgacagccgacacgacggcggcatcccggaccccaagccggccgccgcgtccgagagcgtcattgttgaatagatcaagtccaccccgggtcggtcggcatcctactcccacctactcccctaccaacacgcgggggaggggggacgccatgaggaagactttctgcttcgggggcagacgtgtggccaggaagatgtcggaacgggcgccgatggtcgacgggtgcgtgttctgcgagatcgtccgcggcgcccccgcctccaccaccgctctcctctactccgatgataaggtcgtggcgttccgcgacatcaacccgtcggcgttcaggcactatcttgtcatacccattgatcatataccaactgtaaatagcctccgcaaaaccaaagatgatcaccagttagtgagccacatggtgaaggtggggaaagacttcctcaatcaagatgctccaaattctgaggaacacaggtttgggttccatcagcccccatttaatagtattgatcaccttcatcttcattgcctggcactgccatttatccccagttggaggcaagtaaaatatacccctctgggacctttaggggggtttatcgcagcagaaaagctattggaaagaataaaaccagaagcagaagcatacagttagcatcaatatttttactgatacctgctatccctgcttatttgcattattttgtactcttatttatgggtcaatcacaatcagtacatttatgtgagtatttactctcttccctcttctgtaatcagctgacgcgtattgtgtattgtattcactgtttggacttctcaaagactagatctgtaatgttgaactcaatgaaactaaccactctagaagttaaactg

SEQ ID NO: 100958 - DNA, 970 bp, Zea Mays
cggcggcatcccggaactcgccttcgactccgacagccgacacgacggcggcatcccggaccccaagccggccgccgcgtccgagagcgtcattgttgaatagatcaagtccaccccgggtcggtcggcatcctactcccacctactcccctaccaacacgcgggggaggggggacgccatgaggaagactttctgcttcgggggcagacgtgtggccaggaagatgtcggaacgggcgccgatggtcgacgggatgataaggtcgtggcgttccgcgacatcaacccgtcggcgttcaggtactcgattaggagttggtgttcatttcgtttgtacagctccctgttgcttggattgatctagatgtcgcattacgggtcatcggacgaactagggcatgggttcatttcatcgaacacctggcactatcttgtcatacccattgatcatataccaactgtaaatagcctccgcaaaaccaaagatgatcaccagttagtgagccacatggtgaaggtggggaaagacttcctcaatcaagatgctccaaattctgaggaacacaggtttgggttccatcagcccccatttaatagtattgatcaccttcatcttcattgcctggcactgccatttatccccagttggaggcaagtaaaatatacccctctgggacctttaggggggtttatcgcagcagaaaagctattggaaagaataaaaccagaagcagaagcatacagttagcatcaatatttttactgatacctgctatccctgcttatttgcattattttgtactcttatttatgggtcaatcacaatcagtacatttatgtgagtatttactctcttccctcttctgtaatcagctgacgcgtattgtgtattgtattcactgtttggacttctcaaagactagatctgtaatgttgaactcaatgaaactaaccactctagaagttaaac

SEQ ID NO: 100959 - DNA, 903 bp, Zea Mays
aacacaatgaacacaatagcattaagtgggccttaactgcctgcagttcctgggctgtggaaatcacacacacggcggcatcccggaactcgccttcgactccgacagccgacacgacggcggcatcccggaccccaagccggccgccgcgtccgagagcgtcattgttgaatagatcaagtccaccccgggtcggtcggcatcctactcccacctactcccctaccaacacgcgggggaggggggacgccatgaggaagactttctgcttcgggggcagacgtgtggccaggaagatgtcggaacgggcgccgatggtcgacgggatgataaggtcgtggcgttccgcgacatcaacccgtcggcgttcaggcactatcttgtcatacccattgatcatataccaactgtaaatagcctccgcaaaaccaaagatgatcaccagttagtgagccacatggtgaaggtggggaaagacttcctcaatcaagatgctccaaattctgaggaacacaggtttgggttccatcagcccccatttaatagtattgatcaccttcatcttcattgcctggcactgccatttatccccagttggaggcaagtaaaatatacccctctgggacctttaggggggtttatcgcagcagaaaagctattggaaagaataaaaccagaagcagaagcatacagttagcatcaatatttttactgatacctgctatccctgcttatttgcattattttgtactcttatttatgggtcaatcacaatcagtacatttatgtgagtatttactctcttccctcttctgtaatcagctgacgcgtattgtgtattgtattcactgtttggacttctcaaagactagatctgtaatgttgaactcaatgaaactaacc

SEQ ID NO: 100960 - DNA, 807 bp, Zea Mays
aacacaatgaacacaatagcattaagtgggccttaactgcctgcagttcctgggctgtggaaatcacacacacggcggcatcccggaactcgccttcgactccgacagccgacacgacggcggcatcccggaccccaagccggccgccgcgtccgagagcgtcattgttgaatagatcaagtccaccccgggtcggtcggcatcctactcccacctactcccctaccaacacgcgggggaggggggacgccatgaggaagactttctgcttcgggggcagacgtgtggccaggaagatgtcggaacgggcgccgatggtcgacgggatgataaggtcgtggcgttccgcgacatcaacccgtcggcgttcaggcactatcttgtcatacccattgatcatataccaactgtaaatagcctccgcaaaaccaaagatgatcaccagttagtgagccacatggtgaaggtggggaaagacttcctcaatcaagatgctccaaattctgaggaacacaggtaaagtaagactgatactttgaatcagagatttaattgccatctaaaattatttgcgccacttcatatgacagttggaggcaagtaaaatatacccctctgggacctttaggggggtttatcgcagcagaaaagctattggaaagaataaaaccagaagcagaagcatacagttagcatcaatatttttactgatacctgctatccctgcttatttgcattattttgtactcttatttatgggtcaatcacaatcagtacatttatgtgagtatttactctcttccctct

SEQ ID NO: 100961 - DNA, 659 bp, Zea Mays
ctttaattaagtagcatgcgcgtggcggcgtctactgacgacgaacttgctactcgtgcgtatatatagagatgagatccagcgcatcaaggccagcaatcccgacatcactcacagggaagctttcagcgcggctgccaagaattgggcccatttcccacacatccatttcggcctcatgcccgatcagggtctgaagaagcaccccatgcaaactcaggagggagctgaatgcatgcttttcaaggacggtctatacgccgccgccgccgccgccacagcggcgtccagcatgggcatctctccattctgatgacttcagctccaccgcggaatggtctatagcgttctgcctctctgtgcgcgcctagccgcttagggttctgatgtctcagttccctcgttatctcccggttgcttgagtgagagatagcttcaatgtctatcccagccggagaatctcgaaatgtctctcagtacccatatatctctaatagttctcctcagtttccagcttcttactttgttaatttgttattatgcaacctctagagaggttgttatgtgtatgacgatgtgcggcctcttatctttatatggacataattcgagctggatattcggctgagctagcgtctactacgtacttcaaattttcc

SEQ ID NO: 100962 - DNA, 728 bp, Zea Mays
gtcgttagcgactagagagctagtaggctgttcatcgtcgtctactcgtctctactaactcgatccattcggttgtgtgtttccggcagcttcagagaagcggcagagagttccttccgcatacaaccgtttcatcaaagatgagatccagcgcatcaaggccagcaatcccgacatcactcacagggaagctttcagcgcggctgccaagaattgggcccatttcccacacatccatttcggcctcatgcccgatcagggtctgaagaagcaccccatgcaaactcaggagggagctgaatgcatgcttttcaaggacggtctatacgccgccgccgccgccgccacagcggcgtccagcatgggcatctctccattctgatgacttcagctccaccgcggaatggtctatagcgttctgcctctctgtgcgcgcctagccgcttagggttctgatgtctcagttccctcgttatctcccggttgcttgagtgagagatagcttcaatgtctatcccagccggagaatctcgaaatgtctctcagtacccatatatctctaatagttctcctcagtttccagcttcttactttgttaatttgttattatgcaacctctagagaggttgttatgtgtatgacgatgtgcggcctcttatctttatatggacataattcgagctggatattcggctgagctagcgtctactacgtacttcaaattttcc

SEQ ID NO: 100963 - DNA, 1325 bp, Zea Mays
cccacactcccctgcacacccaacccatccacatccactcgcccaagccggccttcgtccctgcccaacgctgcttcactctctccagcgatagatagcatcatcctctccacctgcacaggagacgacgaagcagcaccatcgtccgcggtcctttgcttcttctggcgccatgacgtcgccggtgccggagacgttcagcctgcaggaccagcagccgccgccgccgccgccagcggagcaggagcagatctgctacgtgcactgcagctactgcgacaccatcctcgcggtgggcgtgccgtgcagcagcctgttccagacggtcaccgtgcggtgcggccactgcgccaacctgctctacgtcaacctccgcgccctcctgctgccgccggcgacggcgcccgcggccgccaaccatctaccgcccttcggccaggctctcctctccccgacctcaccgcacggtctactcgatgctgagacgatgtcgtcgtcgtcgttccaagcgccgagcctgccgagcgctgaaccgccgagcgccgcctgcgtgagcggcatcacgagcatcaacaacaccgcctgcggtggcaacaacgccgcgtcggccatggcgccgccaccggccaaacctgcactgcacgagccgccgcagctgcccaggagcgcagcgtcagcgaacaagacttcagagaagcggcagagagttccttccgcatacaaccgtttcatcaaagatgagatccagcgcatcaaggccagcaatcccgacatcactcacagggaagctttcagcgcggctgccaagaattgggcccatttcccacacatccatttcggcctcatgcccgatcagggtctgaagaagcaccccatgcaaactcaggagggagctgaatgcatgcttttcaaggacggtctatacgccgccgccgccgccgccacagcggcgtccagcatgggcatctctccattctgatgacttcagctccaccgcggaatggtctatagcgttctgcctctctgtgcgcgcctagccgcttagggttctgatgtctcagttccctcgttatctcccggttgcttgagtgagagatagcttcaatgtctatcccagccggagaatctcgaaatgtctctcagtacccatatatctctaatagttctcctcagtttccagcttcttactttgttaatttgttattatgcaacctctagagaggttgttatgtgtatgacgatgtgcggcctcttatctttatatggacataattcgagctggatattcggctgagctagcgtctactacgtacttcaaattttcc

SEQ ID NO: 100964 - DNA, 2614 bp, Zea Mays
acaaaacccacaaccgccccgctcgcgacagactcgcggcgcaggcgaggggagagagctcgcggccaaagtccaccgagagcgaaagcagccgcagaggaggtagtctccatggccgccgaggcgcccgtgcgggcccctgccgcggcgcggtccgcgcgccggccggccgccgtcgtctccgcctcgcgcctcctcctcggctacggccctttcctcgcgccgcgcttcgccgccgagcgcgccgcggtggcaggccccgcggccggactctgcgcgcgcccgcgtaagccacgcctttcggtcgtcgccatggccggcaccgatcgccaagtgcctttacatgattaccgcaatattggtattatggcccatatagatgcaggaaagacaacaactactgagcgcgttctgtattacactggaaggaactacaagattggcgaagttcatgagggaacagctacgatggactggatggaacaagaacaagagagaggaataaccattacatctgcagcaacgactgccttctggaacaaacacagaatcaacattattgatactcctggccacgtcgacttcactcttgaggttgaacgtgctctgagggtgttggacggtgctatatgtctctttgacagtgttgctggggtagaaccacaatctgaaactgtgtggcgccaggcagataagtatggggttccaagaatatgtttcgtgaacaaaatggaccgccttggagctaacttctttagaactagagacatgatagttgcaaacttgggtgccaaaccgttggtgattcagttgccgattggttcggaggacaatttccaaggggttgttgatctagtcagaatgaaagctattgtatggacaggggaggagctgggtgcaaaatttgaatacagagacatacctgctgatctccaagagatggctcaggattatcacgttcaaatgctggaaactattattgaattggatgatgatgttatggagaaatatcttgaaggaaccgaaccagacgaggaaactgttaagaaattaatcagaaagggaacaatttcagccagctttgtcccagttttatgtggttcagcattcaaaaacaagggtgtccagccattgcttgatgctgttgtcgattacctgccatctccacttgatctacctccaatgaagggtactgacccagaagaccctgaaatactacttgaaaggcaaccaagtgatgatgaaccattttctgggttagctttcaagatcatgactgatccgttcgtggggtcactaacatttgttcgcatatactccgggaagctgatagctggttcatatgttctcaatgcaaataaagacaagaaagagagaatcggaaggcttcttgagatgcacgcaaacagtaaggaagatataccagttgctgtgacaggtgacatagtagcgcttgctggtctgaaagacacgattactggtgaaacactctgtgacccagacaagcctgtagtgcttgaacgtatggaattccctgaccctgtcattaaggttgctattgaacccaagaccaaagccgatgctgacaaaatggctactggcttaatcaagcttgcccaagaagacccgtcattccacttctctagagacgaggaaacgaaccagactgttatcgaaggaatgggagaactgcatcttgatatcattgtagacagactaaagagggagttcaaggttgaagcaaacgttggagctccacaagtcaactaccgtgaaagtatttccaaagttgcagaaatacaatatgtccacaaaaagcagtctggtggatccgggcagttcgcagacattcttgtgcggtttgaacctctggaagctggaagtgggtacgagttcaagagtgaaatcaagggaggggcagtgcccaaagaatatgtaccaggagtgatgaaagggttggaagagagcttacccaacggtgtcctggccggttacccagttgtggacttccgggccgtgctggttgatggctcgtatcatgatgtcgactcaagcgtcttagcgttccaaatcgcagccagaggagccttccgtgaggggatgaggaaagccggtccaaggcttctcgagcctataatgagagttgaagtgataactcctgaagagcacctgggcgatgttatcggtgatctgaactctagaagaggacaggttaacagcttcggggataagcctggtgggctcaaggtggtcgatgcttttgtgccactcgctgagatgttccagtacgtcagcaccctccgggggatgaccaaggggcgagcgtcctacacgatgcagctggccaagtttgacgtcgtcccgcagcacatccagaaccagctctccacagcaaaagcagaggaagctgctgcttagtttttcgtttccccgtagatatatccatacagtacagcgtccgcagagcaggttgataggaagcgcgtcaagttgtatccgtgtatgtagctttgtagcgtcttgaacttgaaccccgtcacggggcattatttgccattgattttggacctgtagtggacagtgaaattacatggcttcgttttcttgctcctgt

SEQ ID NO: 100965 - DNA, 1149 bp, Zea Mays
acgctccgatccccatccattcatcgacattcgagtacacacacctgcttggcctcctccagtcctcgatcgatcgatcgatcggcttgcttgcttccttggcgatacatttccatggaccttcacctcagctcccacgtccacgcggcggcggcggcgcaggcgacagcctcggccttcccgaatggtaagaaagcggagagtactgacgtgctgccaccgagggctgtcgtcaccatcgacgtcgaggcgggcgcgccgacgaacgcggccggggacgatccgcgcgacgccgacggggacgccggcggcgtcgactacatggcccgcgcgcagtggctccgggcggccgtcctgggcgcgaacgacggcctcgtgtccgtggcgtccctcatgatcggcgtcggcgccgtgagcgccacgcccaaggccatgctggtgtccggcacggcggggctcgtggcgggcgcctgcagcatggccatcggcgagttcgtctccgtgtacgcgcagtacgacatggaggtctcgcagatcaagcgcggcgatggcggcgaggaggaggaggaaggcgccgctagggacggcctgccgagcccgacgcaggccgcgctcgcgtcggcgctggcgttcgcgttcggcgcgctcctgccgctgctggcgggggtgttcgtgccgtcgtgggccgccagggtggccgcggtgtgcgccgcgactagcgtcggcctggccgcgttcggcgtggccggcgcgtacctgggcggcgccagcatgttgaggtccggcctgagggtgctcctcggcggctggttcgccatgctcctcacgttcgccgtgctccggctgttcgggacggtcttccacatacaagtctcgtcgtcggtgtgaatgtgacagctctcgtgctaatggtggcaaatggaataatggcccaggggcctctatagcttgctcttgttgacatcggaatgcgcgcgaaaacctgcatgccttgatgagtagcaaactagcggtcgcctggatagcgaaatgagttggaaaaggggtgtgtgggcgtgtggtgtggctagtggatgtactacttgattgtaatgtactatgtcgtgctaatgtatccggcgacaagatcgaaaacagattgtattacaa

SEQ ID NO: 100966 - DNA, 1327 bp, Zea Mays
cgtggcgtgcgagccctggccagacgccgcgagcggcgaggaggttgccgtgaaccgggcgtacaagcactgcttcacgctgctcaggtgagcgagaggaggagccccgcacacctccagaatatgctgccaccgccttcgccgagaagagcagacacgggggcagcaggtgctctagagtttccatctgagagtggccggttgattgggaggatggaggaacttcggctagctgatctacatgcgacctcgtcacccagacacaagggcaaggacaataaagatgaatctggcagattctctgcactctcctcatgtgattcaccacggcaagatgatctggatgatgtggattaccattttgatgttgatgatgttgataccccagtctctcaacctcgacacataattgatcttgtcaaaattctgcacatgatgagattggtgttactacgaggatttaaaaccttggcatgaaaaaggagcactagcgggaaggaaacaggtgatcaggttggttcattgccccacaaatctcaagacgcacaggtcggttatctagtcaacctgctgagaaacgcccgcccgctgcgaaatcctagcaatccatcacaaacaccaagggctcagtccaccagagtaacctcagcaagctcggtcaccacatctgacgcgctggaggtgctccagtccttcaaagagacaagggagcgactgctgtcccggagcagcgcaaaacatcaagagccaccgggaaagccataggcccattctttgctttgtttctcttaacgtgatcgctggtagacccccaaccaaccgcgaaacgggatgcacaatgagctaagcggactatagctgctgtgttcatgtacatatgactgccgaagttgatgcctttggttggagagaaggcaccggtttccatttattccagcggaaggatcactcgtcgttcttaagagtgatgccgctgttgataccccctttttttgtatatgggaagtgaaaccgatacacgtaggtgggagcgagggagcctgtgaactgtgatagatgaaagcagggcgtgtgtgtgtgctgtgtgtgtaaattatgtaactgctgggaatcaaatgtttcattggacatcaagctttgatctgggaagttgtggattggcgaactgcaggctgtagttggaaaaggaactctcggttgaattgagagttccaaattataattgaaacatagtatatgtacatcatgtattttgttttgttgttgttttaaacgatctgttgtgcaatacggattagagtctctcgccggttcgattgttgctgct

SEQ ID NO: 100967 - DNA, 2066 bp, Zea Mays
gatcggatttatgcagtcttactgccgccagctcctgccatgccgcggggcagcagcttggaccagagcctgagcgacgaggagcggtcggcaggtactggggcggtttgggtccggcgtcgccggcaatgtccgggatgtccgactccgcgggcggcgggcgtgcgggcgcagagctgatggtggagcagttccacctcaaggtgctccacgccgtgcgcacgccgcgcccgctcgccgccgccgccgctgccgcgtcgtcgtcgtcgtcgttcaggcggagggacaggtggttccatctcccgctccacgacccgccgccgcccgaggcggccggtcgcctcgacgagctggcccccgggcagccgcgtgtggtggacgtcctcctgtgtcctgccaccgccagtggtgtgggagaccgaggggaggtggtggagaggtggaccgtggcgtgcgagccctggccagacgccgcgagcggcgaggaggttgccgtgaaccgggcgtacaagcactgcttcacgctgctcaggtccgtttacgccgcgctccgcgtcctcccggcctaccgcgtcttccgcctcctctgcgccaacgcctcctacaactatgagatgggacaccacgttgacaccttcgccgagcccttctcgcgccctcaggaggccgccatgcgttcccaacgcttcgttcccgtcgaaacccagctcggtcgcctcgtcgtttccgtccactatctccccagcctcgccggcgtcgccgccttcaacctcgagatcacccccctttcgccctccatgataatcccagactacgtcggcagcccagccgctgagcccatgcgcaccttcccggcctcgcttacagaagccacgggctccggcttcccaccgtcctatgagcagcagcgtccacacagctgggcttcacctgcgttctggccgcacacgccggcacaccaggccaggttctcgccacctccagtgttttatgcgtcaccgacgccatcgcctccccactttccgcccggtctcatgaggtgggagtctgcgccaatgcccataccacaggtgagcgagaggaggagccccgcacacctccagaatatgctgccaccgccttcgccgagaagagcagacacgggggcagcaggtgctctagagtttccatctgagagtggccggttgattgggaggatggaggaacttcggctagctgatctacatgcgacctcgtcacccagacacaagggcaaggacaataaagatgaatctggcagattctctgcactctcctcatgtgattcaccacggcaagatgatctggatgatgtggattaccattttgatgttgatgatgttgataccccagtctctcaacctcggagcactagcgggaaggaaacaggtgatcaggttggttcattgccccacaaatctcaagacgcacaggtcggttatctagtcaacctgctgagaaacgcccgcccgctgcgaaatcctagcaatccatcacaaacaccaagggctcagtccaccagagtaacctcagcaagctcggtcaccacatctgacgcgctggaggtgctccagtccttcaaagagacaagggagcgactgctgtcccggagcagcgcaaaacatcaagagccaccgggaaagccataggcccattctttgctttgtttctcttaacgtgatcgctggtagacccccaaccaaccgcgaaacgggatgcacaatgagctaagcggactatagctgctgtgttcatgtacatatgactgccgaagttgatgcctttggttggagagaaggcaccggtttccatttattccagcggaaggatcactcgtcgttcttaagagtgatgccgctgttgataccccctttttttgtatatgggaagtgaaaccgatacacgtaggtgggagcgagggagcctgtgaactgtgatagatgaaagcagggcgtgtgtgtgtgctgtgtgtgtaaattatgtaactgctgggaatcaaatgtttcattggacatcaagctttgatctgggaagttgtggattggcga

SEQ ID NO: 100968 - DNA, 1481 bp, Zea Mays
gatcggatttatgcagtcttactgccgccagctcctgccatgccgcggggcagcagcttggaccagagcctgagcgacgaggagcggtcggcaggtactggggcggtttgggtccggcgtcgccggcaatgtccgggatgtccgactccgcgggcggcgggcgtgcgggcgcagagctgatggtggagcagttccacctcaaggtgctccacgccgtgcgcacgccgcgcccgctcgccgccgccgccgctgccgcgtcgtcgtcgtcgtcgttcaggcggagggacaggtggttccatctcccgctccacgacccgccgccgcccgaggcggccggtcgcctcgacgagctggcccccgggcagccgcgtgtggtggacgtcctcctgtgtcctgccaccgccagtggtgtgggagaccgaggggaggtggtggagaggtggaccgtggcgtgcgagccctggccagacgccgcgagcggcgaggaggttgccgtgaaccgggcgtacaagcactgcttcacgctgctcaggtccgtttacgccgcgctccgcgtcctcccggcctaccgcgtcttccgcctcctctgcgccaacgcctcctacaactatgagatgggacaccacgttgacaccttcgccgagcccttctcgcgccctcaggaggccgccatgcgttcccaacgcttcgttcccgtcgaaacccagctcggtcgcctcgtcgtttccgtccactatctccccagcctcgccggcgtcgccgccttcaacctcgagatcacccccctttcgccctccatgataatcccagactacgtcggcagcccagccgctgagcccatgcgcaccttcccggcctcgcttacagaagccacgggctccggcttcccaccgtcctatgagcagcagcgtccacacagctgggcttcacctgcgttctggccgcacacgccggcacaccaggccaggttctcgccacctccagtgttttatgcgtcaccgacgccatcgcctccccactttccgcccggtctcatgaggtgggagtctgcgccaatgcccataccacaggtgagcgagaggaggagccccgcacacctccagaatatgctgccaccgccttcgccgagaagagcagacacgggggcagcaggtgctctagagtttccatctgagagtggccggttgattgggaggatggaggaacttcggctagctgatctacatgcgacctcgtcacccagacacaaggtgattcatgactctatttatatgttcagctgtcatacttgtgtgaacttcaattcttcagagtgcaagattggatctttttgacgagcagggctttgacagtaggatacctgatatcctgatcaactggaatgatctgtatatatgtattgaccctgagttagtaatggaataactaatctttgttcgttcattactaaatttagtttaacagtatcatatttgacaggc

SEQ ID NO: 100969 - DNA, 1291 bp, Zea Mays
ggtggatctgcttaagaatcaaaagtcagacaaggtggacatcaccatccaaccggaggagcaggaagccatgaatgatgttctagcagccagattccagggcgattcaccgcatgctgcacgcaccaggtattttaaggggtcacacttgcttgtttcatgtactagcacaagaagagaccgtaccacttcctcgagccaaatcgccagcaatccaccatggctaaaccagaggggccaaccattggcgtgaagctgttcgtggacaaagagaagaagaaggtgctctttgctgagtccaacaaggagttcgtcgacgtgctcttcagcttcctcaccgtgccgctcggcaccatcgtccgcctgctggataagcagtctcagttgggttgtctcgaccagctgtacaagagcgtggaggacctcaacttggagtacttccaaaccaatgcttgcaaggcgatgcttctgaaaccgctcaacgcggcttccggccactgctgtcgcctcaagatcaacatcgatggaagcgttccaagggtggtctatgtctgcaaggacacgcggtgcaacgctctcagcgacaatgcgttcagttcgttccctggcacggtctgcaaatgtggtaaggtcatggagtccattggacagttcccaaaatacgatggtgacactgaaaccgccgccgccacttgttcagagggtggagtttttgtgaaaggttgcttgaagtttatcgtcactgatgatctccaggttgcgccagcatctacctctcttatgatgtttgtcttcgagaaatttggtgtgcttgatccagctgtcctagagcagcaggttctgcagttcagttcagaaaagataacatgcttgctgaagagattgttgacgtctaagtaacctctcactgatcattatttcgaagctcctgttccacaagatgatgcaagcctagaagcgcttgttcagaacttacatcctaaacaagaaaacgaggaccaggtcttgtgtaactgaatcttggaacaggttatggagctacatagggctgtcctgctgctgagtcgtaccacactcagctccgtgcttctgcatcctaagaagaccaagaagctgcaccattaccatcgtgtgtattaaagccgtcgttgttgctttactctatgattagccacaataataactatgtatgtctgttttcctgctggatttgtaagtttcattttggccactgatatttggtaactattataacagttcgagcatataataaatataaacatttgattcg

SEQ ID NO: 100970 - DNA, 306 bp, Zea Mays
ctctgttttgactcccatacaccaagaatcgagggcgcctgcatccgtgggagtaagactctccggctttgaaggaggagacaaaggccgaagggcagacacattgccttctgttcatgctgcttgatgttgaaacaccaaccactcaccagtcatttactctctcacttgctcattggatcatgtgcaccgccatagttagaaacctttatgtcatagttagagcaatgcattgggattttttttgctatgcacagaatacttgtatttggatctggcataattacaatcatcctgtcatcatca

SEQ ID NO: 100971 - DNA, 843 bp, Zea Mays
tttcattcagagtttttttcttaaaaaattatgacaaagcatatgtatatgtgatgccatcttaactgccgatcaccaccaacactctgatttcgaacaggagagaaatggttgaattgctcctgcatggatcgagagcagagtcgatcgtggaggcaatggatgtgctgctggagtacctccggagcttgcccgcagaagaacaagccccaatcgccgttctactgatgtgtttggatgcattggtatacaactttaaaccctgaatctcttcttgttgtacgcttacatttccacttccacgaaatcgtatttcgtttgctagccgcctcagacatcgcctggaatttaatagtctgcagagaactctaactgaaacgcattgcaggtggagccaaacagaaacagcacgtacagagaagaggcgatcaagaccatcgcacgttctctgagatgctgcctgtcagaggacactgccgttcccagcactcggagagctctgctgctgcttctcaggcgaccttcacgcagaggactggatgctggaacatgccggcttcgttgaccactcacgggccaccactgccacttctgatgctgttgtacacgacaaggaagcgaccgaaaacgatgcgtggctgagacacgtggctgcggcgctactcggcagccgtagcgagatcaggagaccgttcctggaggcgctgtccacgtgcctgggctcccccgacgccggcctggtgggggcgtgcctgacgatggcctggtggaggttatcagtgagaaagtagatatctgggctcttgggtgtctcttgtatagaatctgcacagaatattaact

SEQ ID NO: 100972 - DNA, 3337 bp, Zea Mays
cgacctggagatcgtggggggaggtggtggaggtcgccctcgctcatccaaccgccagtgcttgcttctagaccaacccctctctctcggcttctccgcctcaagcctcttcccaattccgctagctgctgcccatcggccgccgcgaaccgaccgaccggtgctgctccggctccgccatggccggcgccggcgccgagctgggccgccgagccgctgcgaacgctgccaacaccgcgggggcccgcatctaggctcgatggtgtaggggggactgggaactgcggagaggagaagtggaggtgagaggggcgacgacaaagagagagagagagatgggagcgattggaggcgacgcgccggtgcagtgggacaaggtggatggggccgaggtggccaatggcggcggtggaggtgctgcgggaaggctggagaagatactcgtctcggtgaggctgagaccgctcagcgacaaggagatttcaaggggggacccggcggagtgggagtgcatcaacgacactaccatcatctcccggagcaccttcccggaccggcccactgctccgactgcgtattcgttcgatagggtatttcgttctgactgtactaccaaagaagtatatgaggaagggaccaaagcagttgccctctctgtagttagtggcattaactcaagtgtttttgcatatggtcaaacaagtagtggaaaaacatacaccatgactggaataacggaatatacagcagcagatatctatgattacattgccaagcatgaagagagagcgtttgtattgaaattttcagcaatcgaaatatataacgaagttgtaagggatcttcttagtgcagaaaacacatcgcttagactttgggatgatgcagagaagggaacatatgtagagaaccttacagaggtgaccttgagggattcagaccacctgaaagaacttatttctacgtgtgaagctcaaaggaggaccggagagacatacttaaatgaaaacagctccagatcacaccaaatacttaaactgactattgaaagttctgctcatgagttcttgggtaaggacaagtcaacaacacttgttgctagtgtgaacttcgttgatttggctggaagtgaacgtgcatctcaggcattatcagctgggactaggctgaaggaaggttgtcatattaatagaagtctacttaccctaggaactgtgattcggaaactaagcaaggtaagaaatgggcacataccataccgagattcaaagctcacgcgcatattacaaccttctctaggaggcaatgcaagaacagcaattatttgtacaatgagcccagcccggagccatatggaacagtcaaggaataccttgttgtttgcaagttgtgcaaaggaagtggtgacaaatgcccaggttaatgtcgttatgtctgataaggcactggttaagcaattacaaaaagaacttgcaaggttggagagtgaattgcgatgcccagcttcatattctggtcttgaagcattagtgagagaaaaagataatcaaatccggaagatggataaagaaattaaggaactgaagttacatcgtgatcttgctcagtctagactgcaagatttgctcaaggttgttggagataaccacggttcgaagcaccccctggcttcttctgcaagaaattttacttttgatgttcctcagccatgtgaggatgagcaatcgacgacatcagaagctatcagcagtggccaaaattttaggcttcaaggacgcctgacaacacaaagagattataggtcacagcaatctgaaaatgatgtgcagtttgctacccctcttagctattcaatcagcagtcccccattcagtgggatgcctccaactaatggcagaaatgataactctcatatatctgatgaagattcagaggatctttgcaaagaagtacggtgcatagagaccaatgaaacagaagaaaatgaatgcttagagtcgtcagctgtgggaagcaatagtctgcaagattcaaatttagcttccagcatgcatgggaacgacaatacaaatcgatctgtgaattctggacggaatgatgcatcttctattaccctggaacaacatctggagaatgtcaaaaaaccgtttgccaatcctggcatggatctgggatcctctacacgtaactcgtcaagctcaaaagtaattggcagaagcaggagctgtaggtctctgatgggttctactctgttggaagacttggagaaagaagtttgcacccctccaagcagaagtttcatggactacccagggaggcccgaaacatgtcaaagaagggtacccgcactgaactacgatgcagagagtgaagctttatccagggcaggatcaatgctatctgaaattaccaccacgaggggtggactgaaggaaaacagctctgctgctggtgatacagaatttgttgctggcataggtgaatttgtcgcggagctaaaagaaatggcccagggtcataatggagaattggctgaagggaccataaggagcgtggggctggatcccattatggatatcttgcaatcaccttctcgctggcctttggaattcgagaagaaacagcaggagatcattgacctgtggcatggatgcaacgtttccttggtccacaggacttactttttcctgctgttcaaaggggacccagccgacgccatttacatggaagtggagcttaggaggttatcatttctcaagaacacatactccaacggaagcatggggtatgatatggtggcaggcagcttgagcacttctctggtttcaagtgcaaagaaactgcaacgcgagagggagatgctctgcaggcagatgcagaagcggctgacgatccaggaacgggagagcctgtacaccaagtggggagtctcgctgtcctccaagaggaggcggctgcaggtcgctcggcgcctttggacggagaccagggacctggagcatgtgagggagagcgcgtccctcgtggccagactgatcgggctcctggagcctgggaaggcgctgagggagatgtttggtctgagcttcgcgccgcagcagtccacccggaggtcgcacagtagttggcggtatggccgttcttctctagactgactgagctcgaaagacgcagctgacaaaaaaacaacaacagttattccgttgttttcgttttgtgtagtgcctgatttttttgctgtcctctcggaaaatagaaattcctgaacattttgtgaccagtctgcgagaaaatttggtagcattttcaagatttattgatgtttacaatttggaaa

SEQ ID NO: 100973 - DNA, 3352 bp, Zea Mays
cgacctggagatcgtggggggaggtggtggaggtcgccctcgctcatccaaccgccagtgcttgcttctagaccaacccctctctctcggcttctccgcctcaagcctcttcccaattccgctagctgctgcccatcggccgccgcgaaccgaccgaccggtgctgctccggctccgccatggccggcgccggcgccgagctgggccgccgagccgctgcgaacgctgccaacaccgcgggggcccgcatctaggctcgatggtgtaggggggactgggaactgcggagaggagaagtggaggtgagaggggcgacgacaaagagagagagagagatgggagcgattggaggcgacgcgccggtgcagtgggacaaggtggatggggccgaggtggccaatggcggcggtggaggtgctgcgggaaggctggagaagatactcgtctcggtgaggctgagaccgctcagcgacaaggagatttcaaggggggacccggcggagtgggagtgcatcaacgacactaccatcatctcccggagcaccttcccggaccggcccactgctccgactgcgtattcgttcgatagggtatttcgttctgactgtactaccaaagaagtatatgaggaagggaccaaagcagttgccctctctgtagttagtggcattaactcaagtgtttttgcatatggtcaaacaagtagtggaaaaacatacaccatgactggaataacggaatatacagcagcagatatctatgattacattgccaagcatgaagagagagcgtttgtattgaaattttcagcaatcgaaatatataacgaagttgtaagggatcttcttagtgcagaaaacacatcgcttagactttgggatgatgcagagaagggaacatatgtagagaaccttacagaggtgaccttgagggattcagaccacctgaaagaacttatttctacgtgtgaagctcaaaggaggaccggagagacatacttaaatgaaaacagctccagatcacaccaaatacttaaactgactattgaaagttctgctcatgagttcttgggtaaggacaagtcaacaacacttgttgctagtgtgaacttcgttgatttggctggaagtgaacgtgcatctcaggcattatcagctgggactaggctgaaggaaggttgtcatattaatagaagtctacttaccctaggaactgtgattcggaaactaagcaaggtaagaaatgggcacataccataccgagattcaaagctcacgcgcatattacaaccttctctaggaggcaatgcaagaacagcaattatttgtacaatgagcccagcccggagccatatggaacagtcaaggaataccttgttgtttgcaagttgtgcaaaggaagtggtgacaaatgcccaggttaatgtcgttatgtctgataaggcactggttaagcaattacaaaaagaacttgcaaggttggagagtgaattgcgatgcccagcttcatattctggtcttgaagcattagtgagagaaaaagataatcaaatccggaagatggataaagaaattaaggaactgaagttacatcgtgatcttgctcagtctagactgcaagatttgctcaaggttgttggagataaccacggttcgaagcaccccctggcttcttctgcaagaaattttacttttgatgttcctcagccatgtgaggatgagcaatcgacgacatcagaagctatcagcagtggccaaaattttaggcttcaaggacgcctgacaacacaaagagattataggtcacagcaatctgaaaatgatgtgcagtttgctacccctcttagctattcaatcagcagtcccccattcagtgggatgcctccaactaatggcagaaatgataactctcatatatctgatgaagattcagaggatctttgcaaagaagtacggtgcatagagaccaatgaaacagaagaaaatgaatgcttagagtcgtcagctgtgggaagcaatagtctgcaagattcaaatttagcttccagcatgcatgggaacgacaatacaaatcgatctgtgaattctggacggaatgatgcatcttctattaccctggaacaacatctggagaatgtcaaaaaaccgtttgccaatcctggcatggatctgggatcctctacacgtaactcgtcaagctcaaaagtaattggcagaagcaggagctgtaggtctctgatgggttctactctgttggaagacttggagaaagaagtttgcacccctccaagcagaagtttcatggactacccagggaggcccgaaacatgtcaaagaagggtacccgcactgaactacgatgcagagagtgaagctttatccagggcaggatcaatgctatctgaaattaccaccacgaggggtggactgaaggaaaacagctctgctgctggtgatacagaatttgttgctggcataggtgaatttgtcgcggagctaaaagaaatggcccagggtcataatggagaattggctgaagggaccataaggagcgtggggctggatcccattatggatatcttgcaatcaccttctcgctggcctttggaattcgagaagaaacagcaggagatcattgacctgtggcatggatgcaacgtttccttggtccacaggacttactttttcctgctgttcaaaggggacccagccgacgccatttacatggaagtggagcttaggaggttatcatttctcaagaacacatactccaacggaagcatggggtatgatatggtggcaggcagcttgagcacttctctggtttcaagtgacctgctgtgcagtgcaaagaaactgcaacgcgagagggagatgctctgcaggcagatgcagaagcggctgacgatccaggaacgggagagcctgtacaccaagtggggagtctcgctgtcctccaagaggaggcggctgcaggtcgctcggcgcctttggacggagaccagggacctggagcatgtgagggagagcgcgtccctcgtggccagactgatcgggctcctggagcctgggaaggcgctgagggagatgtttggtctgagcttcgcgccgcagcagtccacccggaggtcgcacagtagttggcggtatggccgttcttctctagactgactgagctcgaaagacgcagctgacaaaaaaacaacaacagttattccgttgttttcgttttgtgtagtgcctgatttttttgctgtcctctcggaaaatagaaattcctgaacattttgtgaccagtctgcgagaaaatttggtagcattttcaagatttattgatgtttacaatttggaaa

SEQ ID NO: 100974 - DNA, 101 bp, Zea Mays
cacccatggccatgggcccatggctgccgattttcagttttctctcggacggacgggttgctgtcaggcttcaccactgttgtctgctagcttagctaccc

SEQ ID NO: 100975 - DNA, 1486 bp, Zea Mays
gtgcgggaagccaaccaggccaccgccgccaaagcgcggggaagtccgacgaacgaagcagtacaagcgaacgaacctaggcaggaccggttcgctgtctcgtcccgacctcgccgcccgccctcccgcacgcctgcccatggaggcgctgtggaagcaggcctccaggctcaaggaccaggtcgctcggcagggtgtgttcaagcagtttggctatgggaattctgataatgcatttacagatgaatcagaggttaaaatgcatcagagattggaaaagctttacttatcgactcgtgctgctaaacattttcaaagagacattgttcggggcatggagggctatatagtcacaggatccaaacaagtcgaaatagggaataaattgtctgacgacagccaaaaatatggtgctgaaaacacatgtacaagtggtgatactttatccaaagctgctacatacttcgggaaggcacgctcacagatggaaaaggagcgcggcaacatgttgaatgcatttggcacacaggtctatgttcctaatgctggatttgcttcaccttgtggcagagccactgcgggcaatggtaatgggtgtgcacctttagaggatgcaagacatctggcccagagatatgacagaacgaggcaagaagctgaagcacaggctgtcgaagtatcaagacggcagaatagggtgagggagtcagctgggaatggagatatgatatcgaaattggaagccgctgagtacaagcttgaagaactgaagtcaaacatggtggcattagggaaggaagctatctcagcaatgtcagcagttgagactcagcagcaatggttgaccttacaacgtctcattgcactggttgaggctgagagaggttaccatcagagagttctggagatacttgaccagttggaaaaagaaatggtgtctgagcgccaaaaaattgaagcacccctgactccagcagctgacaattacatgccaccaccaccaccatcttatgatgaagttaacggagcgtttgcatccacttctgttaatgaatcagtccaatctgtcaatttcttccttggagaggcccttgattccttcaaagctgaaagtgagtttgagcttaccttgtcagctggtgacattgtaattgtccgaaagatttcaagcaatggttgggcagaaggtgaatgcaagggcaaagcaggatggtttcctcatgcttatatcgaaaggcgagaacatgttctagcaagcaaagttccacatatcttttaggagtttttggctggtacatcatttctattgttgggagctggaatagtatccatgttttcattttctcttacgtcgcgtatgtacttaccggctgtcatgtgcataattaaactttacttccttattttagtctggagaagattttggatgtaacatatatttgagggaccaattggacactggttgcctcgatattgtgaaatagtt

SEQ ID NO: 100976 - DNA, 321 bp, Zea Mays
aggtactttacagaggaacctactggtgtcgtttctgggcgcaacttcaaaggcatgaggaagacgccaaggttatcagggaggcctgcaggaagcttgagacgacagtgatgcagatcttcgcttttcacgggtggcagtttagtaataggatcgctctgtgagagttgtttttacttttgctgtccacccaactgcgtttggggtttgtatcgccgcttgtggctctttgagttggatctgttggtgtggtgttgtcatgacaggccgtcatcctcgtgatgtaggctgggaacactctatcccattatctaaaaaaat

SEQ ID NO: 100977 - DNA, 1784 bp, Zea Mays
gtcatcaaatcattctcagactgtggggggcgattcccgtcccgtccttccagtcggctgtctaatttgaaggttcaggcgttcagtgggcacatgcctgcgcgagagcagtagcagaggcagacagtggcttcaatgcggagcttgaactggagtggctactactcgtccttgcatagcataataacaagattagcataagatttactttaatcaggggaaccaaacacccggcaccgcaggcagtcggtagtaccgggctgtaaattaattgttcgagtactgaatcacgtgcgtgcaggcctgtcgctggagccgctgatcggggcgatagcggccgggaacgcggtggctctgaagccgtccgagctctcgccgtgcaccgccaggttcctgggcgacaacatcgggaggtacatggactcctcggcggtgaaggtcgtccagggcggccccgacgtcggagtgcagctcatggagcaccgctgggacaaggtcctcttcaccgggagcccccgcatcgcgcgcgccgtgatggccgcggcgtccaggcacctgacgcccgtcgcgctggagctgggcggcaagtgcccctgcatcttcgacgccatgggcagcgcccgggacctgcagatctcggttaaccgcatgatcgcgggcaagtggtcgtcctgcgccggacaggcctgcatcgccatcgactacgtgctcgtcgaggagcgcttcgcgcccatcctgatcaaggtgctcaagtcgacgctgaagaggttcttcccggaagcggaccacatggcacggatcgtgaacgagcgccacttcgagaggctgagtaaccttctcaaagacaggtccgtggcgccgtccgtcctgcacggcggctccatggacagcaagaacttgtacattgagcccacgatactgctgaacccgccgctggactccgcgatcatgaccgaggagatattcgggcccctgctcccgatcatcacggtcaagaacatcgaggacagcatcgccttcgtgaaggccatgccgaagcctctcgccatctacgcgttcacccgggacgccgccctgcggcggcgaatcgtggacgagacgtcgtccgggagcgtcaccttcaacgacgcggtagtgcagtacgcgatagacgggctcccgttcggcggcgtcggccagagcgggttcgggcagtaccatgggaagtactcgttcgagatgttcagccacaagaaggcggtcatgaagcggggctacctcgtggagctgacactcaggtacccgccgtgggacgagagcaaagtcaccctcatgcgctacctctaccgcttcaactacttcgccttcgtcctctctttcctcgggctcaggcgatgaacttcactccagcatcaacgcaaggatcgcacagggattgggcccaatataggcgatgaactggcattgacagtggatggaggaacaagccaatatagacaatatgcagtagatgtcttgtttgtgaggaacatgtgtcatgccgcacttcaaaaccagtaatatgctaacctgcatcctatctatgattgcctctagtgagacaaacagtgaaatgcctttcaatctttagtagtacattggtcgagaccatcatctatcctctgcataaaagtatcaagtgcaaaggaccaaaaatagatgccttgcaatctttagtagtacatttgtttgttacttggtaattatacgacctgtttggttgtatgcataaggtgacttagattgtcacatattttctggcacaa

SEQ ID NO: 100978 - DNA, 1979 bp, Zea Mays
ctctcaggcagcctctcgctgtgtcagttcttccgctttgtaattgtagaaggagagtgagctcatcatcaagtcgagacgatgggccgcaccgaggcggcggacgacggcgccgagtccggcgggctgggcctgggggtgggggtgggggtgggggagacagtgcgcgagctgcgggaggcgtacgagagcggcaggacgcggagcctagcgtggcggcaggcgcagctgcggggcctcctccggctcctcgaggagaaggaggtggaggcgttccaggcgctccacaaggacctcggcaagcaccacgccgaggcgtacagggacgaggtcggggtgctcatcaagtccgccaacggcgcgctgcagcagctcggcaaatggatggccccggagaaggtgcgggtcccgctgatcgcttggccggcgaccgcgcaggtggtgccggagccgctcggggtcgtcctcgtcttctcctgctggaacgtccccttgggcctgtcgctggagccgctgatcggggcgatagcggccgggaacgcggtggctctgaagccgtccgagctctcgccgtgcaccgccaggttcctgggcgacaacatcgggaggtacatggactcctcggcggtgaaggtcgtccagggcggccccgacgtcggagtgcagctcatggagcaccgctgggacaaggtcctcttcaccgggagcccccgcatcgcgcgcgccgtgatggccgcggcgtccaggcacctgacgcccgtcgcgctggagctgggcggcaagtgcccctgcatcttcgacgccatgggcagcgcccgggacctgcagatctcggttaaccgcatgatcgcgggcaagtggtcgtcctgcgccggacaggcctgcatcgccatcgactacgtgctcgtcgaggagcgcttcgcgcccatcctgatcaaggtgctcaagtcgacgctgaagaggttcttcccggaagcggaccacatggcacggatcgtgaacgagcgccacttcgagaggctgagtaaccttctcaaagacaggtccgtggcgccgtccgtcctgcacggcggctccatggacagcaagaacttgtacattgagcccacgatactgctgaacccgccgctggactccgcgatcatgaccgaggagatattcgggcccctgctcccgatcatcacggtcaagaacatcgaggacagcatcgccttcgtgaaggccatgccgaagcctctcgccatctacgcgttcacccgggacgccgccctgcggcggcgaatcgtggacgagacgtcgtccgggagcgtcaccttcaacgacgcggtagtgcagtacgcgatagacgggctcccgttcggcggcgtcggccagagcgggttcgggcagtaccatgggaagtactcgttcgagatgttcagccacaagaaggcggtcatgaagcggggctacctcgtggagctgacactcaggtacccgccgtgggacgagagcaaagtcaccctcatgcgctacctctaccgcttcaactacttcgccttcgtcctctctttcctcgggctcaggcgatgaacttcactccagcatcaacgcaaggatcgcacagggattgggcccaatataggcgatgaactggcattgacagtggatggaggaacaagccaatatagacaatatgcagtagatgtcttgtttgtgaggaacatgtgtcatgccgcacttcaaaaccagtaatatgctaacctgcatcctatctatgattgcctctagtgagacaaacagtgaaatgcctttcaatctttagtagtacattggtcgagaccatcatctatcctctgcataaaagtatcaagtgcaaaggaccaaaaatagatgccttgcaatctttagtagtacatttgtttgttacttggtaattatacgacctgtttggttgtatgcataaggtgacttagattgtcacatattttctggcacaa

SEQ ID NO: 100979 - DNA, 2120 bp, Zea Mays
ctctcaggcagcctctcgctgtgtcagttcttccgctttgtaattgtagaaggagagtgagctcatcatcaagtcgagacgatgggccgcaccgaggcggcggacgacggcgccgagtccggcgggctgggcctgggggtgggggtgggggtgggggagacagtgcgcgagctgcgggaggcgtacgagagcggcaggacgcggagcctagcgtggcggcaggcgcagctgcggggcctcctccggctcctcgaggagaaggaggtggaggcgttccaggcgctccacaaggacctcggcaagcaccacgccgaggcgtacagggacgaggtcgcgtcccgtcgccaataaaccatgcacaccatcgccattctccttctccttattagcctttgcctctgtttgatgtatcgatcgacattgtctcggcctctcgggtcggttcggttgggttttctctggttttgccaggtcggggtgctcatcaagtccgccaacggcgcgctgcagcagctcggcaaatggatggccccggagaaggtgcgggtcccgctgatcgcttggccggcgaccgcgcaggtggtgccggagccgctcggggtcgtcctcgtcttctcctgctggaacgtccccttgggcctgtcgctggagccgctgatcggggcgatagcggccgggaacgcggtggctctgaagccgtccgagctctcgccgtgcaccgccaggttcctgggcgacaacatcgggaggtacatggactcctcggcggtgaaggtcgtccagggcggccccgacgtcggagtgcagctcatggagcaccgctgggacaaggtcctcttcaccgggagcccccgcatcgcgcgcgccgtgatggccgcggcgtccaggcacctgacgcccgtcgcgctggagctgggcggcaagtgcccctgcatcttcgacgccatgggcagcgcccgggacctgcagatctcggttaaccgcatgatcgcgggcaagtggtcgtcctgcgccggacaggcctgcatcgccatcgactacgtgctcgtcgaggagcgcttcgcgcccatcctgatcaaggtgctcaagtcgacgctgaagaggttcttcccggaagcggaccacatggcacggatcgtgaacgagcgccacttcgagaggctgagtaaccttctcaaagacaggtccgtggcgccgtccgtcctgcacggcggctccatggacagcaagaacttgtacattgagcccacgatactgctgaacccgccgctggactccgcgatcatgaccgaggagatattcgggcccctgctcccgatcatcacggtcaagaacatcgaggacagcatcgccttcgtgaaggccatgccgaagcctctcgccatctacgcgttcacccgggacgccgccctgcggcggcgaatcgtggacgagacgtcgtccgggagcgtcaccttcaacgacgcggtagtgcagtacgcgatagacgggctcccgttcggcggcgtcggccagagcgggttcgggcagtaccatgggaagtactcgttcgagatgttcagccacaagaaggcggtcatgaagcggggctacctcgtggagctgacactcaggtacccgccgtgggacgagagcaaagtcaccctcatgcgctacctctaccgcttcaactacttcgccttcgtcctctctttcctcgggctcaggcgatgaacttcactccagcatcaacgcaaggatcgcacagggattgggcccaatataggcgatgaactggcattgacagtggatggaggaacaagccaatatagacaatatgcagtagatgtcttgtttgtgaggaacatgtgtcatgccgcacttcaaaaccagtaatatgctaacctgcatcctatctatgattgcctctagtgagacaaacagtgaaatgcctttcaatctttagtagtacattggtcgagaccatcatctatcctctgcataaaagtatcaagtgcaaaggaccaaaaatagatgccttgcaatctttagtagtacatttgtttgttacttggtaattatacgacctgtttggttgtatgcataaggtgacttagattgtcacatattttctggcacaa

SEQ ID NO: 100980 - DNA, 2503 bp, Zea Mays
tttttcttttttaaaaagcagtgtagtgacgacactaagctctaaattttagagctataaaatttaaagaacagatcagattaaaattagaccttatttataattatttttaaaataaaaattatttagaaccctattattttgtaataatcatttggatcagtatacgttgtcaccctagctacgacgcctaccgctggagaaaacattgaagcgtcatgtcagcacgcagctgcgcatgcgccagttgcaataaataggccacccaacccaacccaaacccaaggccggccgatgctctcaggcagcctctcgctgtgtcagttcttccgctttgtaattgtagaaggagagtgagctcatcatcaagtcgagacgatgggccgcaccgaggcggcggacgacggcgccgagtccggcgggctgggcctgggggtgggggtgggggtgggggagacagtgcgcgagctgcgggaggcgtacgagagcggcaggacgcggagcctagcgtggcggcaggcgcagctgcggggcctcctccggctcctcgaggagaaggaggtggaggcgttccaggcgctccacaaggacctcggcaagcaccacgccgaggcgtacagggacgaggtcgcgtcccgtcgccaataaaccatgcacaccatcgccattctccttctccttattagcctttgcctctgtttgatgtatcgatcgacattgtctcggcctctcgggtcggttcggttgggttttctctggttttgccaggtcggggtgctcatcaagtccgccaacggcgcgctgcagcagctcggcaaatggatggccccggagaaggcaagccacgggaacataatgctccagtagtccagtaatggtttcttcttcggcaaccgttgctctctgacgcctctgtgtcggcgaacgcaggtgcgggtcccgctgatcgcttggccggcgaccgcgcaggtggtgccggagccgctcggggtcgtcctcgtcttctcctgctggaacgtccccttgggcctgtcgctggagccgctgatcggggcgatagcggccgggaacgcggtggctctgaagccgtccgagctctcgccgtgcaccgccaggttcctgggcgacaacatcgggaggtacatggactcctcggcggtgaaggtcgtccagggcggccccgacgtcggagtgcagctcatggagcaccgctgggacaaggtcctcttcaccgggagcccccgcatcgcgcgcgccgtgatggccgcggcgtccaggcacctgacgcccgtcgcgctggagctgggcggcaagtgcccctgcatcttcgacgccatgggcagcgcccgggacctgcagatctcggttaaccgcatgatcgcgggcaagtggtcgtcctgcgccggacaggcctgcatcgccatcgactacgtgctcgtcgaggagcgcttcgcgcccatcctgatcaaggtgctcaagtcgacgctgaagaggttcttcccggaagcggaccacatggcacggatcgtgaacgagcgccacttcgagaggctgagtaaccttctcaaagacaggtccgtggcgccgtccgtcctgcacggcggctccatggacagcaagaacttgtacattgagcccacgatactgctgaacccgccgctggactccgcgatcatgaccgaggagatattcgggcccctgctcccgatcatcacggtcaagaacatcgaggacagcatcgccttcgtgaaggccatgccgaagcctctcgccatctacgcgttcacccgggacgccgccctgcggcggcgaatcgtggacgagacgtcgtccgggagcgtcaccttcaacgacgcggtagtgcaggtactccctcctactaggcgtaggcggcagactattgtggttcttctggtgcttgacctgtgtgtgctatctgcgtcgcagtacgcgatagacgggctcccgttcggcggcgtcggccagagcgggttcgggcagtaccatgggaagtactcgttcgagatgttcagccacaagaaggcggtcatgaagcggggctacctcgtggagctgacactcaggtacccgccgtgggacgagagcaaagtcaccctcatgcgctacctctaccgcttcaactacttcgccttcgtcctctctttcctcgggctcaggcgatgaacttcactccagcatcaacgcaaggatcgcacagggattgggcccaatataggcgatgaactggcattgacagtggatggaggaacaagccaatatagacaatatgcagtagatgtcttgtttgtgaggaacatgtgtcatgccgcacttcaaaaccagtaatatgctaacctgcatcctatctatgattgcctctagtgagacaaacagtgaaatgcctttcaatctttagtagtacattggtcgagaccatcatctatcctctgcataaaagtatcaagtgcaaaggaccaaaaatagatgccttgcaatctttagt

SEQ ID NO: 100981 - DNA, 114 bp, Zea Mays
gtgagagatgaggtagggattaaaaatcaaagctttgagatcactagatctgatagaaaacttttgtcatgcaactatgagtgttggttgaaccgggagcatcacagtactatc

SEQ ID NO: 100982 - DNA, 1392 bp, Zea Mays
catatatatgtactggctggcactgctgttcttccatctgccgcctcctctgtccaccctgtccccagcttatccaggaaggcacagccaggaacgcatcgtcactcaccagcaacacagcgattaaaggagcgagcagaggacttgttctctaccagccgcggccactcctcccacagctcgcgggcctcgagatgttcaggggctgcggcctgttcgtctgcgcccgccgggggcgcggcgacctcaggaagcgtggcgagctaggcggcgcgagctcgcgggtagcgccggccgagccggtgtgcgtggacgagtcagaggacagcggcgccgcgcggcagctggcgtgggcggaggtggaggccgccacgggtggcttctcgtccaaggtggtcggccgcggcgggttcagcacggtgtacctcgcctcgctctcctcctcctcctcgcgggctcggcgccgtcaaggtgcactgcagcagcgagcgcctgcaccgcgcgttccgccgggagctcgacgtgctcctctccctccgccacccgcacatcgtccgcctcctcggatactgcgacgagcgggacgagggcgcgctggtgttcgagtacgcgcccaacggcgacctccacgagaggctccacgggggcgcggccggcgtccaggtcctcccctgggcgcgtcgcgtggcggtcgcgttccaggtggccacggcgctggagtacctccacgagggccgcgacccggccgtcatccacggggacgtcaaggcctccaacgtcctcctcgacgccagcatggacgccaggctctgcgacttcggcttcgcccacgtcggcgtcgcggccacgatgggcggccggccctcggatcgcgccgtcatgggatccccgggctacgtcgaccctcacctcctccgctccggagtgcccaccaagaagagcgacgtgtacagcttcggcgtgctgctgctcgagctcttgacgggcaaggaggccgtctgccgcgagacagggcaccggctcacggccgcggtgaggcccaagctcagcgacggtcaattgccggacgtcctggacccgaggctgcgaggagactgcgacgtctctgaggcggcagccgtggcggagctcgccatgcagtgcgtgagtgatagccccgggctccgaccgtccatcgccgacgtggtgcgcgtgctccaggagaagacctccgccgatggatcgagattgggccgcaagatgttgtcctaagatagatgaacggcgcagattgtaaatatctccttgatggcgctagaattatgttgagggtagctagcagaagaattggtgcagtgagagcaggggcgtccatgggcctgtgcaggctgggcgaccgcacagggcccccaa

SEQ ID NO: 100983 - DNA, 222 bp, Zea Mays
atggtcggaggaacactcgccctggccggcagagcccgcgccgggccgccgtgcccgcctggacggggtcgtgcgccggttgccgcgcgctgccggggccgctgccgccgggccgccgtgcccgcctggccggggctgtgcgcccgcgccgaggccgcctgccgtcgacccgagactgcggtcgcgcccacgcctagccaaaagaggacgccgaggccgtga

SEQ ID NO: 100984 - DNA, 869 bp, Zea Mays
ggccgcggccggccctagaggtggctgctccgacggctgtacaagtgagctcgtccggctcgagtgaggaagggagcgatgaggaggggaacgagggatccggtgacggtgcgagtagcccgggcggctctgccagcaagtataaggcggcggagagtgaaggcgaggcggagggcccatgccttcctagttgccccatttgtatggtcgcgtggaccgccgatggtgcgcatcgcgtgaggtgaggaggaattgtatatgtcagcgattttgtgggtttgcggaccaacttgttgtctcgcgtggttcacaacttctaatgatcagctgatctagtaaagtgtataggttgaatacctcaaaagatatgcagaacgcacaagatattgaagggtacacgttgcacgggtactggcgaaaccacgcaagaactgaagggcaatcaaaaccagacttcccgccacgccgaagtgggactaaattactctattgaatatatataagcaaaatcaacataattaaacagaatcagcatatcatcctataaccgctcaaatatacagaaacctcacaacattgcttctggttcaaactctcaacatttgcaacaccaacccaagcttaatcccatcagaaagtatagttatataaacatttgttagaagtggaaagaaccccaggatccatgaaattcaacacagcgcttaaatagattgtctacatcgccggccaatcagtctgcattgctccggaagcagggagcagagtacctgtcccttgacacggcaaagctcgccatctatgccacagccattgtgagtgtttgcaccaggtttaagcttaactgacttcacctgtgtcagtgttaa

SEQ ID NO: 100985 - DNA, 562 bp, Zea Mays
aacctcgaaacacaactaaaaaaaaggcctcaacaagccgcgcaactctctaccatcgcgggcgcctatgaacaaataccatcgatttctgcagtatcgaaagcagtattggcactgggtgatttgcctccaaactcagaaagttgcctttacttcgatcgcgctccgaatcccgtactgcctgcctgcctgcctgcctgctggcccatcccgccgttggcgcacagcgccccgtacgttctctccatcaattccgttgagagcaccatggcatggcagcgtgcacgtacgtttcacacacacaagccttaagcctatgtgctggcatctccatttcaggccaccgcgttccactccacaagcggccaggactcccacagctccggcatggcgcagtaggagtccgggaacccgtcgccgtagtcaaggcggtggtcgtcgcactcggactccaccgaaacgtccgccggcgtcgcgcacgacccgacgagcccacagctctcttgcggctcatgtgacggcgacgcaccccaggccgagggcggcgacgttcccttgtcgt

SEQ ID NO: 100986 - DNA, 698 bp, Zea Mays
gggatactcgtttatgagtactcgacgatattattctcgacaaaaagactatctagactacattaagaatcgtacagaatcacaaagtttcctctttgcaagcagccatacatacgtacacgccattagattgtttaacctcgaaacacaactaaaaaaaaggcctcaacaagccgcgcaactctctaccatcgcgggcgcctatgaacaaataccatcgatttctgcagtatcgaaagcagtattggcactgggtgatttgcctccaaactcagaaagttgcctttacttcgatcgcgctccgaatcccgtactgcctgcctgcctgcctgcctgctggcccatcccgccgttggcgcacagcgccccgtacgttctctccatcaattccgttgagagcaccatggcatggcagcgtgcacgtacgtttcacacacacaagccttaagcctatgtgctggcatctccatttcaggccaccgcgttccactccacaagcggccaggactcccacagctccggcatggcgcagtaggagtccgggaacccgtcgccgtagtcaaggcggtggtcgtcgcactcggactccaccgaaacgtccgccggcgtcgcgcacgacccgacgagcccacagctctcttgcggctcatgtgacggcgacgcaccccaggccgagggcggcgacgttcccttgtcgt

SEQ ID NO: 100987 - DNA, 2622 bp, Zea Mays
cccacctcaacctcacctgccactgccatcctttctcacactcgcgcaccggcgcgcgtccgctgcccgcaccccgtcccgttgtactgcagggcggagcctcgctcgccttttgtactgcacgcccacgcgtccacacgcgcgcgcggcccggacctggctacgaagcgcaggcagtacagacagcaccgcctggtttgagcggctgccgccgctgcatatactccctccctgccttccagtgccaggggtgaccggcgtgcgtgccattccacgctctcgcggctcgtgtgccagcggtgaccagcgctcgtgctcgtccagtccaccaggcgctgctgttccggcaagccagccagcagcagccgccgccgccgccgtctcggagctcgagctcctagtcccccggggccgaggcgccggcgccatggaccagctccggcccgagccggccgcgggcgcgcacgagatcgagaagacggcggcgccggacgtggagtcggagcccgcggcggcggtgccggagccggagcgcgtgccgccgtggcgcgagcaggtcaccgcgcgcgggatggtggcggcgctgctcatcggcttcgtctacacggtgatcgtcatgaagctgagcctcaccacggggctcacccccaccatgaacgtctccgccgcgctgctcgccttcctggcgctccgcggatggacgcgcgccctcggccgcctaggcattgcatgccgccccttcacccgccaggagaacaccgtcgtgcagacctgcgtcgtcgcctgctacaccatagggttcggcggtgggttcgggtcgttcctgctgggcctggacaagaagacgtacgagctctccggggtgagcacgccgggcaacgtgccggggagctacagggagcctgccatcggctggatgaccggattcctcctcgccgtcagcttcgtggggctcctcaccttgcttccactcagaaaggtgctcgtcatcgactacaaactcacttatccaagtggaacagccaccgcggttctcataaacggattccacacacctcaaggagataagaatgcaaaaattcaggtccgtggattcctcaagtacttcgggatcagcttcctgtggagcttcttccagtggttctacaccgccggcgaccactgcggattcgcccagttccctactttcgggctccaggcttttaaccagacgttttccttcgacttcagcctgacgtacgttggtgctgggatgatctgctcgcacctcgtcaacctctcgttgctgttcggtgccgtcgtttcctggggcgtcatgtggccactcatcggcaagcagaagggcaactggtatccggcagatgcatctcagaatagcatgacaggcatctacgggtacaaggccttcctttgcattgcccttctcgtgggagacggtctctacaacttcgtcaaagtcatagctatcactgtcaagaacatacgcgagagatcacgtcgcaagaacctgaacagagtggcggacgcggacacgatggcgctggacgacatgcagcgcgacgaggtgttcaacagggacaacatcccgacgtggctgtcctacgcggggtacgcggcgctgagcctgatcgcggtgatcgccatcccgatcatgttccgggaggtgaggtggtactacgtggtggtggcgtacgcgctggcgccggcgctggggttctgcaacgcgtacgggaccgggctgacggacatgaacatggggtacaactacgggaaggtcgcgctgttcgtgctggcggcgtgggcggggaaggacagcggcgtggtggccgggctggtggggtgcgggctggtgaagcagctggtgctcgtgtcggccgacctgatgcacgacttcaagacggggcacctgacgctgacgtcgccgcggtcgatgctggtggggcaggccgtgggcacgctgatggggtgcgtcctggcgccgctcaccttcatgctcttctacagggcgttcgacgtgggcgagccggacgggtactggaaggccccctacgcgctcatctaccgcaacatggccatcctcggcgtggagggcttctcggcgctgcccaggcactgcctgcagctgtgcgcggggttcttcgcgttcgcggtgctggcgaacctggcgcgggacctgctgccgcgccggctcgcgcggctcgtgccgctgcccatggccatggccgtgccgttcctcgtgggcgccagcttcgccgtcgacatgtgcgtggggagcctcgtggtgttcgcgtggcacaagctcgacggcaagaaggccgcgctgctggtgccggccgtcgcctcggggctcatctgcggcgacgggatctggacgttcccgtcgtctctgctcgcgctggccaaggtcaagccgcccatctgcatgaagttcacgccagggagctagagggcgcgctgacgatgcgtacagaacagagggcatcgttcgtcgtttgtggggtggaatccgtgtagtagaattacataccaaccaggcctgttctaatgtccatatgagcttaatgtacggtgtatatatatgtaaaaatggaaatctgaaggatgacaggatgaattgcctgt

SEQ ID NO: 100988 - DNA, 3157 bp, Zea Mays
cccacctcaacctcacctgccactgccatcctttctcacactcgcgcaccggcgcgcgtccgctgcccgcaccccgtcccgttgtactgcagggcggagcctcgctcgccttttgtactgcacgcccacgcgtccacacgcgcgcgcggcccggacctggctacgaagcgcaggcagtacagacagcaccgcctggtttgagcggctgccgccgctgcatatactccctccctgccttccagtgccaggggtgaccggcgtgcgtgccattccacgctctcgcggctcgtgtgccagcggtgaccagcgctcgtgctcgtccagtccaccaggcgctgctgttccggcaagccagccaggtgagggatccagatcggcctctgcgtgccatgcgtggtctccgctctccagcccgcgtcgagaaattcgatcctttttggctcggttctggctgtcctgtgcgtcagttctgcgtttccgtgtctgttatcgtcatagtccgttctgttttttttttccttctgtttcccacacctgtgttcctgttcctgtcctgctggagtgatttatggcatcgtttgcgtggttttcaattcaggattggatattttccgccaatcggattctggtgacatatacgttagcgtttgaggatccccatttgggaaatttcggtttccattgcaaaactgaataaaaaatatatccaagagaagaaagaaggccaaaggttatggatttttaataatccgagatccatccgacaactcacgcgcctctgcatctgtccaagtccaatgcacgagcacatggatggcgtagtggcatggtctggttctttttttttttgtgtgaacaaacaaatgaactcacatctacgcctccatactgcagcagcagccgccgccgccgccgtctcggagctcgagctcctagtcccccggggccgaggcgccggcgccatggaccagctccggcccgagccggccgcgggcgcgcacgagatcgagaagacggcggcgccggacgtggagtcggagcccgcggcggcggtgccggagccggagcgcgtgccgccgtggcgcgagcaggtcaccgcgcgcgggatggtggcggcgctgctcatcggcttcgtctacacggtgatcgtcatgaagctgagcctcaccacggggctcacccccaccatgaacgtctccgccgcgctgctcgccttcctggcgctccgcggatggacgcgcgccctcggccgcctaggcattgcatgccgccccttcacccgccaggagaacaccgtcgtgcagacctgcgtcgtcgcctgctacaccatagggttcggcggtgggttcgggtcgttcctgctgggcctggacaagaagacgtacgagctctccggggtgagcacgccgggcaacgtgccggggagctacagggagcctgccatcggctggatgaccggattcctcctcgccgtcagcttcgtggggctcctcaccttgcttccactcagaaaggtgctcgtcatcgactacaaactcacttatccaagtggaacagccaccgcggttctcataaacggattccacacacctcaaggagataagaatgcaaaaattcaggtccgtggattcctcaagtacttcgggatcagcttcctgtggagcttcttccagtggttctacaccgccggcgaccactgcggattcgcccagttccctactttcgggctccaggcttttaaccagacgttttccttcgacttcagcctgacgtacgttggtgctgggatgatctgctcgcacctcgtcaacctctcgttgctgttcggtgccgtcgtttcctggggcgtcatgtggccactcatcggcaagcagaagggcaactggtatccggcagatgcatctcagaatagcatgacaggcatctacgggtacaaggccttcctttgcattgcccttctcgtgggagacggtctctacaacttcgtcaaagtcatagctatcactgtcaagaacatacgcgagagatcacgtcgcaagaacctgaacagagtggcggacgcggacacgatggcgctggacgacatgcagcgcgacgaggtgttcaacagggacaacatcccgacgtggctgtcctacgcggggtacgcggcgctgagcctgatcgcggtgatcgccatcccgatcatgttccgggaggtgaggtggtactacgtggtggtggcgtacgcgctggcgccggcgctggggttctgcaacgcgtacgggaccgggctgacggacatgaacatggggtacaactacgggaaggtcgcgctgttcgtgctggcggcgtgggcggggaaggacagcggcgtggtggccgggctggtggggtgcgggctggtgaagcagctggtgctcgtgtcggccgacctgatgcacgacttcaagacggggcacctgacgctgacgtcgccgcggtcgatgctggtggggcaggccgtgggcacgctgatggggtgcgtcctggcgccgctcaccttcatgctcttctacagggcgttcgacgtgggcgagccggacgggtactggaaggccccctacgcgctcatctaccgcaacatggccatcctcggcgtggagggcttctcggcgctgcccaggcactgcctgcagctgtgcgcggggttcttcgcgttcgcggtgctggcgaacctggcgcgggacctgctgccgcgccggctcgcgcggctcgtgccgctgcccatggccatggccgtgccgttcctcgtgggcgccagcttcgccgtcgacatgtgcgtggggagcctcgtggtgttcgcgtggcacaagctcgacggcaagaaggccgcgctgctggtgccggccgtcgcctcggggctcatctgcggcgacgggatctggacgttcccgtcgtctctgctcgcgctggccaaggtcaagccgcccatctgcatgaagttcacgccagggagctagagggcgcgctgacgatgcgtacagaacagagggcatcgttcgtcgtttgtggggtggaatccgtgtagtagaattacataccaaccaggcctgttctaatgtccatatgagcttaatgtacggtgtatatatatgtaaaaatggaaatctgaaggatgacaggatgaattgcctgt

SEQ ID NO: 100989 - DNA, 585 bp, Zea Mays
aacacctcccctgcgttgctttaggcacacactcgtcgttcccatgttgtgcgctcctctttgaccaccaacacctaattcctcaccttgagtcctcgacctttaccgcaacctcctagatgagcgctgggacgggtacgacatggccgcatgggcaccgcagtcggggtgtgggcgaggccacattgcgacgacaattgtgtggggaaaatggtgggctggtaataacaacaaaggaggctccgtcatccttaggatccataattgtcgcaccatcttcactgcacattagctacaaggtgcaagcaagaataaagatatggcttcgttgacacttgttcttaaagtttggcatggatgtcaaggatcattctgcttgtttcaacaatcataggagtgagcataacttgtcagataccctcccgcattaagcttgtgacacacttctaaaattgtttaacaacacttgtacttatatgcggaagatgtaaacattattgtttgtcttggctttccaaaaccctaaattgttatgctttgaacaatggatgtgaatgaagtaccatttaccaaacacaaaaagaa

SEQ ID NO: 100990 - DNA, 1988 bp, Zea Mays
gttttttcagtccttttctgttcagttcttaaccacttgtagttgcctatttggtaatgtttaagttcccatgaccgatctggcagtgcagttaaatttatgggttcttttagagccatggattagattaatgtacgttgtccacaaactcttaacaccgacaaactatccttcaagaggcgctaggcaaggaggtgagtaatacctattacctcgtgctccatccaaatcccaaaagtgtaactcctctacagctagcaccaacacatgattgttttgtgcaaatgtttaggtgtgttaaatgattatgagcaatagtctgatttgatggttgagttattttcagatattaagatagtttaccttttaacgttatcaacacattgatatgctacatgatctctgtccgtgcaatcttttgatatgttacagaatgcactattcctaattgcttagttgaagcatcctgcagatcaaggtagaggatatggatgcgtatgcccctaaagatcttttggttgtcactacaggttcacaaggagagccacgtgcagctttgaatcttgcatcttatgggggaagtcacactcttaaactatcaaaagaggatgtccttctttattcagctaaggttattcctggaaatgagacacgggtaatgaagatgatgaatcgtctcactgatcttggcccaaaaattatcatgggtaaagattctggcctgcatacctctgggcatgcctaccgagaggagctggaggaagttcttcggattgttaaaccacaacatttcttgcctgttcatggagaactcctatttctcaaagaacatgaatcacttggaagatcaactggcatacggcacacaactgtaataaaaaatggagaaatgcttggtgtatcgcatctaagaaacagaagagttttgtccaatgggtttgtttcattagggaaggaggatctttagcatggagatcttccgacctcagaaggaacatggtttagcgcagactggtttgaaaggaaaatttaagattactacaagatgtctatggcttgataatggaagattgttggacgcactctacaaagcagctcatgctgcattgttaagttgtcctatgaattgtccacttagtcacatggagaggatggtagctgaaatcttgaggaaaatggtacggaagtatagtgagaagaggcctgatgtcattgcggttgctatggagaacaccacagcaagtttctcagaacacctcgatgctaaatcatctggaaattttgaaccttcctcagctactagccatctgagcaggagtccagctatgagtcttgaaggcagttataaaacacacccagacaacccagaggtggatgctgaagaagcccttcctgaggccacgagaacagcactggatgatgcaaccacactgttatgcatctatcatgcataatggataatatccgatgttatgtttctttcaccagtggaaatttgctcatgttacattcagtaagccggaatacctccaagatttagatattgtaatgaacagattccataaacagagacctgtttatggaggttgggaacaacaccttggattggagcatacaaccactaccccaaaaaggtcctacttaggcaacaaccagaaccaccattcttttgagaagcctatgaagatttacaactaaagctgggaatactttttacaagtgatgaatggatatgaaggcagccttgttccaaaagcagtcttttggtgatgtacatagagcttttgcatagagtagtttatgtggcagttatctcaagaattttcatctggtggatgtacagggttcgtatagcaacatttccttgtagaaagttgaagttgtatatcgagggtggatttacctgtgtttatcttttcgaccctaagcctctgggaagctgtgaaccatagcctcatgaaatatgcctgttgttgattcagtgtttg

SEQ ID NO: 100991 - DNA, 2344 bp, Zea Mays
gttttttcagtccttttctgttcagttcttaaccacttgtagttgcctatttggtaatgtttaagttcccatgaccgatctggcagtgcagttaaatttatgggttcttttagagccatggattagattaatgtacgttgtccacaaactcttaacaccgacaaactatccttcaagaggcgctaggcaaggaggtgagtaatacctattacctcgtgctccatccaaatcccaaaagtgtaactcctctacagctagcaccaacacatgattgttttgtgcaaatgtttaggtgtgttaaatgattatgagcaatagtctgatttgatggttgagttattttcagatattaagatagtttaccttttaacgttatcaacacattgatatgctacatgatctctgtccgtgcaatcttttgatatgttacagaatgcactattcctaattgcttagttgaagcatcctgcagatcaaggtagaggatatggatgcgtatgcccctaaagatcttttggttgtcactacaggttcacaaggagagccacgtgcagctttgaatcttgcatcttatgggggaagtcacactcttaaactatcaaaagaggatgtccttctttattcagctaaggttattcctggaaatgagacacgggtaatgaagatgatgaatcgtctcactgatcttggcccaaaaattatcatgggtaaagattctggcctgcatacctctgggcatgcctaccgagaggagctggaggaagttcttcggattgttaaaccacaacatttcttgcctgttcatggagaactcctatttctcaaagaacatgaatcacttggaagatcaactggcatacggcacacaactgtaataaaaaatggagaaatgcttggtgtatcgcatctaagaaacagaagagttttgtccaatgggtttgtttcattagggaaggaggatctttaggtgaaccatttattttacacgtcgtttttttatgtcttttgcagttatgatatctaacatgatatatgatattacagctcatgtatagtgatggtgataaggcttttggtacatccactgatctctgcattgacgagagactaagaatcgcatctgatggcattatttttgtcaagtagcttcttgtacagttttggagtattttctaggtttatcttcagcaaaaatttctcctcgcatgtgaaatgatagtgatttatgtcgaaccttgtgatagtcaaaatggtaaaccatatatagtattgttcggtgcacctaaacattttacatgttactcctttgcagcatggagatcttccgacctcagaaggaacatggtttagcgcagactggtttgaaaggaaaatttaagattactacaagatgtctatggcttgataatggaagattgttggacgcactctacaaagcagctcatgctgcattgttaagttgtcctatgaattgtccacttagtcacatggagaggatggtagctgaaatcttgaggaaaatggtacggaagtatagtgagaagaggcctgatgtcattgcggttgctatggagaacaccacagcaagtttctcagaacacctcgatgctaaatcatctggaaattttgaaccttcctcagctactagccatctgagcaggagtccagctatgagtcttgaaggcagttataaaacacacccagacaacccagaggtggatgctgaagaagcccttcctgaggccacgagaacagcactggatgatgcaaccacactgttatgcatctatcatgcataatggataatatccgatgttatgtttctttcaccagtggaaatttgctcatgttacattcagtaagccggaatacctccaagatttagatattgtaatgaacagattccataaacagagacctgtttatggaggttgggaacaacaccttggattggagcatacaaccactaccccaaaaaggtcctacttaggcaacaaccagagcaattacagaaccaccattcttttgagaagcctatgaagatttacaactaaagctgggaatactttttacaagtgatgaatggatatgaaggcagccttgttccaaaagcagtcttttggtgatgtacatagagcttttgcatagagtagtttatgtggcagttatctcaagaattttcatctggtggatgtacagggttcgtatagcaacatttccttgtagaaagttgaagttgtatatcgagggtggatttacctgtgtttatcttttcgaccctaagcctctgggaagctgtgaaccatagcctcatgaaatatgcctgttgttgattcagtgtttg

SEQ ID NO: 100992 - DNA, 1361 bp, Zea Mays
gttttaaggcattctaaacttagctctggacctcagttttcaaaactgcggtattataaactacggtattgtcataactaaagtatagtatagtatttcaaaaactgtggttttcaaaaactttgttcccaaacagggcctaagaagcaagagtcggctgccacagcgagaggggctgccaagaagcccgctggcaaagcggctgcccctttcgccgtgtactttgtgccatcccgtgaacccattcccgcgctccccttcgctactccagcagcccagcaggtcccccttcttctccccaatctcttcgcgtcccgcatccagtagcgttggtcgcgcaaaacaactgagaagagctgctgcgccagcaggaaagggagaacatggtggggaagaagaggggtattatctccccgctggaccatctcgctgggctgctggaggtgcgcgtggtgaggggagtggacctcgccatctgcgacctccgatccagcgacccctacgtcgtccttcgcatcggcaaggcgctggtccgcttctcctcccctcccttttggtttgctttgctgctggtaggttttatcggcaagagttccggcgaattccgttcgaatcgatccccggtctacaacacaaatgacgactaatatgctatatagctgtttggattttttttaaaattttattttccctgttcagagttgcctgccctattgagttgtctgtctcttctcacacttgcgtgcgccggctaaccgtgattgtttttccaatgtttcacagaaagtgaagacgcgagtggtcaagaagagcatcaatccggaatggaacgaagacctcaccctctcccgtggatgtgcgtccttggttccattgaaattcttttcagcagacattgtcccatatggtatggctatggaggacagcttaaattcctggagatatttgcttagattaacaaaacaatttatccactcacatcaatcccactcctcctgtactgcatattgctagcaattctagattatttgtggtatttctgcacatttatttgctgtcttccagggtatcctaaatatgcttactggtatcgacacaagcttcactgtcacctctaaggccactgatgaagaaggtgattttgctgtttgatttcatttattaagaactggtgatccattaacactaaaaattagctagccaatggttgctgatttttaactagctaatttttagctacctaatatttagctacctaatatacaatggagcactttcaggaagtatttaggggatcgtcgcagcagcgtgagctggaactacaagtaacaactcttaaacaacagctccaagaagctgag

SEQ ID NO: 100993 - DNA, 86 bp, Zea Mays
tacatcgataatcacagaaaagtgtgtttctgaatactgcaaaagtcatctgagtagccttttcatgaaattacatattgatcttt

SEQ ID NO: 100994 - DNA, 490 bp, Zea Mays
aaacaatggctgtcatacataattgtattgaaagttcaaggaccacgcatgatggaatgcgggagtaaagccgaacatcatggagcgaatccatgctttcaactcagcatgcctcatcgagtcaaggtacatacctcagttttatttcttaatgcacacctcaaatggtagcccaattgtcgaacagcacagtgagccaaggattggatgccagcatactaaggaccacactctgatggtgagtccgagatagtactaagtggatagtggtgccttcatctgcaccaaatccgctgagaaaaaacaaaactattagattgcagttctgaaccaataaataatgaactacatggaaaacttaagtacccatgtatttttctcaccagataagaagattctgaagaataacaaaactgtagaaggccatggaatacctatagttccaaaattgtcattcaaagtagctaaacttgcagatttgcagaaagct

SEQ ID NO: 100995 - DNA, 1701 bp, Zea Mays
atggcgcttcgcgacgtgctgctgtccatagcgcagacgccgcaccggctgcgcaggagggcgctggtgacgtggacgccgacgcaggagctgaacgaggtgcgggaccggtccggggcgcgcatgaagcggcggctggagtggtacgacctcgtggggctcggcgtgggcggcatgctcggcgcgggcgtcttcgtcaccacggggagggtggcgcgcgacaccgcggggcccgccgtcttcgcgtcctacgtcgtcgccggcgtctccgcgctgctgtcgtccttgtgctacgccgagttctccgtgcgcgtccccgtcgccggcggcgccttcagctacctcagagtaacgttcgctagctacatcttgtcaggcgagttcgtggggttcttcggcggagcgaacattctgatggagtacgtgctgtcaaacgcggcggtggcgaggagcttcacggactacctggcatcgacgttcggggtcacggagcgcaacgcgtggaggatcgtcgtcgacggcatcgccgacgggtacaatgagctggacgtgccggccgtcgcgctcatccttctcataaccgtatgcctgtgctatagcaccaaggagagctcgatgctgaacatggtgctcacggtgttccacctgctcttcttcgccttcatcgtcgctgccggcctgtggaacggcagcgcgaggaacctcgtgcggccgcacgggctggccccctacggcgtccgcggcgtcctggacggcgccgccgtcgtctacttcagctacataggctacgactcggcgtgcaccatggccgaagagatccgggacccctcccgcgcgctccccgtcggcatcgccggctcggtgctcgtcgtgtccgggctctactgcctcatgtccgtcgccctctgcgtaatgctgccctacaccgagatatcggaagccgccccgttctcgtcggcgttcagggagaaggtggggtggaggtgggcgagcagcgtggttggcgccggcgcgagcatcggcatcgtggcgtcgctgatggtggcgatgctggggcaggccaggtacctgtgcgtcatcgccagagcgcgtctcgtgccgttgtggttcgccaaggtccacccttccacaggcacccccatgaacgccaccatctttctagggttctgcactgcatcattagcactcttcacggagctgcaaatagtgttcgagatgatatccatcggaaccctgctggtcttctacttggtcgccaatgcactaatctaccaccggtacgtgaaggtcggcacaaaccggcccctgcatgtcctcctcttcctgctgctcctcaccctgagctctctcggcttctccctctcgaggaagatcgatgggtggtgccagtgggggatgacactgttcggcgcagtctccatagcaatcaccaccatcttccactgcacagcacggcaggacatcgccggaccctcgttggagtggtcggttcctctgatgccatggcctgccgctgcatctgtcttcctgaatgtgttcctgataaccactctcaaggtgagatcataccagaggttcggcatctggagccttgtgaccatagttttctatgtctgctatggggtgcactccacatactctgcagaagaaaatgagattgtcaatgcaatgatccatcatgcaaatttggacatatcttag

SEQ ID NO: 100996 - DNA, 1226 bp, Zea Mays
ttctcccacccgaacaacagcaggagaccggtattccgcatccctacccagcaatggtggacgcggggcaagcggcgaagcgggggaaggccacggatgagaaggggcagccgtcggcggccgcgcggacgcctcgccaacacacgccggatcacccaccctattgctggatgatcggcgaggcaattgacgagctggctgaggacggcggctcggaggaggactccatctcggccttcatccgcgccaggcaccctggcgtgccccccgcgcacgataggttcctccggcactacctcggcaagcacgtcgccgagggattcttcctgcgaaacgctgcggggcggttcgagcgcaaccccgaggagaacgcagccgaggagctcccggtggagcagactgaggccggctcgtgcaacccggcttccgttgggtctttggtggtagatgccaagcatggccggggcaggccgccgaaggatggctatccttcgacaccgcctgaaggcaggaaggatggcggcgcgggtgctcagtggatgacaccacatgcaggttcttcttccacactagccgctgctgccaagggttctgttctaatgtcaccggttgctgctgcagacaaggacgaaagccgagcaccatccttgaagcccaagcgccgtcgccggcttcgcaggcaggggatggccacgaccgctgacagctccggcgaagcactcgtcgcaggcaagaaagatagcagggaggagcatgagccaccgcgtgagctggcactggtgatcctcgatgatagctccaacacaccaaccatggacaaggcatgcaccaaggtccctccaaccacgcgacctgtggatggtgggcagcctctcgatctgtcagctacacccaagggacgtcgccggcaacgcaaatcagtcgcggtggctactggtggccgctctgctcttacacctggcaagaagctaggttgtaaggtctcatctgcatcgcccaagtttgcaccggtggttgccgctggctgtcgtactccggcttcagttgctgaccagggcggcaggaaagcatcagcgacgctgaagcggcacgggcggcctcgcaaactgtacccagttagcgctgacgagatttcagatgatccagagattgctttgctcgcgttgccttctccagacactagcggcgtcatacccgtagctccaaaacttggctacctgacctga

SEQ ID NO: 100997 - DNA, 431 bp, Zea Mays
gaccacaactacatatgaactgttcaggtctccggcaaccaaatccaatagcccagatctccgatttgatgcaggacaagatttgtaatcagtttcttctgaacactttgtaatcagggaaaaaaggatttgcatctgatacattaccttacctcgtactcccgctgtttctttttagttgtcgctggatagtgcaaaattaaactatccagcgacaactaaaataaaacagagaaagtaatatgctgatgaatttccatgtggatactggagaacctaatgatgcgttggcaattattgatgagacgaaggaaagacatgtttcttttgacgtttgcacttacaacatttggatacaagatgctgaagaaatggagcgagtatttgctagatgattggtgaagagtctgatgttgccaattggactactt

SEQ ID NO: 100998 - DNA, 2289 bp, Zea Mays
tcgttcctctattatttctccacccctttccccccgtctctctctcctcacccctctctctctaaaagactgaaaacaatagaaaggaacaaggggggaagaacaccaaccaagcaggacttggtttttgggaactccatgggctgtggaattgtccccaggaatcccctctgggtttgacgagattcatacagatacatatatttaattttttcccctttcgtttgctcaaaaaatcaattgtacaggcgaaactgcttgtttgtgctttgtttcttccgtgtttgtttccttgggattttcctctggtccgttcttcttcacctgtggggtgggaggagcagagacaatcatgggaaagcaaggaccctgccgtcattgcggagtcacaagtactccgctgtggcggaatgggccaccagataagccggtgctctgcaatgcgtgtggctcgaggtggagaacgaagggttcattggcaaactacactccaatgcatcgcaatgacaatattgatgatgatgaacccagagttagcaagctgaagccaccgacgtcaaagttgaagtcacagaagaaaaaaacaaatcacattataatggagaatggaccattctctggtcagaatttccgaaagatgggggatgttgacccaagctatcggtctagttcaggatctgcagtatcatactctgagagttgtgccccatatggtgctgctgatgcaagtgaaatgactggttcagcacagtcacatgcttgggagtccctagtgccatcaagaaagaggagctgtgtcacccgtccgaagccttcacctgttgaaaagcttgcaaaagagctgaactatatcatgcatgaagagaagttatattacctttcagaatcatcagaggaagacctactataccatagtgaaactcctatcggttcctttgaaataggctctggaagtgtgcttctaagacatccaaactcgaaatcactggaggaagaatcaaaaacaagctcaattcctgcagataataaatcatatattacaagtgaatcctattcagactctgcctcatttgtcgttcacagtggaaacaaggcagcaattaacttaaatcttccaactgcaaggccgaagaagtcgccgctgcatatggaagacaatgctagaagggataaacttcattatgagaatcagcatgtcctggagagtgttgattcgcctttagtttcagtagatttagaggatgttataaactatactaacttcatgaaatatctaactaaagaggatcgacgtcagttgctcaaatttcttcctcctgtggactccttaacacctcctgaaagccttagaagcatgttcagttgtatccaattctctgatgctattgacagctaccagatgctgcttcgagagggaattctcgacccatccttatgtggtgatgaggaatggaagaaagtgaagacgcttgccttaactaatttaacaaaatgcagttggctggagtgctataaacagaaaaagggagctaaagaaaccgggggagtggggggcatcagtggaccggaaggctttaccaagtctactatgaaaccactcaaaagaccccgtgacacccactttcagagtgacgcagaactagatggtaccatgaggagtcctctaagagttctaaaatccggggctttggctcttcagtttgaaagttcatctttgccaaaatctggctatgccaccgaagattcaacctgcactggaggagcacctaatctattcatgttacccctagaaaagctaccattactggtcccttctcagtatgccgtctctgatcaagacttgctgctggaaatacctctcaacgcacgacacccagaggcagaacttctctgtcaaccatctcagctgatgagctctataaccagcagctccacctctatgggtggggttgctgaaggagaagggtacctgaagcaaccatagtcttaggtcacatcagcaagcagcttaggaacagccagtagttgcagtttactttaacctcctggatcgtgtcgcctctctgtgccgatcaccaatgggccttaagtgtccttatttacataacaatgtgcttcgtatgccaacttggcgaattgtcggttcagctaatatttgtagcatgcttttggatcggctttctgctggttttctgtaacatatggcgcatggagaaagcattaacttatctctgtatggaaaaaaaatatcaccatattgtaggaaaatgaaaaaagaggataatggag

SEQ ID NO: 100999 - DNA, 174 bp, Zea Mays
atggaggacatggcggcccggcgcgcgtgcggcggcttcctggcggtcggaggcgctggcgcgacacctgggtcggagtggccggactgctcggtgaaagaacccaaggtgtttgcacctgggaacttgagagaccctgacattctttcactgaattggcctggttgtccttga

SEQ ID NO: 101000 - DNA, 593 bp, Zea Mays
cccaacaaggcctgccactaactccgcgcacgcaacggcgaggtcgacgccgccggtcggcgatcgcgcactctgtctctgccggagtgccgccgtgctggatcttccgcccggcgctcctcagtcgaccttccgctcccgcccatggcacgaccctaagcccgccgctgtcggtggcggcggctggctctcagagtgggggtgggaccttatgctcggatcgatcgccgcgttctacgccgtcatggcgccctacaccaaggtggaggagagcttcaacgtgcaggccatgcatgatattctttatcacacttatcacatcgagatgtatgtcatttagaatttcctggagttgttcttcgaacattcatagaccttgtagtcttgatgtgaaattatggcagtaacatgatgtaccgactactgtctgcatttttcaggagcatttgttatctctattctctcatcaccgctagactaacattgagttgtgttactttgacgagtttgagacttctcagagctcagatactctaaggaggagcaaattcccgttgaagaatttgagagaaggaatttcacctatctactga

SEQ ID NO: 101001 - DNA, 1462 bp, Zea Mays
cgcggggacggaagccaggccaaactagagaagcgccaagttgccagccaaacgaacaaagctaaaacagggcgggggcgtcccttcgtggggacagccctcgtggtcgatccgcccgtgggatctcgcgcacgccaggattggagagctgcggcctccctccgccccaaccagccatgggttcccgcgttgattgcggcgcttagacgcggaggaggagagagacacggggagggggggaggccgaggcctaggaggcgtagcgctgtgcagggcgcgagcgcgttcgttcggcatggaacagaacgccggctcgttcctcgccgtgcgtcgcctctccggtggcgccatccaccaccatcgtcaccactcttccccggctgaggtcgtgggcgtgtccactgcgtggctcggtaaggggctttcatgcgtctgcgcgcagaggagggagagcgacgtgcgcctgtccttcgatttgagtcccattcaggaagagtgcttgaataggttgcagaaccggatagaggtgcagtatgatggttcaaatctggagcatcagaaagcactggaagccctttggcgttcttcttttcctggaactgaacttctagggttagtatcagaccagtggaaggagatgggatggcaagggaaagatccatctacagatttcaggggcggtggttttatatctttggagaatttactgtatttctctaggaactatccaaaatccttccaggagctccttcgtaagcagaatggtgatagagcattgtgggaatatccctttgctgtagctggtgtaaatattacattcatgctgattcagatgcttgaccttcaagcagctaagccaacgtcgttggttggagcggttttcctaaatctactcttagaaaatgatcgagcgttcgacattctttactgcataaccttcaaactgatggatcagaaatggcttgaaatgcacgccagttacatggatttcaatacggttattaaatcaacacggcgccagctcgagagggagctgttgctagaagatatccagagaatcgaggacatgccatcgtacaggtttctcgcctgctagcaattgaacctcctggtcgtaccgaacattgccacaagatagtgcagctccatacactcgaagaagaagctgagaggttggaaccacgtacaccgagcgaagggtgaatctaggttcatggactgtggatgtgttgttgctttgaattgcgctgtcgtgtttacctactccgagtccgacaacagcctcgacgccgagtgccttttcgtttcaacgatgtgctatatcttggggccacggaacggcagatcctagctttctttgtaaacaagaggatgtggaaagttggctgcgtatgctttgtggccatgtgcatggataatcttgctgctcgcctgaaagaaaaaaaggccgatcttaagactg

SEQ ID NO: 101002 - DNA, 1570 bp, Zea Mays
cgcggggacggaagccaggccaaactagagaagcgccaagttgccagccaaacgaacaaagctaaaacagggcgggggcgtcccttcgtggggacagccctcgtggtcgatccgcccgtgggatctcgcgcacgccaggattggagagctgcggcctccctccgccccaaccagccatgggttcccgcgttgattgcggcgcttagacgcggaggaggagagagacacggggagggggggaggccgaggcctaggaggcgtagcgctgtgcagggcgcgagcgcgttcgttcggcatggaacagaacgccggctcgttcctcgccgtgcgtcgcctctccggtggcgccatccaccaccatcgtcaccactcttccccggctgaggtcgtgggcgtgtccactgcgtggctcggtaaggggctttcatgcgtctgcgcgcagaggagggagagcgacgtgcgcctgtccttcgatttgagtcccattcaggaagagtgcttgaataggttgcagaaccggatagaggtgcagtatgatggttcaaatctggagcatcagaaagcactggaagccctttggcgttcttcttttcctggaactgaacttctagggttagtatcagaccagtggaaggagatgggatggcaagggaaagatccatctacagatttcaggggcggtggttttatatctttggagaatttactgtatttctctaggaactatccaaaatccttccaggagctccttcgtaagcagaatggtgatagagcattgtgggaatatccctttgctgtagctggtgtaaatattacattcatgctgattcagatgcttgaccttcaagcaggttctcttcaaacttttcagcatttattagttgatctgaactgtgaaactagtttagcaatcaccattaacagtgtgaattacttcgactgattttaatgcctctgcagctaagccaacgtcgttggttggagcggttttcctaaatctactcttagaaaatgatcgagcgttcgacattctttactgcataaccttcaaactgatggatcagaaatggcttgaaatgcacgccagttacatggatttcaatacggttattaaatcaacacggcgccagctcgagagggagctgttgctagaagatatccagagaatcgaggacatgccatcgtacaggtttctcgcctgctagcaattgaacctcctggtcgtaccgaacattgccacaagatagtgcagctccatacactcgaagaagaagctgagaggttggaaccacgtacaccgagcgaagggtgaatctaggttcatggactgtggatgtgttgttgctttgaattgcgctgtcgtgtttacctactccgagtccgacaacagcctcgacgccgagtgccttttcgtttcaacgatgtgctatatcttggggccacggaacggcagatcctagctttctttgtaaacaagaggatgtggaaagttggctgcgtatgctttgtggccatgtgcatggataatcttgctgctcgcctgaaagaaaaaaaggccgatcttaagact

SEQ ID NO: 101003 - DNA, 933 bp, Zea Mays
tatgaataatcaagtacttattaaaaaagacgattgtgcttacattttcaggacggatcatactctagaggtccagttgatatagcaattggtgaatatgatgaatctaaatacttcctttcaccaacatataagtttgagcaatgccttgttaaaggttgccacaaaagattgcggattgtgcatacaattgagtttaacgaaggaggagctaacatacaaattgtaagggttgctgtgtatgaagaaaaatgggccagcccagcaaatatccatgttgaagatgatacacttgttgaccttaaaccattctctcaaagaagccggaccaaaccgtcagaactgacaggctcctggaaagtatacgaagtcagtgcaacgccaattttcagtgataaagtgcaagaactagagggcggttctccattggtctacttgtgcatggagacggtgaagaagagaaacctgccagagagttcagttttctttggggaggaggagatgctcgacgtgcaggatgtcaccgtgctttggttacctggtggcgtcactgcctatgttgacatcagcgaagacggcatactctgtatcggagttgggtggtactccgaagaaggtatcaacctggtgatggagagagactatggaaccgatgggaggctcagggaggttcggtcgaaaactgaagtaaagcgcaggtggtatcaatcagttccataataacccaaagtttatttttgattttctgcttaaattaatctttgtttctaaatagcggcctaggatcagtatctaatacaccaaaccttcccgtttgacagggtcgatgtacttcatagctaagctgtaacttttgttgcctatgtagaatgtgaatgttctggtttgaacgataagaaaaatgagcttaaaatccattctcatacgccacaa

SEQ ID NO: 101004 - DNA, 1033 bp, Zea Mays
gagtttggcgcatatgggcccacttgtcagccgcgttcttcgaggtactactatccccaacctcgccgattctccgttctccacagtcctccacactcgccgagcgacaccgcgcgggacgaccgagcaagcagagcatgcaaccgtcgtgcctgggcgcatgcagcggtggaggactagcactttccgcccgccgcctccgcgccccctcctactgccgcgtcgcgccgcatagggcttccgcctcgtgctccgccggtggcggcggcaaggcatcgccgcgggggaaggacaacgtctggagcgtcgataacgaccgtgccgccaaggaggcggtccggggcccgaagcaccgccgcaggaaacgccccagcggtcgccgcctgccgccgccgaggaggaaggggatggatgcggggtcgagggttctagtgtctggagccatgctcgtggaggtcgaaactgtgctccaaactcaggaacctgttataaagccttcttgggatacatttgcaagtagtttaactggtaactggaagggtgttggagctatcttctcgccaatcacagcagagatgggagcctgttggggttgggaacaaagaagagtacctttatgactgctacactcttttctcacatttgagagatcttttgatgggtgggtcatgggctctgagatccgaaggaaaacaaattggggtcccaatcaatccgttttggggaagctgagaagcaaatcacatcatatgatgggtggggagtcaaagcacttccagtggaaagggaattgctgatttaccttcatatgagtctttttgatcttaacagggagtgctgtgcttgacgaagaaactttttctatggagcctaggaattgtattttttgaggtaattttattttgtcttcgcctccatttggtgtttttgaaatgtagtgatatggttatatgcagaactgtctttatatttattgctaattgaaacatggcatagtttctttcatcaacatattttactatgctttgcaaaa

SEQ ID NO: 101005 - DNA, 795 bp, Zea Mays
atgacgcactggcatagcgttgcacggtgtgtcagtccaaatgtcaaatgtgaaccaacgtgccgcatgcacggctgcgttgtacgtgcgtcgcgtttcgtgtcacttgtgtcggtaccgctagaagttcctgcctcccaggctcccctcacacaaaatgtcggcaagagcaccggatctaccgtcatcgtcggtgacatactgtcacggcagacgacgagcccggccgccaccaaggacaccagagcggcgacggcggtgcgcgagcccggcgccgccgactcatcctgggcgagagcgggtccaggcgacagagacgggctcaccgacaccgagctgagcggcgccagcgcgggagacggggtcgggaccggggcctctgttgtgggcgacggggcgggggcttctgtcggcgacggggtcggggcgacgcttggagttggagccggagacacgggggccggcgcgggcgccgtggccggtggggcggcgggaggcatgacgggggcggcgagaagtggcgtcggagccatcgctggagggagcgtggccggggggagcgccgccgctggtggcattgccgtgggcggggaggcgactggaggctgcgtctgcgttgccgatggtggcgtggttggaggggtagcggatgcaggtggcgcagcggcagctagtggcggtgaggaaaccggggccaacgtggcagccagctgcggcgaggcagctgtagttggcggcgcagcagaggcctgtggcgccaaggctgcttttgttggtgctgcggccgaggcctga

SEQ ID NO: 101006 - DNA, 936 bp, Zea Mays
acacggacgcagcccgcgcctttgtgccctccggagcgcacggcggcggcctcctgccgaccttcgcggtagcaagctagccgcagctagcgtctctttcatccgtcctcctgcgccggccgtcatgaccttcccgctggtttgctactgcaacgcggtgccgcgccccgtggccgcgctgttcaagaccatccacgccgcggcgctggtggtcgtgctggtcctctgcttcctgggcctctacgagttcccctacgaccccgaggaccacgcgccggtgatcaacgggcgggcccgcggcgggcgggacgcccctgggccggaggcggtgaagcggcacctcccgctcgtcgagttcctggagctgatggtggtggctccgtcgccgtcgtcgggggcggaggcggctccgacgtgccgggtgtgcctggagaggctggaggcggcggacggggtgcggcggctgggaaactgcgcccacgcgttccacgcgcgctgcatcgaccgctggatcgacctgggcgaggtgacgtgcccgctgtgccgctcccacctgctgccgcgccggcgcgccggcctgcttggcatggcacggcttggcgacggctagtatagtcgcccgtccgtccgtacctggttgtttccttgccacgtgacgtgcgtgcccgtgcccgtgtgcttggctttcaggcgcgcggcactggtgccggatgggggcggaccaaccgtgaactgatcgcgattaggacgatggactaaccaccaacctgatgttattaatgaatgggcgcaagttaaattaaccggaggaggttggcataaagtacttgttgacgcgatacgatatattgtgtgcctgcgttggacacttggacggccaacgctcttgtacattaaaatactccagaaactgttttggcttctctgcgcaaatga

SEQ ID NO: 101007 - DNA, 1595 bp, Zea Mays
ctgctgtagataatgctacacttttccggggttttctctctctctctctcccgcgagctgactgacggctcctttatctcctcccgcgtgcatcccccagctactcgtcattcttatccgcctgcctccgccctccgccaccgctacctttatagctctagcttccttcctccattccctcctcatgccttcgtcttcgtcgtcctgcagccccgcaatagagcatcgtacttcatcgttccacttacatcgtttgttcgttcgttcttccgcgtgatctgcttgggagttgggggcaatggaggcctacgtcctgttcgcgcgcgccaaggagcaggaggaggacatcggctgcccgtccgagtcgtccgcggcgcgttccacgtcctcgtcgtcggacggggtggacctcgccgacgacgccagctcgtccgggtccacctgccacttcgagatggcctccctcatgacgcacctcccgatcaagaggggcctgtccaagttcttcgccggcaagtcgcagtcgttcgcgtcgctggcggcggtgggcggcatcgatgacctgcccaagccgccggcgaagcggctcaagacgtcgtggagctgcggcgtcggcctcgaggacgcgcgccgcggccctccctccgtgacgaccgccaataagcaggcgtccagcagggcacggctgacgccgtcggcgctcggctcgacgccgagaaggctggtgcgagcgcggccgcttgtaacggcgagaccggaggcggcggccgggaagcccctgttatttgcatagggggaagggattcgcctgcctaccagtaaaatcactatcacataattcggctgttacttgttagtttgcgcggaacttgaaaagtgaaatggccagagatttgacccagtttccgcgtgtaaatatttttgcaacagagctaacatgttacaaaggtgtccttttttcatggatttgacccagtttgcaatgcatcatattggttggtcctttccataacttcgtttcgtgtgatagatctcctatttgatctgaaactggctaacatgttacaaatatgttacattcagaacacgcttgataaatgtgctgccgatagttttagaggtcttagtgatgctacgctgactattgcctaggagtacaagtacacaaaattacaaagacaaggtgagctcccctattctctacttttttttttttgaacaagcaggcactttcttgccgtttttttgctttttgactttttttgaaaaattttcacaactacacactttctagtttgaattcacgaaatgaacctttactcggcgccattatcattgacgtcaaggtcacacgtctcaacgtcaatataaataacgtccagatctagctctggtaagtcgatctggcgcctatatggcaggatgtcagcgccgtggttattggtgccgacctccttttcaagaaacggcggctcggctcatatctcaacaagtggtgcgcgtggctcgtatgtgttatatatatatattagtatatctatgtatttatattaatataacatataatttattaatattataatatatatattata

SEQ ID NO: 101008 - DNA, 646 bp, Zea Mays
ccacccaaagatctgcaacaacaacaacaacccgcacaacggcacgattctcctcctccgtccgcgtagctctcggtttcggcgatgtcggggcgcggcaagggcggcaaggggctgggcaagggcggcgccaagcgccaccgcaaggtgctgcgcgacaacatccagggcatcacgaagccggcgatccgtaggctggccaggaggggcggcgtcaagcgcatttctgggctcatctacgaggagacccgcggcgtgctcaagatcttcctcgagaacgtcatccgcgacgccgtcacctacaccgagcacgctcgccgcaagaccgtcaccgccatggatgtcgtctacgcgctcaagcgccagggccgcacgctctacggcttcggcggctaggccgcctccccttctgatgctttgatatgacggccgtggtcggttgtgtgtctagttggccggtctactgtagtttgttctgtatcttcgtttcgaggtgttccagtttctagcccatttggtgtaatattttcacagctattatcaatggaaagccctcggttctatcctcattgttctggatcaagataatccgtttgatatggatacagtacccctcatgcttttactctttgatacgacggtagta

SEQ ID NO: 101009 - DNA, 267 bp, Zea Mays
atgtcggggcgcggcaagggcggcaaggggctgggcaagggcggcgccaagcgccaccgcaaggtgctgcgcgacaacatccagggcatcacgaagccggcgatccgtaggctggccaggaggggcggcgtcaagcgcatttctgggctcatctacgaggagacccgcggcgtgctcaagatcttcctcgagaacaccgtcaccgccatggatgtcgtctacgcgctcaagcgccagggccgcacgctctacggcttcggcggctag

SEQ ID NO: 101010 - DNA, 261 bp, Zea Mays
atgtcggggcgcggcaagggcggcaaggggctgggcaagggcggcccggcgatccgtaggctggccaggaggggcggcgtcaagcgcatttctgggctcatctacgaggagacccgcggcgtgctcaagatcttcctcgagaacgtcatccgcgacgccgtcacctacaccgagcacgctcgccgcaagaccgtcaccgccatggatgtcgtctacgcgctcaagcgccagggccgcacgctctacggcttcggcggctag

SEQ ID NO: 101011 - DNA, 1889 bp, Zea Mays
tttcgtttctcgccttcgcctgcctccctccctcttctcctccactcgtgcgaaaccggcagccctcaggagctggtggcttggccttggctgcgcacgctctcgccttgtgctgctgctcgattcgtgctcgctgggctgacagactcggtgcttcggccggttcagaaatctcgagatggctcgtattcagccgaggaccgatcaaaggcctgctgtggacgtggaccacgtcggccatggaaacttcacgggtcatctgaagagcactctcagctccggcgatatggacttgccaggaggagcacgagcccctaaggcacgcaagccatacacgatatccaagcagagggagaaatggaccgaggacgagcacaggctcttcttggaagccctgcggcagcatggccgtgcctggcgccgtatacaagagcacgtaggcagcaagactgccgtgcagatcaggagccacgctcagaagttcttctccaaggtcatccgagaatcctctggaggggatagcaacggcaacggcaacggcgtagcggctccaccacaaattcagattccgccgccgcggcccaagaggaggccaacgcacccgtacccgcgcaagctgggtagttcggtcggcaaggacgacgcctccgcgatcaagcggcttcaggagccccagctgcaggcacagtccccgtctctgtctgagcaggagacttgctcaccgaagtctgtgttaaccacagctgaaggtagtggatcaccagcttcctcggtttacatgatggaggacagatgcctcacaccaagcacggcagttgcactttccaaggaggccaccacttctgacgaggcggcgtgtgaactacctggaggtccagttctttggctatttggcaagagggttgtggttagtaatttattcgatcagcaaccaagctccaatactgggagcctgcaactacaacgtgtggcagacatggaactggacgcttcagctcctgagtcaccgactagttgtggaactgggaagaagctgtcctcccatgccgcagaggaagcgaagacatggcacccgtggctgaccggtacgcggcagtttatgcactgtcttcctcaaggcgagcagttctccgtgcattctgcttgccgacccctgagctacggtgatggaagcatgccttacacggcgtggaacgcgcagacagttacctcaaacaagcagcaggacaaccaaccgtctcaagccgcagcagactgcgaggtcacgagggcacaaggatcgtggacggagccgtccgtcacaacctcctccagcagcgtggttgaaacagctcagaattcagattctgtagaatccacgaaagtaaacaacgacggagacaaagtggcacctgttccaggttcaaggaaatgcgcgagcgtagttccagactgccttcgaggttttgcaccgtgcaagcgcacgcctcagagcaagatgctgctgcagtcagaggcacctggggaggcagatagagagatgacaaggctgtgcctgtaaaatttttgcgccctcgccagccaccgctgctctggatatatatatttttttgctgatattgaagacgtatgactgtacagtacagcagtgctgatgttttgcaggacggccattcaggcgttctgctgttacttatgagaggcagattgacactggtgaagcagccttccacaaaagggatggaggtgactgactggctgtggttcctgtctgtcatttgtatagttcaagacaatgcagcaagcagtgtaatagttgtagtaggagaccatattgtatgacctatatatgtaaattacgaatgttgttttgtaaaacaatgaaatgacaacagctacacgaccgaatg

SEQ ID NO: 101012 - DNA, 1302 bp, Zea Mays
ctctccatccccaatctcgggccttgactccttgagcacagcacaccgagtccaagccccgaagcctcctgaccttggttactgggtagcttctgcttggtactccatgcgaggacgacaatggcgatcgccgccgtccccgcctccctccccttcgtcctcctccctccgaggctgttccgcgggagggcggtgaggtggccgcgcccgattagggcttcggcgtcgaccaacgccggtgacgttgcaggcggagagcggaagtttggggctctggtgagcagggtgggagatctgagggcgctcgtagcctccgtgcctcctgctgttgcttcgatgcagaaaaacattggcccaaattttgttgctggtttctgtgttagcatggcatttgtggctgctgctgcaagacagatctccttaagaagtcgagagcatgttagtaaaggttctgttgctgatcttgtaaggcgtggccagttaaaatcagggcaacgagggattgcaaagctccgtacatacgatgatcctttcaataacccgttagtaaagattgatgagggtacatctactgcacaaatgtttggcaaggagtaccgtttggctcctgttaggcttacgaaagagcagcaagaaatgcaccagaacaggagatcgcgtgcatatcagtggaaaaggccaaccgtgtttctcagggaaggtgattccttacctccagatgttgatccggatacagttagatggattccagcaaaccatcccttttctgctgcttcaagtgaagtggatgaggagaccgccaaacaaaatgtctaccaaaaggatggcatcccatcccgtgtcaaggctgagcatgaagctttgcaggcaaggctagaggcctcaaacgatgttaccagactcccttcggatccaaggagtattcagcgtaatgagagaccaatgagattgtcaggcaagccatctgaacatcttcagagctccaagtttgagaaccaagatagacaactggctactgagtctggtaaacatagctctgaatctctgatggatgtttacaatcaaacgagccggaagggcaataaaaattgtgtacttcagctcttcgaagacatttgctttgttacgtagtgttatcagcttttaggctgtagctgtagatagagaagttttggaacagtgagcttatacggcttaccggtttacatagtgagcagttaatatgcgagttgcttgacgtgttgggaccgaatggataattattttgacgagcacatgggtattgttgtattggggaccttc

SEQ ID NO: 101013 - DNA, 993 bp, Zea Mays
gagcttgctccgctgctctcctctgccacgataagcccgtgaccgtggagggaagggaacagagcgagcgagagaggatgcacggcgcgacgacgacgaggaagctcatgtgggggaccagcccggcggcggctgggtcggacaggcccgacgaccacgacgtcgtcatcgtgctcgcctcgctgctctgcgcgctcatcgccgtcctcggcgtcggcctcgtggcgcggtgcgcgtgcggcgggcgcgggccccgcgcgcagcaggctgctgctgctgctgcggcggcggcggccaacagaggcgtcaagaagtcagtgctccgcaggatccccaccgtgccgtacgtcgcacccgccgccgccgcttgcggcagcagcagcagaagcgaaggggacgcggacgcggaggcggtggagtgcgccatctgcctggcggagttcgaggagggcgagcccacgcgcgtgctgccccagtgcggccacgccttccacgccgcctgcgtcgacgagtggctgcgcggccactcgtcctgcccctcctgccgccggctcctgtcccaccagctgccgcccggagagcggtgccgccgctgcggcgcgcggccccacgacgccggcgccgctgggcccgcgtggaagccgacctactacagcgccatgccgccgttcctggcgtaggcagcagagcaagtctccggtccgaaaagcaaatctcacagctactaaatttctcgtctgctccatagattttcagtagtgcttgcctgtggttggttggtagtgatctgggatttgcgggatcaatccacggcttacagtcgtttgttgcagctgaaacactgcagtctgcagcatactagtaccgtccgtaccggctctgactgtacagtttgtaaatactcgagtaattaacatcgtcgccgcagcattaattgtgttctgggtaaatcatgcaatcagatctcagctagctcgcctgggacgtgaatgc

SEQ ID NO: 101014 - DNA, 2143 bp, Zea Mays
gactgacaaaccgcacctacgtccataaaccccagaagtcgactcctgcccctgcctcgccgccgccgttgcttaccaacctcccgccatggcgacatcgccgttgccgacggcgaccgcctctgcctcgaagaagcggcgttccagaggcgggacgctagccctagatgaggtgaagaagctgggaaccgagctcctttcctctcgctcccacctcaaccacgcccccgccctcctcgctctcctctctcccaccgcgccgctcgacctcgctctcgaggcgctcatttcgctccagtccttcttcgtaccactcatcccctccatcccctccgcctccgcggcagccaacgcgggggatgcgggcagtgaccccgagctcgtgtttggagcctggctgcggcagcggttcgacgagctcgtcgccgcgctggtggagctcagcgtgtctccacacagcgacgacgcaatcagggatgtagcactggatgctctcatggatttcgtgaagctggggaaggatgggaagttccattcggcaatttaccacaagtttctctacgctgtcgttcatgctgctgatcccgtcgatatgttgttagagttgcttgtatcaaagtacttcaaatacactgatattcgttacttcacttacactagcttagacaagattgccaacagtctgggcagtaaaaccactggctctggaaaagatgctttgcaaaatggaagtgacgagtcaaaaaacaggagtagtatttttatacacaacatatacaatcttttggcacatgttcctttgatggattttcaaaaggaatcaacatttgatatgtggagtactgttggtctatcttctaaaggagaaaatgactcttccaaggacacttctacgtacatcaataagaaactaaaattgaagttcaccaaagcatggctgtcttttctcaagttaccactaccacttgatgtgtacaaggaggtccttgcttcaattcatcaaaatgtcattccttcaatgtcaaacccttccatcttatgtgatttcttgactagatcatatgatattggtggtgttatcagtgtgatggccttaagtggccttttcattcttatgacacaacacggtctggagtatccaaaattttatgaaaagctttatgcactactgactccggctgttttcatggcaaaacaccgatcagtgtttttgcaacttcttgacacatgcctgaaatcttcttatcttcctgcctatcttgctgctgcgtttgcaaaaagattgagtagacttgctctttcagttcctccagctggagctcttattattattgctttaattcataatctgctgaggagacacccctcagttaattttttggtccattgggaggttgatgagagtgatagcaatgccacaagagaagctagtcaatctaagaagattggttctgatccttttaaccagaatgatgcagaccctgcgaagtctggtgcaatgcgcagttctttgtgggaaatagacacgcttcgtcatcattactcttctgcagtttctagatttgttgtgtcacttgaggaggatctcactgtccgggccaaaactactgagatgaaaataacggacttcagttcaggttcctatgcaacagttttcagggacgaggtacgtcggcggttaaaacaggtcccccttgcattctacagaaccacaccaacctcgttatttctaggatcagattttcctggatggacctttggggaccaacacaatagcaccgtagaaactactgtagaaggcaacggaaaagtcgaggcagtaggggctagcgacagcacaccttccaaaaggttgcggatggagacctgagaaggaaacaccgcgaatctccaagaattaggccggcttgttggggtagcattgggtggttgtgtgcctctcatttggagtttggtttcccagtgttgtctccaggattgtctgggtgttgtagcttcaattttgagcagaatgggttacgtgaggaaacacttctttcggttacgactaatataagttgtaagcttaattgccaattacagaggaaatgtaccgattttttttttcagtcctttatccaaaacatcatttatgttttgcttt

SEQ ID NO: 101015 - DNA, 347 bp, Zea Mays
agaaattgttatataatcacatgaaaaacaactaattgtgattcctctttcaagtattgctctagctaaattaggaacttgattccacacaagaggacacattaaagaatttggtattcagaaaggaaaatataggagcacatcgtcatcaaaatatgaacgccttccagagatggtctcaagcagtacaaagcaaacttatacactgcgttgtactcatcaggagcattgtactcgtcatcttgtttcttgtcaacgccaaagctgatgtctgaaacctttgcaacatcgtcttcagtcaaggatatgcatgaactgtttagtgttacaggagtgttttgctagtg

SEQ ID NO: 101016 - DNA, 1168 bp, Zea Mays
ctgtttgccgtgccggcttgctctcacacccgctgtgccccccgcgccgccaacctcgatgctcgccgccaccaccgcctcccttcggccgcccatccgcagcttcccgcgcgtagcctctcacccgggtgcctcccatggaggcgcctgcggagcgaacccgctcctcacacggcgcaggcggcgagcgctagtatgccgcgcggacctgcagcaggacgcgccgttcgcggccgccatcggcgcctgcgtactcgcctcgctcgtgctgcctcctccgaggtcccgaggggaggcgggcgacgaggtggaggatgaaggggagtttggcgcgacggacacgaggatggccgtgatggggatcatctccttcctgccttacttcaactggctgagctggatctttgcgtggctggacagcgggaggcggcggtacctggtctacgctgccgtctacttggctccgtaccttagaactaacttatcactgtcacctgatgagagctggttacctgtcgctagcatctttatctgcattctacatattcagctagaagcaagcatcaggagtggtgatatcgagagtttcaagttcatccaaagagcttggaacctcgtctttcctagagctgctaaagagaaggatgcccaccatggaaacaagagagactcaatcggaatgggcgacagacacaataggaggataccgacggcgcatgaatccagggagaggcttcgcaattcagatatcttcaagaggaaacttgatgatcccaacgatgagaagcaaaagaagtcagattggaactgaggctcaaaaggctctttttctcctgcattttcctgaaactacaaaaaatggtatttggggtggggtgaggggtgcatttgtagggagcccacaggtgaaactgaaatggagatgtggctgtctgcggtttcaaatgggtctgaatcgtcagatttttcttctggttccaaacagtagatcttaggtatagctagatttttacattttagtgcgcacaaataacttgtcagccaaagctaatgggacatatcacatatggcgactttgaggcttgtgaagctccgttgtgtactcgtaagaatgaaatcattttgctgtctactcgtatgaatgaaaacatgtttgtttttagtttca

SEQ ID NO: 101017 - DNA, 1366 bp, Zea Mays
caccgatacaaatacaacgcaccgtccatctctccctccctccctccctccccctcgcaccgccgcgggacacgaacacgcgagccacccaaccggcccgaacccgatcgcaccgacgaggtggatcccaggggaaggctcctctttaccgccgccgatggacgtgggcctcggcggcgcgggtagttccggcagaggagggggagggggccggagcgggagcgggggcggtcgggacagcccgttcgctctcggcgggggcggcgcgtcggcggctgcgtggacccggctcgtcagctccggcgtggaggacgagctggtggctgcgtcgggaggaagaggaggaggtggaggacgcgcgggggcgagagcgggaggcctgccgcagggccactttttggacgcctgcttcctctgccggaagcccctccccagcaaccgcgacatcttcatgtacaggggtgacatcccgttctgtaccgaggagtgcaggacggagcagatcgaaatggacgaggagatggagcggaaggagagcacccagaagaagaagttggcgccgagagctccctctcccaaggacgtggagtccgcgccgaggcctcccaaggcccgggccgggtcaatccttgccggctaacaccgtgaagacgaaaagctcacaaacgagctagagctcgcgtgtgtgctcctccccctccccgaaaccaagagagatcagaacccccttgataccaccacctggaactaccgctacagttgcgtatatgggtttgtgtttttttgtttacagcccttgcgccattggtggcgccgtgaactcagtgtcagtgcctgcccgcttacctgtattgctgctgatgatgtatagagacgggcggagaggagaggagagcgctggtgtttaggaccgcatgcattcagaagctctctgtgctgctggccagatgtgtcgttcgttgtatcatgtatgggtgtttctggctttcgttctgggagatttttgtgagaatcttctgtgtgttacgtagtactcatagacaaatagctggtgttggtgttagggttaatgtttttcttaatgctcatgagagaaaattgaaaacgtatgcctacagtagaaataggcatgtgaagtgaatggacccttgtgctcataagtcatgacataacttgctcctgtatcatcgtgaatcctgctttcctttctttaaggatcttctgattggcaccagtgtcagtgtgctgcctgtgagaaaccttaaacacatattagtgttgttctttatgggagctaattagtgttggaccagcaataatggtttttatggccggtgacgtgaacagtttcccgtccagcttttaa

SEQ ID NO: 101018 - DNA, 1327 bp, Zea Mays
acgcggccaacaggagtctagccgtctgccgtccaggcctccagcctccagggcaccacgctccacgcatggatgcacgcaccaggcgtcccgccgcccgcgtccaggcagtcaccagccgccagacggagtgacgagtgacggacccaagctcgcgtctaggcaaccgccagacggagtcccgccgcccgcgtccaggcagccgccagccgcccgtgtccaggcaaccgccactccgccagccgtctctcaggtacgccgccgctgcagatgtcatcgtcggtatcggctacgtcgagcccacagtccatagagaacggtgaccatgacccaagctctaggccagcagcctcgtcccctcctttgcagattcaggcacgggacttatcatcctctccggagacgaccagctcaggccacgcaagcgacctcgcgaagggacgccgctgctgctactgttgtcacggccggcgccactgttaaagataattgaaagggaattaggcttacacctagttcctaaataattttggtggttgaattgcccaacacaaacaattggactaactagtttgctctagtgtataagttatacaggtgtaaaaggttcacacatagtcaataaaaagatcaaatattggattcaacaaaggagcaaagggacaactgaaggcacctctggtctggggcaccggactgtccggtgcaccagaggactccaactcaaacttaccaccttcgggaatttccagaggcactccgctataattcaccgaactgtccggtgtacaccggacagtgtccggtgctccaaggaagaggggcctccggaactcgccagcctcggaaaaacgcagcggctgctccgctataattcaccggacatgaccggtgtacaccggactgtccggtgaaccagcagagcaacggctacttcgcgccaacggtcacctgcgggcgcattcaatgcgcgccagaagcgcgcagaggtcaggcacgcccatactggcgcaccggacattgaacactacatgtccggtgggcaccggacacccaggcgggccccgaagacagaagctccaacggtcggaatccaacggcattggtgacgtggctggcgcaccggacatgtccggtgtgcaccggactgtccggtgcaccattcgacagacagcctccaccaacggtcaagtttggtggttggggctataaataccccaaccacccccacattcaagtcatccaagttttccacttctcaaccacttacaagagctaggcattcaattctagacacaccaaagagatcaaatcctctctaattcca

SEQ ID NO: 101019 - DNA, 544 bp, Zea Mays
acgcggccaacaggagtctagccgtctgccgtccaggcctccagcctccagggcaccacgctccacgcatggatgcacgcaccaggcgtcccgccgcccgcgtccaggcagtcaccagccgccagacggagtgacgagtgacggacccaagctcgcgtctaggcaaccgccagacggagtcccgccgcccgcgtccaggcagccgccagccgcccgtgtccaggcaaccgccactccgccagccgtctctcaggtacgccgccgctgcagatgtcatcgtcggtatcggctacgtcgagcccacagtccatagagaacggtgaccatgacccaagctctaggccagcagcctcgtcccctcctttgcagattcaggcacgggacttatcatcctctccggagacgaccagctcaggccacgcaagcgacctcgcgaagggacgccgctgctgctactgttgtcacggccggcgccactgttaaagataattgaaagggaattaggcttacacctagttcctaaataattttggtggttgaattg

SEQ ID NO: 101020 - DNA, 291 bp, Zea Mays
atggcctccgccttcttcttcgacgccgagccggactgcgagcccagcctgctgcccacgctggacgcctgcgcgctctgcgccaagccgctgggacgcgactgcgacatcttcatgtacagaggggacacgcccttctgcagcgaggagtgccgcgacgagcagatgcagctcgacgccatccgcgccaggcagcaggccgccaggtccgccgcacggaggcagcagcagcactcctccagaacggagtccaggcaccaggagtccatgaaggtatccgtggcgacctga

SEQ ID NO: 101021 - DNA, 315 bp, Zea Mays
atggcgacgtccgtggcctgcgccttcttcttcttcgacgcggcggagccgctgggcgagggcgggcggcggcggcagcggcaagcgctggacgcctgcgcgctctgctccaagccgctggcccgcaacagcgacatcttcatgtacaggggcgacaccccgttctgcagcgaggactgccgctacgagcagatgcaccacgacgcggcggccacggcctacgcgcggcatcaggccagcagccggcggaggcagcagcggagcaggggcggctctgtgtccgccaacgaggcggacgtgtacgtggccagctag

SEQ ID NO: 101022 - DNA, 276 bp, Zea Mays
tttttcctttttttatattcgatgagatacatatgaattttgtgttgtgtacacatgacattttctatgattattttcccagtactattgagatgtttaggttgttcagatgccgtctatgtgatgtttgttttttatttttcttgattatatattttttcttgttgaagcagtataaatatgaagctagctgtatgatgtatctcaagatattatttacatattctatgatgtgatacacgttacgtatatatatgagcctaatatgaaatcccc

SEQ ID NO: 101023 - DNA, 706 bp, Zea Mays
atggatagttccggcatctggccagctgtttggtgggcggtagtggttaactatgataggagcctcggtagggatcctcgagtactgcattattctttctactgatatcattttgttttctgtgttgcaaatgttccaaattatggatgccagctgtgagttgaggttcaacgcataagtaaccgcaagtccagcaatacctggaggctcactagcagagtcaaagaaaaggcaaagacaaagttggatagaatgtttagcctgaaagaaagccactccattgaagaaatgttatggaaccatggtctggaatggttgtcaataagaccaattaggtgtggaatcaaagaaggacattggggcatgcaggatgcagtggagcatgtccttgaagaacttttctgatgttagtagaccaattagtgacacaagcaaggaccgagacaaaacacacagggcacttcccatagatagtgctatgtatacagagaagaggaggcctaatccaacggttggagtggttgcagttgtaggaggtgatgcccatgccatccaatagttgctggctacctgaaatatttgaaagaacgattgtgcagctattgttactggcactaaggctccaccatgaactgccctcaggtaggtccaataaaccttcttgccaatgcctcccttttcccgttcttcttcttgtgttaacctc

SEQ ID NO: 101024 - DNA, 84 bp, Zea Mays
gttttaatccctactcgcaacagccccgatccagttacacctcgcctcccacctcgctccacagcctccactctccgcgtcgtc

SEQ ID NO: 101025 - DNA, 1910 bp, Zea Mays
ggcttggtttatttattttcctcttcctctccgcctcggcgcctcccttgcagttccaggctcccgcatccacctgaccatctcggcagctcatcctccccgccccgtcgacccacaccgcttcccctacctccgtcccaagcaccgcagtctcgccaggggcggcgggacatcgcatcgagcccatcgccgcaaaccgagagccaacaacctaggggcagaaagccagaatgcccgcaaagaagcgccggttcccatcgctgtcttcgaaaccccacggcgacgtggcggctcccacctctgatgccacctccggtggaggcgtagaaggaagaggagggcgcccgccgctgccgagcaggggcgcctgcaggccgaggttgactgacccggagccacagggcggactcgaagacgattcggacacggagggtgacggcggcgcggacggcgacagtgaatcctcgcagagcgacggcggcggcaccgacgagtttatgctagtgaaattagcagagatacggaaggaggttcagtgccctatctgcttaggcattatccggaagacaaggacagttatggaatgtttgcaccggttctgtagagactgcatcgacaaatctatgcgactaggaaataacgaatgcccagcgtgtcgcacccattgtgcaagcagacgttctttgagggatgatcccaattatgatgcactgattgcagccctgtatccagatattgataagtacgaggaagaggaatttgctttcagtgagcaggagaggattcggaataaaaagatacaagaaaccattgaggaaacattcagaagacagtctgacgcaattggtaagaaacgttccatggcaaaagcaactgcaaccgcctttgcaaggaagtacaggagaacacgggggagagttagaaccattccccctgatattgcccctactggctcttctgaggaggaaagtggagaaggaaattccaaagagacaatcagagagcaatcttctgctgatgatcattctccagatttaagacagaaaagatgcaggaagaggtctggaccacaaggatcacctgctggaaccattggcagtatcgactacagctttgaggagaatgatgaattagttggtggaaaagaaattttagccacctctccgttgcagggagaaatgcttgcttgggggaaaaatggtgcacggagccaaaatcgacatggcagtgttggttcaaatggcaggactggaaggagtgggcgcattgcaaaattggttgattacctccatactgctgatgaaatggataaagagtttcagttgtttcttcttctccttcctgtcgatggacaaaccatacctaacttggaaaagccttatctaagctgtcgaccaaccttgtccattaaacatcttgcacagttcgttgctcttcagttgtcttgtgaagtcgaagaacttgagatgtacataaggatggaccgccaccgtgtaagtgttggctcgaggccttccagtacaggtgaggcaaaatcacgtccatttgatgacttggaaagactgaacgaagaaaaacttgtttcggagcttcatccttcatttgtctctagcaacggtgatatggagttacgatatgctttgagaactcgggagtagatcagtttttatcctcagctatcaatttatgaagtcatactgtccttgtgtaaaaaaaatgttcgatgtgaacaatgttgacgctgtttttctcattggtcatgctaagttaatttaccatctttgtaatatacataatgaactgattagcaaatgacctcagtaggtgaacccagttgtatgctatgtactgttcatttatgcgagtcgatggcaggatgggaaatcagaagctgattattattataacat

SEQ ID NO: 101026 - DNA, 1704 bp, Zea Mays
accctttcctcacgctctcgtctctctccacgaaaccaacgtcccctccttccccagcgccccgggggaggaacgccgctgcagccgccgggaggagtcggtgggcgtcctcctggacgcgaaatgcccgcccagaagctcctgatctcgtcgcccaccccggacgactccgacggccgcgttgcagtgcgtcacgccgccgccacccgccagcgggtgtcggaactcggaagcagggacggagcctcacgtgagatggatgggaagtccgtgcgtcaggagagatcgtctcatcgggagcctcgcgacggtgtttcgcagatcgcgacgacgagcaggtgggtggccgcggcagacgagactgaaccgacacctacatcgagtcgttcctatcatcctatgcgcgccggcaccatggatgagtttatgctagtgaaattagcagagatacggaaggaggttcagtgccctatctgcttaggcattatccggaagacaaggacagttatggaatgtttgcaccggttctgtagagactgcatcgacaaatctatgcgactaggaaataacgaatgcccagcgtgtcgcacccattgtgcaagcagacgttctttgagggatgatcccaattatgatgcactgattgcagccctgtatccagatattgataagtacgaggaagaggaatttgctttcagtgagcaggagaggattcggaataaaaagatacaagaaaccattgaggaaacattcagaagacagtctgacgcaattggtaagaaacgttccatggcaaaagcaactgcaaccgcctttgcaaggaagtacaggagaacacgggggagagttagaaccattccccctgatattgcccctactggctcttctgaggaggaaagtggagaaggaaattccaaagagacaatcagagagcaatcttctgctgatgatcattctccagatttaagacagaaaagatgcaggaagaggtctggaccacaaggatcacctgctggaaccattggcagtatcgactacagctttgaggagaatgatgaattagttggtggaaaagaaattttagccacctctccgttgcagggagaaatgcttgcttgggggaaaaatggtgcacggagccaaaatcgacatggcagtgttggttcaaatggcaggactggaaggagtgggcgcattgcaaaattggttgattacctccatactgctgatgaaatggataaagagtttcagttgtttcttcttctccttcctgtcgatggacaaaccatacctaacttggaaaagccttatctaagctgtcgaccaaccttgtccattaaacatcttgcacagttcgttgctcttcagttgtcttgtgaagtcgaagaacttgagatgtacataaggatggaccgccaccgtgtaagtgttggctcgaggccttccagtacaggtgaggcaaaatcacgtccatttgatgacttggaaagactgaacgaagaaaaacttgtttcggagcttcatccttcatttgtctctagcaacggtgatatggagttacgatatgctttgagaactcgggagtagatcagtttttatcctcagctatcaatttatgaagtcatactgtccttgtgtaaaaaaaatgttcgatgtgaacaatgttgacgctgtttttctcattggtcatgctaagttaattta

SEQ ID NO: 101027 - DNA, 1748 bp, Zea Mays
cctctaccctgcgcccacgcagttgtacacccaccctttcctcacgctctcgtctctctccacgaaaccaacgtcccctccttccccagcgccccgggggaggaacgccgctgcagccgccgggaggagtcggtgggcgtcctcctggacgcgaaatgcccgcccagaagctcctgatctcgtcgcccaccccggacgactccgacggccgcgttgcagtgcgtcacgccgccgccacccgccagcgggtgtcggaactcggaagcagggacggagcctcacgtgagatggatgggaagtccgtgcgtcaggagagatcgtctcatcgggagcctcgcgacggtgtttcgcagatcgcgacgacgagcaggtgggtggccgcggcagacgagactgaaccgacacctacatcgagtcgttcctatcatcctatgcgcgccggcaccatggatgagtttatgctagtgaaattagcagagatacggaaggaggttcagtgccctatctgcttaggcattatccggaagacaaggacagttatggaatgtttgcaccggttctgtagagactgcatcgacaaatctatgcgactaggaaataacgaatgcccagcgtgtcgcacccattgtgcaagcagacgttctttgagggatgatcccaattatgatgcactgattgcagccctgtatccagatattgataagtacgaggaagaggaatttgctttcagtgagcaggagaggattcggaataaaaagatacaagaaaccattgaggaaacattcagaagacagtctgacgcaattggtaagaaacgttccatggcaaaagcaactgcaaccgcctttgcaaggaagtacaggagaacacgggggagagttagaaccattccccctgatattgcccctactggctcttctgaggaggaaagtggagaaggaaattccaaagagacaatcagagagcaatcttctgctgatgatcattctccagatttaagacagaaaagatgcaggaagaggtctggaccacaaggatcacctgctggaaccattggcagtatcgactacagctttgaggagaatgatgaattagttggtggaaaagaaattttagccacctctccgttgcagggagaaatgcttgcttgggggaaaaatggtgcacggagccaaaatcgacatggcagtgttggttcaaatggcaggactggaaggagtgggcgcattgcaaaattggttgattacctccatactgctgatgaaatggataaagagtttcagttgtttcttcttctccttcctgtcgatggacaaaccatacctaacttggaaaagccttatctaagctgtcgaccaaccttgtccattaaacatcttgcacagttcgttgctcttcagttgtcttgtgaagtcgaagaacttgagatgtacataaggatggaccgccaccgtgtaagtgttggctcgaggccttccagtacaggtgaggcaaaatcacgtccatttgatgacttggaaagactgaacgaagaaaaacttgtttcggagcttcatccttcatttgtctctagcaacggtgatatggtaagatccagtcttaacagatttaatgcgattatccttgcttgcttggtcttgttccgttgatacactgtgttcttgtctttaatgccaggagttacgatatgctttgagaactcgggagtagatcagtttttatcctcagctatcaatttatgaagtcat

SEQ ID NO: 101028 - DNA, 1919 bp, Zea Mays
ctcgcgttttctcgtcagttaacagatctgatccgacccctgaggccaggcaaagactctccgccctcccactcccacctcgccacctcctccttcctcgctcccaattttctttttttttccccttccccttcggcgcggcaggattttctccatctgctttccccatttccgccgtattttattcgatttcgaggtcggttttctgttgcacagggagaaaggtcacgtccaaccgccgcgaactgcgcatgtgaactgtgcccgacgaggcgcgctgcggcacgggtgaggggagctgcgccggagcaccagccctagggttttcaccgccctgccgcgagatggacgtccgggacctgcaccagcagccgcagcagcagcaggctccgccgcgcgtgggatccccgccgcaggccggcgccggcggtgtcatgatgcagcatgccgccgcgttcggcgcggcgccgccgccgtccgggttgccgcaggcctcggcggccaacgttatgcacgggatgtcccttgcctttaaccctatggcttcgccggacgcctcgtcacccataagcagcatgaagattgtggacatgccgctggggtctatgtaccgccctgattccggcgcgacgggcttgcagcagcagcagcccggctccggtggcgttggtgccagcggtggtgctatcgtcgccgtcagcggcggggaccttgtgaagaagaagagggggaggccgaggaagtacggcccagatgggagcatcggcttgggactcaagaccgccgcggcgggggtcactgaagcgacgggtgcccagtccggtggaggcgggtctacccctaaccccgacggcaagcgtagagggcgtcctcctgggtcaggcaaaaagaaacagctggatgctttgggatcttcggggacgtcgtttactccccacataataactgtgaagcccaatgaggatgttgcgtccaaaataatggctttttcccaacaaggcccgcgcactacatgcataatttcggcaaatggtgctctgtgcacggcaacactgcggcaaccagcaacctctggtgggatagtgacatatgagggccacttcgatatactctctctttcgggctcattcttgcttgcagaggatggtgacactcgcagcagaacaggtggtttgagcgtggcactggctggaagtgatggacgcatagttggaggttgtgttgctggaatgctgatggcagcgacacctgtgcaggttgtagttggcagtttcattgctgaagctaaaaagccaaaagaagagcaacccaaacgtgagccaacatcggtgccaccgcacacagctgtctttggggcggcctcgactgccagccccccatcggatggcacatcaagtgagcactccgatgatcccgggagccccatgggaccaaacggcagtgcattcaccagcgcggggcttcccctgcactccacatatgctgcagttggttggtcactatcagaggaccaaagccgttatgatccagatctaaagatgatgaccgactgatgggtgccgtttcgcagcttccttgttagcagttgacttagctgagtaggctcaataactaaggaatcctgagagtggtaaaaccttcaggaaggagtagatcacgagtaataattagtaccagtgcatgcctttgtcttgttatatcgtagttagcagtttgtatttgtatggtttcactgtcagaaagtctatgcagcattccttctggtttccatctgtatccacgtagtgcaacaattctcatccatggattggtattgctcaccccacatcatcgtatgcttgtattgcaattctcctcttgggttcacaaaaaagccaatttgcctttgtattagatagactacattaaaccgggtgcaa

SEQ ID NO: 101029 - DNA, 1107 bp, Zea Mays
ctcgcgttttctcgtcagttaacagatctgatccgacccctgaggccaggcaaagactctccgccctcccactcccacctcgccacctcctccttcctcgctcccaattttctttttttttccccttccccttcggcgcggcaggattttctccatctgctttccccatttccgccgtattttattcgatttcgaggtcggttttctgttgcacagggagaaaggtcacgtccaaccgccgcgaactgcgcatgtgaactgtgcccgacgaggcgcgctgcggcacgggtgaggggagctgcgccggagcaccagccctagggttttcaccgccctgccgcgagatggacgtccgggacctgcaccagcagccgcagcagcagcaggctccgccgcgcgtgggatccccgccgcaggccggcgccggcggtgtcatgatgcagcatgccgccgcgttcggcgcggcgccgccgccgtccgggttgccgcaggcctcggcggccaacgttatgcacgggatgtcccttgcctttaaccctatggcttcgccggacgcctcgtcacccataagcagcatgaagattgtggacatgccgctggggtctatgtaccgccctgattccggcgcgacgggcttgcagcagcagcagcccggctccggtggcgttggtgccagcggtggtgctatcgtcgccgtcagcggcggggaccttgtgaagaagaagagggggaggccgaggaagtacggcccagatgggagcatcggcttgggactcaagaccgccgcggcgggggtcactgaagcgacgggtgcccagtccggtggaggcgggtctacccctaaccccgacggcaagcgtagagggcgtcctcctgggtcaggcaaaaagaaacagctggatgctttgggtaatatagcctgcagccctgcaccatatctctgccttccgtttatgtttatgtctcaattctttaaagtgtgctcttacttaagagctaagaccaacaaaatctctatatccttgttatgcttttaactagaggactgggcacagaattttgtttttaaaggacccccacattttaaatgaataaaaaataacagag

SEQ ID NO: 101030 - DNA, 1871 bp, Zea Mays
cctgcctcccgtagtcccgtgcctcaccttctcctctatagcttcttcctttctcttctctccttccctaccctgctcataggtcacagctctgttggtgttccttctcttctccacgcaagcaagcattcactcctttcggtttttaatttcttctctgtttgcttctttctgcatccataaggttttaaaaacaggcagaatcataaacaatccccttctttaaaaaccattgcttccttttccaacacttccttttaacctaaaaacaaagcaccactctgttgcaattggagttttctttctctttttttcgctgcttttctagttttaaatttttttgcttgctagctacatcagtacatgagctagcagaaaagcatggccggcctcgacctcggcaccgctgcgacgcgctacgttcatcagctccaccacctccaccctgaccttcagctacagcacaactacgccaagcagccggaaccctccgaggatgaccctaatggcagcggcggcggcaacagcaacaacggcgggccgtatggtgatcacgacggcgggtcgtcctcatccggcccagccggagatgggcacggtggcagcggcggtaacggggagatggtagcccgccggccccgtgggcgcccagcgggctcgaagaataagccgaagcccccggtgatcatcacgcgggagagcgccaacacgctgcgagcccacatcctggaggtggcgagcggctgcgacgtgttcgagagtgtctccacgtacgcgcgccggcggcagcgcggcgtctgcgtgctgagcggcagcggcgaggtcaccaacgtgacgctgcggcagccgtcggcgcccacgggcgccgttgtgacgctgcacgggaggttcgagatcctgtcgctgtcgggttccttccttccgccgccggctccccccggcgccaccagcctcaccatcttcctcgcgggggggcaggggcaggtggtcggtgggaacgtcgtgggtgcgctctacgccgccggccccgtcatcgtcatcgccgcgtccttcgccaacgtcgcctacgagcgcctccccctggaggaggaagaggcggctcagcaggcagcgccacccggcctccagatgcagccacccagcggtggtgtcgatggcgctggaggcatgggcggtgggccgttccctcccgacccgtcggctgccggtctgccgttcttcaacctgccgctcaacaacatgactggtggtggatcacagatcccgccgggcgccgacggccatggttgggccggtgcacggccaccgttctgacaagtccatgatgcgccggtggtgtaattcaggtttgggagaacaggaaggtgtcaagaagaaagcatcaaaaaagcaatgaacggcacaagggttaagggcagcttgcaaaaggttagcgcacgtatgcttgcaattgcaaggatatatcttatctacttctatctcgatctctgtacaacttccgtagtgtttcgtttgctcggtctgtctgatttcgtgcttttagtttcttcttctttctttttctttttcctcctctcgtgtgcctcttgaaacttggtatgtggtgtaaccttgtcttaatttttaatctggtgtttaataagtcgtcttcaaaagttgttctctaggactcgatcgatcggtgcgcaagtgtgtgctgatcaatgtttccatgcatgcatgggcttctgcttgttgttattgttcattcttatggatgagataagatctccaaccaaattgtgttcagaaaggtagggtatcctagtggcttaattaagctgtcagttcttactttatcatcatgtagctgctactgctaggtgtgtgtt

SEQ ID NO: 101031 - DNA, 2052 bp, Zea Mays
cattggatcgtagaattataaactttataatatgccataaaagctgaaggttgcagtattagtttaaattattctatttgttaatttaaaacgttgtcgcaggctcgcagctgctgttgctgtctgctttcccctcccccggtctacaaagacctcggctttcctttcctacatgctcttcttccttccaaagccttcgcattttcctctcgtcttccccttccccttactccaaattaccccctgctatctacatatcctgtccacactctccctccctgcgctgggccttgcagtttttggttgtgtatcggggaaatggcaatcgacgacgaatcgccgatcagagtcaacagcagaggcggcggcgccatgggaggaggggagtgcgacggggcggagaaccagcggtggccgccgtggctcaagccgctgctggggacgagcttcttcggccaatgcaagctgcacgcggacgcgcacaagagcgagtgcaacatgtactgcctcgcctgcatgaacggcgcgctctgctcccagtgcctcgcctaccaccgcgaccaccacgccatccagatacggaggtcgtcctaccacgacgtgatccgggtgtcggagatccagaaggtgctggacatctccggcgtgcagacgtacatcatcaacagcgcgcgcgtggtgttcctgaacgagcgcccgcagcagaggccaggcaagggcgtcaccaacacctgcgaggtctgccagcgcagcctcctcgacaccttccgcttctgctccctcgggtgcaagatcgtggggacctccggtgacttgcgcatccggaagaagcaggccgttgtcaagaagcatcagaagaagaagaagcagcaggcgcagcagcacaggggcgccgcgttggactcggaggacgactcttcgtccaccagcaccagccgcggcagcgacaggagcagcgtggtgcagagcttcaccccgtcgaccccgccggcgacggccaacagcttccgaaccgggaagcggcgcaagggcgtgccgcaccggtcgccgttcggcagcctcatggtggaggagttctagtcaaaggcgtggtccgaacccgatgccggcccacgcggttgccccctcgccaaaagcagcggtacaccccactgtagcatacgcacttctataccatctactataggtgttgccggatcggccggtctacatagttcatagccacccaagaaaaaaaaaaggagctagtagtagcaagcaataaccaaggccccactgcacgcccgcgcttctggacgacgaggccggtgcaatgtggcacgtacgtcgtacggtacggttacttccattccatagtactgtgctactactactgtagtttacatgcagtcgcagagctgtgctggtagtgagacaacggtttgggttttggtgcctgtaaaaggaaacgaggtagttgtagcagttaccctagtcgtcaccactcatcagcagccagacactactaaattacatagtataataggtgtttcctagtttttaccggcgcttgatatagatgtggatgtacatatatacatatactgtcacagatggggaacggtaggagtgttgttggtactggtgtttgcgtttgttgcctgtaataataaagaggataagaatgctgcatgctcctggcttgtgtgttgcttgtctgattgatggtgggtttatcttctcctgccccctctttttctctgcagtctgtactgtaccatccaccgccagatgctagaaaccgaccatgcaaatgcgtgcatctgcagctgcagctgcagggcggcgggggacgccgggacggtgctaccagcggaacctgattcgtcgctgtgtacggcgagctgagccgtgcccgctgcctaacttggttgacccggcgttcggcatggacagcggcggccggtcgatgccgacgttctcgtcttgctgtgccgaaataactggctccgtcttgctctgccgggtcccatcgtgcccatagtggtcttcgggcgaggcgtggaggcgcgc

SEQ ID NO: 101032 - DNA, 345 bp, Zea Mays
caattgggattaacgatttggtctatcgtacgaatccaccattttctatacacatgttatgtattagtaatatataatgatagagagccggcagcctgtcttttccacacactagattttagggttttcctctgaggctgtgaaaaaactttgtgagaaaaaatattttataagtaagcatgacatgtcagctagatcgagtgtatattgtgaattatgaactttgagtctatgaacttgtgatctttatgaacttgttatactgtgaacttgttatattgtgaacttgtgatctttgtaaactttttatattataaatttgtgatccttgtgaacttgttatat

SEQ ID NO: 101033 - DNA, 273 bp, Zea Mays
atgttatgtcgccagtgtgcttgcctgtgggtcgcccaggatcttttgttggctgctttgtgtagcaggttgttgcctaggcagtggtgttggtttctttggctggcattatctatgtctctgtctatcttattttctgttgtaagacgctggttattagcttctgaaagtatgttatggacggtggaaggctggttggttcctgtcctcctttcctatcctgtgtacctcatgtgtgacatttatttaagcaggggagctggttttgattaa

SEQ ID NO: 101034 - DNA, 1533 bp, Zea Mays
cattatgccccttgccaccagcaccgtgaacccccacgcgacggacaccgtccaacggttggcgccgtcgtagcagatggactgctgcatcagccccgccgtgtccagcttcaccggcccgtcaaacagccgccgcaccgctgcggcgcgcgacctcacctccgggaacagcggcttcacgacgtcgaggtggtgcagcgtcacaatcggcgcgaccgggtgggacgcgaggaggccgaggaggtcgccgtacacgtcgtactggtggaaccccgggtgcttggtgagcggcacgcccagctccgccatgcacgcctggatccggtcatcgctgccgtacagcgccgggtaccggcggaggcagccgtcctgcatccgcgcgagcgcctcggccagcggccggctgatggcgaagccgccgccgccgtacgccatcccgtaggagaagtatatgttctgcaggtggctctcggatagggagccgatgtagtagtgctggcggtggtcgaacttgttgagcacggtgcgtgtaggggaaggcggaggtgtcggacgatatcctgatgtccgggagccccgtgcgcgccgtggacatgttggactcgcgcaccttccggtccagccacacgtaaccacgcatggcgccgcgcgggcgccaccacaccttgatgtactccttacgcttgtcccagaaccgcgacgacgccgcgatgccgaacaccacgtgctgcagcgtcgtcgccgtggacacagctgcggccggagggggcagctgcttctccgccgccgtgaggttggcggacacccgggagaccgagacggcgtccgggacgcagttggaggcggccgacgatgccgaggtgaggaggagctgcagcgtgtagaggaagtagaaggcggtgagggggaggaggagcaggaggaggaagcggaggaaggaggcggtgagcgtctccttcccgccccctcccttcatcatccccgtcgccgtggctcctcacaacctcaccctgactgtctcgaacgaacctctcgaagccgccgtccaccgtttagcccagctaatttagccggcggaatcagaagcggtgggatttcgcgggggtgagaggctcacactggtcgcgcattccccatttcccctccgcgctgccgcctgctgccctccctctcttcagctcggcttctctcctcacggtcggcgatttgggtgagggacggtgagcgcttcggtttcgtgcccggtttggcccacctttttctccccgtgccgctgctgctgttgcatgcctgcgggcggtcgctgctgctgctgtgcagcctggagatttgctgctggcgctgtttggccgcgtccagcattcaagaagcacgcgtgtgggagaggagggagtggatgtctcattcttaagtcttaaccaaaaaatccgaagcggagatttgatagtggttgaaacggattcggagctcgttttggcttgtaggcatacttttgctgaaatttgggtttttcgatgcaccattgccatttgc

SEQ ID NO: 101035 - DNA, 215 bp, Zea Mays
cttgtttggtactggagggttggcgaatcgattttggatgcactggcgtagatgttggctgtccacttgccctgcatttcgaatggtctgggaaggcacggttcgtacatggaaaatgtcctggaattactgttgttttgtttgctgccgtcgtcacgtcggcgtctccgtggaggcgtcgcacgttctggtcccctgtattgctgttcttatcg

SEQ ID NO: 101036 - DNA, 1154 bp, Zea Mays
cacattccaattccgccaccgccacttctttcttccccgcggacgcgtcgaaaagcgagcctctggggagactcgaggccactctgccttcccctcctatcctgtgagctgtaacgcttggaggtatgtgaactatccatataagttcctgtgagctgtctcccgctcactcggtccctgtccatccgtagcgttccattccattccatcccatccccggaaagtgcaaggacgggagggagagcggccggcgcgtcacaaataccaccagcccaggggccatggccgccgcgatgaccagcttcgtcgccaagaacccgctgctcgcggccgcggcgcggcgcagggcgcctcccctcgcggggcgcgccctgccgttctctccgctcgccagcaccagggccccgcgccgcaccgtcacgtgcttcgtgccgcaggacacggcggccccggccgctcccgtgccggcgctggacgaggaggccagggccgcggcggcgcggcgcgtcgcggagaaggaggcgcggaagcggtccgagcggcggacgtacctggtggccgccgtgatgtctagcctcggagtcacgtccatggccgtcgccgccgtgtactatcgcttcagctggcaaatggagggcggcgaggtgccggtgatcgagacgctgggcacgttcgcgctctccgtcggggcggcggtcgggatggagttctgggcgcggtgggcgcaccgggcgctgtggcacgcctccctgtggcacatgcacgagtcgcaccaccggccgcgcgagggccccttcgagctcaacgacgtgttcgccatcgtcaacgccgcgccggccatctccctcctcgcctacggcttcttccaccgcggcatcgtgcccggcctctgcttcggcgcgggcctggggattacgctgttcggcatggcctacatgttcgtccacgacggcctggtccaccgccgctttccggtcggccccatcgccgacgtgccctacttccgccgagtggctgcctcgcacaagatacaccacatggacaagttcggcggcgtcccgtatgggctcttcctgggaccaaaggagctggaggaggttggtggcctggacgagcttgaaaaggagctcgcgcgaaccagaagggccatctga

SEQ ID NO: 101037 - DNA, 1883 bp, Zea Mays
ccgccacttctttcttccccgcggacgcgtcgaaaagcgagcctctggggagactcgaggccactctgccttcccctcctatcctcgttccattccattccatcccatccccggaaagtgcaaggacgggagggagagcggccggcgcgtcacaaataccaccagcccaggggccatggccgccgcgatgaccagcttcgtcgccaagaacccgctgctcgcggccgcggcgcggcgcagggcgcctcccctcgcggggcgcgccctgccgttctctccgctcgccagcaccagggccccgcgccgcaccgtcacgtgcttcgtgccgcaggacacggcggccccggccgctcccgtgccggcgctggacgaggaggccagggccgcggcggcgcggcgcgtcgcggagaaggaggcgcggaagcggtccgagcggcggacgtacctggtggccgccgtgatgtctagcctcggagtcacgtccatggccgtcgccgccgtgtactatcgcttcagctggcaaatggagggcggcgaggtgccggtgatcgagacgctgggcacgttcgcgctctccgtcggggcggcggtcgggatggagttctgggcgcggtgggcgcaccgggcgctgtggcacgcctccctgtggcacatgcacgagtcgcaccaccggccgcgcgagggccccttcgagctcaacgacgtgttcgccatcgtcaacgccgcgccggccatctccctcctcgcctacggcttcttccaccgcggcatcgtgcccggcctctgcttcggcgcgggcctggggattacgctgttcggcatggcctacatgttcgtccacgacggcctggtccaccgccgctttccggtcggccccatcgccgacgtgccctacttccgccgagtggctgcctcgcacaagatacaccacatggacaagttcggcggcgtcccgtatgggctcttcctgggaccaaaggagctggaggaggttggtggcctggacgagcttgttagcagtccggtgagtgaagctactgatactgaagacgcaggagaagaaaagacgcgtccagttgtatgcgttgtccgaacaagcgtgttcatgggccagagtgtgccaaatgagttctagctttaggcgagtgggccaaatgagtgtgggctgcgtcccagggtagtataagtactatgagtctgtaataatcaggacaagaagaatttagcttgggtgtggtggattaaatcactggccgtgaatggacccatcctgcaatattcaagtcgtgcttaagaaaaggatgtcatgcttctggttgatcttgaaaagaatatcattgcaggagcagacttgagtgatttagccgtggagcattctttttgtccatctaaagaaaatggtggtcaagacggtcatcttctcagattgggagacatagcttctaaaggtacccaaccaacaactcaaggctgctgagtttctcctgtaaggccagcatcagtactgcccttgtctctcactcacccaaactatggggtaatcagtgctaatccctgaaagctgaagtagagtcatcaatcattgtctacactatcagcggcttgggggcaagccgcatttcaagcggtggggaatgttagcagtccggtgagtgaagctactgatactgaagacgcaggagaagaaaagacgcgtccagttgtatgcgttgtccgaacaagcgtgttcatgggccagagtgtgccaaatgagttctagctttaggcgagtgggccaaatgagtgtgggctgcgtcccagggtagtataagtactatgagtctgtaataatcaggacaagaagaatttaggtaaagtaatacatctatcgccatcttcctttc

SEQ ID NO: 101038 - DNA, 1454 bp, Zea Mays
tccatccgtagcgttccattccattccatctccctcctcgcctacggcttcttccaccgcggcatcgtgcccggcctctgcttcggcgcgggcctggggattacgctgttcggcatggcctacatgttcgtccacgacggcctggtccaccgccgctttccggtcggccccatcgccgacgtgccctacttccgccgagtggctgcctcgcacaagatacaccacatggacaagttcggcggcgtcccgtatgggctcttcctgggaccaaaggagctggaggaggttggtggcctggacgagcttgttagcagtccggtgagtgaagctactgatactgaagacgcaggagaagaaaagacgcgtccagttgtatgcgttgtccgaacaagcgtgttcatgggccagagtgtgccaaatgagttctagctttaggcgagtgggccaaatgagtgtgggctgcgtcccagggtagtataagtactatgagtctgtaataatcaggacaagaagaatttaggtaaagtaatacatctatcgccatcttcctttcattctctcctacacgctactctcttctctgatcttctctccctcgaatcccagtagcatccagtagctaacatctggtatcactggccatctttttactgttatgcagcttgggtgtggtggattaaatcactggccgtgaatggacccatcctgcaatattcaagtcgtgcttaagaaaaggatgtcatgcttctggttgatcttgaaaagaatatcattgcaggagcagacttgagtgatttagccgtggagcattctttttgtccatctaaagaaaatggtggtcaagacggtactaaccttctcttgatttgcaactcatggctcacgagtgtcaatagcctgctcttggctaacgagaaggccagtgctgttgatgatattggctacggtcttgacaaaagggcaccagttcagtattactcacacaatctttgctcatttcacaccaggtcatcttctcagattgggagacatagcttctaaaggtacccaaccaacaactcaaggctgctgagtttctcctgtaaggccagcatcagtactgcccttgtctctcactcacccaaactatggggtaatcagtgctaatccctgaaagctgaagtagagtcatcaatcattgtctacactatcagcggcttgggggcaagccgcatttcaagcggtggggaatgttagcagtccggtgagtgaagctactgatactgaagacgcaggagaagaaaagacgcgtccagttgtatgcgttgtccgaacaagcgtgttcatgggccagagtgtgccaaatgagttctagctttaggcgagtgggccaaatgagtgtgggctgcgtcccagggtagtataagtactatgagtctgtaataatcaggacaagaagaatttaggtaaagtaa

SEQ ID NO: 101039 - DNA, 1459 bp, Zea Mays
tccatccgtagcgttccattccattccatcccatctccctcctcgcctacggcttcttccaccgcggcatcgtgcccggcctctgcttcggcgcgggcctggggattacgctgttcggcatggcctacatgttcgtccacgacggcctggtccaccgccgctttccggtcggccccatcgccgacgtgccctacttccgccgagtggctgcctcgcacaagatacaccacatggacaagttcggcggcgtcccgtatgggctcttcctgggaccaaaggagctggaggaggttggtggcctggacgagcttgttagcagtccggtgagtgaagctactgatactgaagacgcaggagaagaaaagacgcgtccagttgtatgcgttgtccgaacaagcgtgttcatgggccagagtgtgccaaatgagttctagctttaggcgagtgggccaaatgagtgtgggctgcgtcccagggtagtataagtactatgagtctgtaataatcaggacaagaagaatttaggtaaagtaatacatctatcgccatcttcctttcattctctcctacacgctactctcttctctgatcttctctccctcgaatcccagtagcatccagtagctaacatctggtatcactggccatctttttactgttatgcagcttgggtgtggtggattaaatcactggccgtgaatggacccatcctgcaatattcaagtcgtgcttaagaaaaggatgtcatgcttctggttgatcttgaaaagaatatcattgcaggagcagacttgagtgatttagccgtggagcattctttttgtccatctaaagaaaatggtggtcaagacggtactaaccttctcttgatttgcaactcatggctcacgagtgtcaatagcctgctcttggctaacgagaaggccagtgctgttgatgatattggctacggtcttgacaaaagggcaccagttcagtattactcacacaatctttgctcatttcacaccaggtcatcttctcagattgggagacatagcttctaaaggtacccaaccaacaactcaaggctgctgagtttctcctgtaaggccagcatcagtactgcccttgtctctcactcacccaaactatggggtaatcagtgctaatccctgaaagctgaagtagagtcatcaatcattgtctacactatcagcggcttgggggcaagccgcatttcaagcggtggggaatgttagcagtccggtgagtgaagctactgatactgaagacgcaggagaagaaaagacgcgtccagttgtatgcgttgtccgaacaagcgtgttcatgggccagagtgtgccaaatgagttctagctttaggcgagtgggccaaatgagtgtgggctgcgtcccagggtagtataagtactatgagtctgtaataatcaggacaagaagaatttaggtaaagtaa

SEQ ID NO: 101040 - DNA, 1929 bp, Zea Mays
ccagaagcagccagcaagctcatgcccttcaaaagcctccggcagcccagcgccccagccagctagtggtgatctctcatctcagcagcgcgcctgaacgtgtgctccctgctaagctctgcgcctcgataggcaaaggaaaatcaaaccgatcgtcgtcagattaaatggccggtagcagcgcggagcagctcctctccaggatcgccgccggcgacggccacggcgagaactcgtcctacttcgacgggtggaaggcctacgacatgaaccctttcgacctgcgccacaaccgcgacggcgtcatccagatgggcctcgccgagaaccaactgtcgttggacctgatcgagcaatggagcgtggaccacccggaggcgtccatctgcacggcgcagggcgcgccgcagttccggaggatagccaacttccaggactaccacggcctgccggagttcagagaggcgatggccaagttcatggggcaggtgaggggcggcaaggtgacgttcgaccccgaccgcgtcgtcatgtgcggaggagccaccggcgcgcaggacactctcgccttctgcctcgctgacccgggcgacgcctacctcgtgccgacgccttattacccagctttcgaccgcgactgttgctggaggtcaggagtgaagctgctgcccatcgaatgccacagctcgaacaacttcaccctcaccagggaggcgctcgtgtcggcctacgacggcgcgcggaggcagggcgtccgcgtcaggggcatcctcatcaccaacccctccaacccgctgggcaccaccatggaccgcggcacgctggcgatgctcgccgcgttcgccacagagcgccgcgtccacctcatctgcgacgagatctacgcgggctccgtcttcgccaagccgggcttcgtgagcatcgccgaggtcatcgagcgcggcgacgccccgggctgcaacagggacctcgtccacatcgcgtacagcctctccaaggacttcggcctcccgggcttccgcgtcggcatcgtctactcctacaacgacgacgtggtggcctgcgcgcgcaagatgtccagcttcggcctcgtctcgtcgcagacgcagcacttcctggcgatgatgctcgccgacgcggagttcatggcacgcttcctcgcggagagcgcgcggcggctggcggcgcgccacgaccgcttcgtcgcgggcctccgcgaggtcggcatcgcgtgcctgccgggcaacgcgggcctcttctcgtggatggacctgcggggcatgctccgggagaagacgcacgacgcggagctcgagctgtggcgggtcatcgtacacagggtgaagctcaacgtgtcgcccggcacgtcgttccactgcaacgagcccggctggttccgcgtctgctacgccaacatggacgacgacaccatggaggtcgcgctcgaccggatccgccgcttcgtgcgccagcaccagcacagcaaggccaaggccgagcgctgggcggccacgcggccccttcgcctcagcttgccgcgccggggagcaaccaccgcttcgcatctcgccatctccagccccttggcgttgctgtcgccgcagtccccgatggtccacgccagctaggtagtcaccgagcgttcggtaagactggctgtaggttgtgccctcacatgactgcaaacaagtggacaaaaaaaaagacaagactaataaagggcgtacgtagctagcttgacattacacagagtgacagagacgttgcacaggcgtcagcaggcgtcggcggtaagcagctagtcaagtaggacgcatttgtcctcgattttttcgtgttttttttttgacgaaggggcgaagccccctatttcattaagaaataggaaagtatgaaacaaccgcacccacgcggtaggacctccaaaaa

SEQ ID NO: 101041 - DNA, 2166 bp, Zea Mays
ccagaagcagccagcaagctcatgcccttcaaaagcctccggcagcccagcgccccagccagctagtggtgatctctcatctcagcagcgcgcctgaacgtgtgctccctgctaagctctgcgcctcgataggcaaaggaaaatcaaaccgatcgtcgtcagattaaatggccggtagcagcgcggagcagctcctctccaggatcgccgccggcgacggccacggcgagaactcgtcctacttcgacgggtggaaggcctacgacatgaaccctttcgacctgcgccacaaccgcgacggcgtcatccagatgggcctcgccgagaaccaactgtcgttggacctgatcgagcaatggagcgtggaccacccggaggcgtccatctgcacggcgcagggcgcgccgcagttccggaggatagccaacttccaggactaccacggcctgccggagttcagagaggtaactaactagtagtgattaacaagcaaataaacgccaggatcactgcatcgattagctaggtttgctgctgctgctgctgctgtctaatataatggcgactgcacgcgaaaagcgacggagcagctaccggccggcggctagctagctagctggcactggcagcgcagtcgccttcatgagtccacgcacgcgcggctacgtcttaatgatcgatcggctcgtcgtttgttgcaggcgatggccaagttcatggggcaggtgaggggcggcaaggtgacgttcgaccccgaccgcgtcgtcatgtgcggaggagccaccggcgcgcaggacactctcgccttctgcctcgctgacccgggcgacgcctacctcgtgccgacgccttattacccagctttcgaccgcgactgttgctggaggtcaggagtgaagctgctgcccatcgaatgccacagctcgaacaacttcaccctcaccagggaggcgctcgtgtcggcctacgacggcgcgcggaggcagggcgtccgcgtcaggggcatcctcatcaccaacccctccaacccgctgggcaccaccatggaccgcggcacgctggcgatgctcgccgcgttcgccacagagcgccgcgtccacctcatctgcgacgagatctacgcgggctccgtcttcgccaagccgggcttcgtgagcatcgccgaggtcatcgagcgcggcgacgccccgggctgcaacagggacctcgtccacatcgcgtacagcctctccaaggacttcggcctcccgggcttccgcgtcggcatcgtctactcctacaacgacgacgtggtggcctgcgcgcgcaagatgtccagcttcggcctcgtctcgtcgcagacgcagcacttcctggcgatgatgctcgccgacgcggagttcatggcacgcttcctcgcggagagcgcgcggcggctggcggcgcgccacgaccgcttcgtcgcgggcctccgcgaggtcggcatcgcgtgcctgccgggcaacgcgggcctcttctcgtggatggacctgcggggcatgctccgggagaagacgcacgacgcggagctcgagctgtggcgggtcatcgtacacagggtgaagctcaacgtgtcgcccggcacgtcgttccactgcaacgagcccggctggttccgcgtctgctacgccaacatggacgacgacaccatggaggtcgcgctcgaccggatccgccgcttcgtgcgccagcaccagcacagcaaggccaaggccgagcgctgggcggccacgcggccccttcgcctcagcttgccgcgccggggagcaaccaccgcttcgcatctcgccatctccagccccttggcgttgctgtcgccgcagtccccgatggtccacgccagctaggtagtcaccgagcgttcggtaagactggctgtaggttgtgccctcacatgactgcaaacaagtggacaaaaaaaaagacaagactaataaagggcgtacgtagctagcttgacattacacagagtgacagagacgttgcacaggcgtcagcaggcgtcggcggtaagcagctagtcaagtaggacgcatttgtcctcgattttttcgtgttttttttttgacgaaggggcgaagccccctatttcattaagaaataggaaagtatgaaacaaccgcacccacgcggtaggacctccaaaaa

SEQ ID NO: 101042 - DNA, 1724 bp, Zea Mays
ctatacagtgtttgcttcagttctattgttcgcaaatacatacagacatacagttgtttcgacgtctgaaaaacaatgtcccacactggctgtagagctttcatatttgaaatgaaactgcaaaaggacatatttgtaaaaaaaactgaaaaaaactaaattgcaaaaaaaagttggcaaatactaccagcggtcaaattccgaaggtctgcgtctgaaccagcttagcccacctgcatcgtcgtcgcttttatattaatcagctcacgagtactacgagacaaacgacccagagtacaaggtccccgccagccgttgcccaccgtccgtccaagactcatgtgagccgcgagcccgcgagtgatgagcgccgccgccgccggtgccaagaagcgtctcagcgtcggcgccatcgccggcggagggttcgcgctcgggtgcggctgcagggacgccaaggccgtggcggtggcggtggcgtcgtcggcggcggcgtccacgtcgccctactccgcggccggcacggagacgacgacgaccacggcgacgaccgcgacgtggcgcagggccaggacgccgccgcaccgcccgtcgtcgtcggcgtccgggtccacgggcacgctcaccgtgccctccgcgtcgtcgtcgtcgtcctttccgtgggagcgagcggacgccgagggtgacggcgatgccggcgaggaggtggactgcaagggggaggccacgaccacgacgagcttctccggcctgctgcgccagctcaacgagctcgagcagagcgtcgtgtcgtggggacggaagagcgccagcaaggatcacttgtcgccacctccacggccgttaccagcgctaccagtgaagcaacgacttgcgcacagctgtgatggcgaccgcaaagaaggccacggcaacttctctccgccgccgccgcctcctcatttccagtttcagattacgcagcagcgccagaaggcaaagagcatggataaaggagacagacaggtcgaagtggcccactccaagtccatgcaaccgccaccgccaccgccgccgccgcctccaccattaccactgcagccggagcggcagttcaaggcgcagagcacggacgacgacaaaggcggcaaaaaagaagacgccagcatgttcccgacaccgccgcaggctccgtaccacctgaaatccaagagctcggttctcgacgggagcgtgggcgtggcggtggtgaagcagtccgacgacccgctgggcgacttccggcgctccatggtgaacatgatcgtggagaaccggatcgtgacgggcgaggagctccgcgagctcctccgccacttcctcgcgctgaacgcgccgcgccaccacgaagccatcctcgcggccttcaccgagatatgggacgaggcgttctccgccaggacgacgacgacgatggcgactccgccgcggccgcggcccagcgcaccgacgccaccgcgccgccggcacgccccgcctacgcggtcgtggcgttaactcgtactacatggtcaccctcacccgtcagagaatagttttagcaggtcaacttctcgaaaaaacaactacgccaaactatttttaactcgtactacatggtcacccgtcatagtagttagcatgcatgggtttcgtgcaatgtcatctgtgcagtcacgcagatgctctccggatctgtttgataatgcttacgaatctgttcgact

SEQ ID NO: 101043 - DNA, 1890 bp, Zea Mays
gagactgctaggtggtcctcagttgcatctgaaactctggagtccgaaccgccgtgttgcttggtctcttctgctgaagcagtcaggccaacgaccatgtgagagtgtacatcagcctgtgcagggcaacgtacgcacacgcagaaagcatgccagtgccccaagcgcgcgcatgtgaatatatgcaacatcagacatgtctccggccggcctcccaaggcataagatggctccgtcccgtgcgctccaccgcccatctctcctcgctacggcggcggcgctgctgctgctcattctccctccatcagcagcagcagcagtgccggcgcctgctctcttcatcttcggagactccctcgtggatgcgggcaacaacgactacctcgtgaccctttccaaggccaacggaccaccgtacggcatcgacttcgaatcctccggcggcaacggcaagccgacgggaaggttcacgaacgggatgaccatcgcagatatcatgggtgagtccctggggcagaaatctctcgctccacccttcctggctccgaactcgagtgctgcgatcaccagcagcgggatcaactatggctctggttcttctggcatatttgacgataccggttccttctatatcggaaggattccgctagggcagcaagtcagctacttcgcaaacaccaggtcacagatgctggagaccatggacgaggaagccgtagccgatttcttcagcaaggctctctttgttatagtagcagggtccaacgacatcttggagtttctttcgccgtcagtaccgttcctcggacgagagaagcctgatgacccatcgcacttccaggacgcgctggtttccaacctgacattctatctcaaggagctgagtgagctgggggccaggaagttcgtcgtgtccgacgtcgggccgctcggctgtataccctacgtccgtgctctggagttcatgcccgcggggcagtgctcggcgtcggcgaatcgagtcaccgaaggctacaacaggaagctgaggaggatggtggagaagatgaaccgggagatgggtccggagagcaaattcgtgtacacggacacgtacaggatcgttatggcgatcattcagaaccaccgccaatatggtttcgacgacgcgctggacccgtgctgcggcggcagcttccctttgcctccgttcctctgcattggagccgtcgccaaccgctccagctcgacgctgtgcagcgaccgctccaagtacgtgttctgggatgcgttccacccgaccgaagccgccaacctcatcgtcgccggcaaactcctcgacggcgacgcggctgccgcctggcctatcaatgtccgcgaactgtcccagtacgagcacaaatgattgatgtcgacgacgcgcgcgatgtgaaggccggctgaacgattcattggttttgtgtccttgctgtagtttcgtctgccttgttggggttttctaggctaggcttttatttgcttcaatttcgtatggttgactaggactgcgtgcaaattggtcaatttattccatgttgacgggaagaacgcgagtgcaatttcttctttctctactttttctagggtttggatcagtttcttcttgctctattttttctggggtttggaaagactggaagaaagaaacagccgccttctggtgtgtagactactgctactacgatagtgcgatcccatgtgcgccttggagttaggatatgatcctacacctacacggctacacgtcttgcagttgcagcgcatggccatggctgctgcctgctggtgctggctcagttctcccaataatggacaagcacctcggaactcacagtcacagctaacccctcctctatccgcaggaaaaaaaaa

SEQ ID NO: 101044 - DNA, 1923 bp, Zea Mays
gagactgctaggtggtcctcagttgcatctgaaactctggagtccgaaccgccgtgttgcttggtctcttctgctgaagcagtcaggccaacgaccatgtgagagtgtacatcagcctgtgcagggcaacgtacgcacacgcagaaagcatgccagtgccccaagcgcgcgcatgtgaatatatgcaacatcagacatgtctccggccggcctcccaaggcataagatggctccgtcccgtgcgctccaccgcccatctctcctcgctacggcggcggcgctgctgctgctcattctccctccatcagcagcagcagcagtgccggcgcctgctctcttcatcttcggagactccctcgtggatgcgggcaacaacgactacctcgtgaccctttccaaggccaacggaccaccgtacggcatcgacttcgaatcctccggcggcaacggcaagccgacgggaaggttcacgaacgggatgaccatcgcagatatcatgggtaattaacgtcaagtgtgagttccatgagtacgtgagtccctggggcagaaatctctcgctccacccttcctggctccgaactcgagtgctgcgatcaccagcagcgggatcaactatggctctggttcttctggcatatttgacgataccggttccttctatatcggaaggattccgctagggcagcaagtcagctacttcgcaaacaccaggtcacagatgctggagaccatggacgaggaagccgtagccgatttcttcagcaaggctctctttgttatagtagcagggtccaacgacatcttggagtttctttcgccgtcagtaccgttcctcggacgagagaagcctgatgacccatcgcacttccaggacgcgctggtttccaacctgacattctatctcaaggagctgagtgagctgggggccaggaagttcgtcgtgtccgacgtcgggccgctcggctgtataccctacgtccgtgctctggagttcatgcccgcggggcagtgctcggcgtcggcgaatcgagtcaccgaaggctacaacaggaagctgaggaggatggtggagaagatgaaccgggagatgggtccggagagcaaattcgtgtacacggacacgtacaggatcgttatggcgatcattcagaaccaccgccaatatggtttcgacgacgcgctggacccgtgctgcggcggcagcttccctttgcctccgttcctctgcattggagccgtcgccaaccgctccagctcgacgctgtgcagcgaccgctccaagtacgtgttctgggatgcgttccacccgaccgaagccgccaacctcatcgtcgccggcaaactcctcgacggcgacgcggctgccgcctggcctatcaatgtccgcgaactgtcccagtacgagcacaaatgattgatgtcgacgacgcgcgcgatgtgaaggccggctgaacgattcattggttttgtgtccttgctgtagtttcgtctgccttgttggggttttctaggctaggcttttatttgcttcaatttcgtatggttgactaggactgcgtgcaaattggtcaatttattccatgttgacgggaagaacgcgagtgcaatttcttctttctctactttttctagggtttggatcagtttcttcttgctctattttttctggggtttggaaagactggaagaaagaaacagccgccttctggtgtgtagactactgctactacgatagtgcgatcccatgtgcgccttggagttaggatatgatcctacacctacacggctacacgtcttgcagttgcagcgcatggccatggctgctgcctgctggtgctggctcagttctcccaataatggacaagcacctcggaactcacagtcacagctaacccctcctctatccgcaggaaaaaaaaa

SEQ ID NO: 101045 - DNA, 4169 bp, Zea Mays
ctttttctggctctctctctccctccgcggtccgcgctgcaaacgcgaacgcgatccttgagagcctaggcgccacagccgccaaatttgacaagacagtgagaaaaagggagcctctcttctctctcctcggccgtcccctcccgggcgcccgcgatgccgctgtcgcggtcgctgttcctgctgctcatgctcgcgctggcgccgcttgcgtccctggccgccccggcgccggcgccgccggtggcgaggacggccggggtgcaggcggagatcgacgcgctcctcgcgttccgccgcggcctgcgcgacccctacggcgccatgtccggatgggacgcggcctccccctccgcgccctgctcctggcgcggcgtcgcgtgcgcgcagggcggcgccggcgggcgcgtcgtcgagctgcagctcccgcggctccgcctctcgggccccatctcgccggcgctcggctcgctgccgtgcctcgagcggctcggcctccggtccaacgacctctccggcgccatcccggcgtcgctggctcgcgtcacctccctgcgtgccgtcttcctccagtccaactcgctctccggacccattcccccgtcgttcctcgccaacctcaccaacctcgacactttcgacgtgtccggcaacctcctgtccggccccgtccccgtctcatttcctcccggcttgaagtacctcgacctctcctccaatgcgttctccggaaccatcccggcgaacattggcgcatccatggcgaacctccagttcttgaacctgtcctttaaccggctccggggtaccgtgccggcgtccctgggcaacttgcagaacctgcattacctctggctggacgggaaccttctcgaggggaccatcccggcggcgctggccaactgctcggcgctgctccacctgagccttcaagggaactcgctccgcggcatcctgccgtctgcggtagccgcgatacccacgctgcagattctctcggtgtcgcggaaccagctcaccggtaccatcccggccgaggcgttcggcggccaggggaactcgtctctgcgcatcgtgcagctcggccgcaacgagttctctcaggtggacgtgccgggaggtctcgccgcggatcttcgggtggtggaccttggcggcaacaagctcgctggtccgttcccgacttggattgctggggcgggagggctgacgctgctcgacctctcgggcaatgcgttcacaggcgagttgccgccagcggtcgggcagctcagtgcgctgcttgagctgcgcctcggcggcaatgctttcgctggcgccgtgcctgcggagattggcagatgcagcgcactccaggtgcttgatctcgaggacaaccacttcaccggcgaggtgccatcagctctaggtggtctcccgaggctcagggaggtctatcttggtgggaacactttctccggccagattccggcgaccttggggaatctggcgtggctagaggcattgtccatacccaggaacagactcactggtcgcctttctcgtgagctcttccagctgggaaacctgacgttcctggacctatccgagaacaacctcaccggagagatccctccggccgtcggcaatttgttggctctccacagtttaaatttgagcggcaatgccctttttggccgcattccaacgaccattggcaacctccagaacctgcgagttcttgatctctccgggcagaagaacctctctggcaatgtcccggcggagcttttcggcctaccgcagctgcagtacgtgtcgttctcggacaactccttctctggcgatgttcctgaaggtttcagcagtctctggagtctgcgcaatctcaatctctccggcaattctttcactgggtcaataccggcgacgtatgggtacttgccgtcacttcaagtgttgtcagccgcacacaaccatatttctggcgagctaccagccgagctcgccaattgttccaacctcactgtgcttgagctcagtggcaaccagctgaccggctccatcccgagggacatctcacgccttggtgaattggaggagcttgacctcagctacaatcagctttcaggcaagataccaccagagatctccaactgctcatcactcacccttctcaagcttgacgacaatcattttggcggagacataccagcctctgttgccagcctctcgaagctacagacgcttgacctgtcgtccaacaatcttaccggcagcatccctgcttcattggctcagattcctggccttttatcattcaacgtgtcacacaacaagctttccggcgagataccggcgatgctcggctcccgctttggctcttcgtcagcatatgcttcgaactcagacttgtgcggtccgccgtcggagagcgagtgcggcgtgtaccggcgacggcggaggcggcagagggtgcagcgcctggctctgcttatcggtgtggtggctgctgcggcgttgctcgttgcgctgttctgctgttgctgcgtgttcagcttgatgggatggaggcgtcggttcgttgagagccgtgacggtgtcaagaagagaagacgcagcccaggacgcggcagcgggtcgagcggcacgagcacggagaacggcgtcagccagccgaagctgatcatgttcaattcaaggatcacttacgctgacacggttgaggcgacccaccagttcgacgaggagaacgtgctcagccgaggccgccacggcctcgtgttcaaggcttgttacagtgacggcaccgtgctggcgattctgcggctcccgtccaggtctgccgatggcgccgtggtgatcgacgagggatcgttcaggaaggaggccgagtctctcgggaaggtgaagcacaggaacctcacggtgctccgtggctactatgccgggcctccgccggacgtccggctgctggtctatgactacatgcccaacggcaacctcgccacgctgctgcaggaagcgtcacaccgggacggccacattctcaactggccgatgaggcacctcatcgcgctcggcgtctcgcgcggtcttgcgttcctgcaccagtccggggtggtgcacggcgacgtcaagccgcagaacattctcttcgacgccgacttcgagccgcacctgtctgatttcggcctcgagccgatggtggtgactgcggccgccgccgccgcgtcgacatcggctgcaactgcaacaccacccgtgggctccctcggctacgtggcccccgacgcggccgctgccgggcaggccacgagggagggcgacgtgtacagcttcggcatcgtgctgctggagctcctcacgggtcggcgccccggcatgttcgccggggagaaggaggaggaggaggaagaggacatcgtgaagtgggtgaagcggcagctgcagcgcggcgccgtggcggaactgctggagccgggcctgctggagctggacccggagtcgtccgagtgggaggagttcctgctgggcatcaaggtcgggctgctgtgcaccgcgtccgacccgctggaccgcccggccatgggcgacgtggtgttcatgctggagggctgccgcgtcggcccggacatcccgtccccgtcctccgccgaccccacctcccagccgtcgccggcctgatctcccggcggctccggcattgccgcccgccagattcagttcggtagcttgttccatttttttttctgtcgctgattgatttatttaattagttcagattagttttgctcccgtcgacagtcgaactgacacgtgggggccggtaaccgtttcccgccagtagccgttggttaggggaggccagtcagcagcgggcacggcggagcagggagccatgtgcgcactgctgctcaagcgtgtgcgtgtcgtcgtgctgcgcatgtggggtttccctgcccaagcatcggcaacggctactagaggcaggacatgcctgtcgcctcctggccgttgatctcggccgatctgtacctgtactctctaacgattgatttcgtgtagtggcctgcttggcttcctgggatccttgtcttttaatctcgtttcaccaatgcaacaatcggccgttttgtgccacgtgctgtacatttgtctgtattttgttatcctgattgattggccca

SEQ ID NO: 101046 - DNA, 1554 bp, Zea Mays
cactcgactaatcaggttaactccctgccgtcccgcttccagaaagaaccgatctaaaacctccccgccacgcgaagcaaaatcgcgtgccttcccccgacagattcacttccctccttcccactccaagcaccaagctaccaacccgaactgcctcacggccgcgccggtcactgcctccgccgcgccgcgtcgccactcgccaccccgcgcgcactagtctttgccatggcgctgcgtggcagcatccaaatggatacgggaagcgggcccgcgctccagtacctcctgtgcctcgcctgggtcgcggcgaccctccccatcgccgccgccgcgctgccgatccccgcggccgctggcggcaggttcatccacggcctgctctgcgccttctcgtcccgcgggaagacagtcaggccctcgtcctcgtcctcgtccaaggcgaggttcaccgtttcacaaaaatgcttcttgcatttttacgtggtgggtgcggttgtgacgactagcttgctacttgcaatatggttctatgcatacatgaaaatgacacctttgatgccagaacaatcgagttactccacaattgctagtcatcttgttggtggttcaaattcattccatttggcaaatttctggtcatcacgccccatggaacacaagtatcgtgtctggcgtactgtatttgtacttatattgatggaaattcaggtcctgagacgcctatatgagactgaacatgtcttccactacagtccttcagctcaaatgcacatcataggatacctaacgggtattttctactatgtggccgcacctttatcacttgctagttcttgtcttcctgaagcaatacagtatcttcgatatcaaatagctgagttcatagtgaagggtagagcaagaatgccagatctatcaattgacccatcacatctcttgaagcctcttctaaagttggggtggtgccagtggattggtgctgttattttcatctggggctcactccatcagatccgctgccatgcaattcttggatcattgcgtgaacacaaagattctgatgaatatgtaattccgtgcggtgactggtttagtctagtgtcttgccctcattaccttgctgaactagtaatatattttggcatgttggtggctagtggtggatcagacattccggtgtggttcctgtacctttttgtgataacaaatttgtcctttgcagcggtacaaacacataaatggtatcttcagaaatttgaagattaccctcgttctcgctacgcaatcgttccatttgtatgctagatgtccccataaatgccaacagcatttgttgtctgttttcatctgcttgcaccagtcaggcatgcaacagatattgatgtaaatgtgactatgcaatgttgaacttaagtagttccgatcattctgaatgtgcttagaaggttataaggttatgtttgtgtatgtagattataacacacagatatttgatgtaaagtagtattaattaatactttttagcattaatgaaaatgaagtccttcagaa

SEQ ID NO: 101047 - DNA, 2046 bp, Zea Mays
gctctcaaatcttcaatccattcggaaaggttcatccaccttcaggcagagcacagtcctcactcctcagtctacactccacactccacactccacacgcaagcacgcacggcgggcggcggtcgcccacctggacctggtaccggaacaccagagctcaaggtcggccatggattcgccactgctgagcacacccgctctgctggcgctgtccctgctccttctagcgctctacatcgctcgccggcgccgcggcggtggcaagaaccggaactaccctcccgtggcgggcaccgtgttccaccagctgctccacttcaggcggctgatggagtaccagacggagctcgcccacaggtaccgcacgttccgcatgctcaccccgacctgcaactacgtgtacaccgtggagcccgccaacgtggagtacatcctcaagaccaacttcggcaactacggcaagggggcgatgatccacgacgtgatggaggacctcctcggcgacggcatcttcaacgtggacggcgccaggtggcggcaccagcggaaggtggcgagccacgagttctccacgcgggtgctgcgcgactacagcagcggcgtgttccgcgacacggccgcggagctcgctgggatcgttgcggtggcggcgcggggcgccgggcccggggagaggccgctggacgtcgcggacctcctgatgcggtcgacgctggactccatgttcaaggtcgggttcggggtcgacctgggctcgctgtccggctgcggcgacgacgagggcgcggcggcgttcgccagggcgttcgacgacgccagcgagcaggtcctgtaccgcttcttcgacccgtcctggaaggtcaagaggctcctcggtgtctcgtcggagggggccatgaaggggtcgatccgcaccatcgatcaattcgtgtacggcgtcatcgacaggaagatcaagcagatgggcagggaccaagaattcgccaagaaagaggacatcttgtcaaggttcctgatggagcgggagagcgaccccggctgcttcgacaacaagtacctgcgggacatcatcctcaacttcgtgatcgccggccgcgacaccacggcgggcaccctgtcgtggttcctctacgtgctctgcaggaaccagcacgtccaggacagggtcgcgcgggaggtgcgtgccgccgccacgggcgaccgcgacgacgtcggcgtgcaggagttcgtcacgtgcttaaccgaggacgccatcagcaggatgcggtacctgcacgcggtgcttaccgagacgctccggctgtacccggctgtgcccatcgatgtgaagtattgcttttcggatgacacgttaccggacggctacgctgtcaagaaaggtgacatggtgaactaccagccgtaccaaatgggcaggatgaagttcctgtggggcgcggacgccgaggagttcaggccagagaggtggatcaacgacgacggcgtgttcgtcaacgagagccccttcaagttcacggctttccaggcggggcctcgcgtctgcttgggaaaggagttcgcgtacaggcagatgaagatcttcgcagcggtgctggtctacgccttcaggtttgagatgtgggaagccaatgctaccatgggctaccggcccatgctcacgctcaaaatggacggcccgctgtatgttcgggcatcgctccggcaatgaggtgtgggcgactgggcggcggccacgaagtcaaaatacgttgcgtactgttatgatactatcttagatattaaacttgttaaaataaatattttattttatcttagctaaaagactgaaaataatacgagttgaagagaaactcaacctttttgttatagctcgctcgatctctcgtcatctttcaactagcgaaatggtattatatgaaagtgttgtactatgtatacgtgtgacttcctttcgtattagacctcggtagtatctggtagcccatctatgatgtaatgattgattaataagcgagaagagggaagagcaataaatctactcgtttc

SEQ ID NO: 101048 - DNA, 2063 bp, Zea Mays
gctctcaaatcttcaatccattcggaaaggttcatccaccttcaggcagagcacagtcctcactcctcagtctacactccacactccacactccacacgcaagcacgcacggcgggcggcggtcgcccacctggacctggtaccggaacaccagagctcaaggtcggccatggattcgccactgctgagcacacccgctctgctggcgctgtccctgctccttctagcgctctacatcgctcgccggcgccgcggcggtggcaagaaccggaactaccctcccgtggcgggcaccgtgttccaccagctgctccacttcaggcggctgatggagtaccagacggagctcgcccacaggtaccgcacgttccgcatgctcaccccgacctgcaactacgtgtacaccgtggagcccgccaacgtggagtacatcctcaagaccaacttcggcaactacggcaagggggcgatgatccacgacgtgatggaggacctcctcggcgacggcatcttcaacgtggacggcgccaggtggcggcaccagcggaaggtggcgagccacgagttctccacgcgggtgctgcgcgactacagcagcggcgtgttccgcgacacggccgcggagctcgctgggatcgttgcggtggcggcgcggggcgccgggcccggggagaggccgctggacgtcgcggacctcctgatgcggtcgacgctggactccatgttcaaggtcgggttcggggtcgacctgggctcgctgtccggctgcggcgacgacgagggcgcggcggcgttcgccagggcgttcgacgacgccagcgagcaggtcctgtaccgcttcttcgacccgtcctggaaggtcaagaggctcctcggtgtctcgtcggagggggccatgaaggggtcgatccgcaccatcgatcaattcgtgtacggcgtcatcgacaggaagatcaagcagatgggcagggaccaagaattcgtgagcgagctctctgcagctgcctcgcccgtttggatgcacatgcattcacgggcgctcgattggcgctccggccatttcttctttttactgacacacacggacggtggtgtttgtctttggcaggccaagaaagaggacatcttgtcaaggttcctgatggagcgggagagcgaccccggctgcttcgacaacaagtacctgcgggacatcatcctcaacttcgtgatcgccggccgcgacaccacggcgggcaccctgtcgtggttcctctacgtgctctgcaggaaccagcacgtccaggacagggtcgcgcgggaggtgcgtgccgccgccacgggcgaccgcgacgacgtcggcgtgcaggagttcgtcacgtgcttaaccgaggacgccatcagcaggatgcggtacctgcacgcggtgcttaccgagacgctccggctgtacccggctgtgcccatcgatgtgaagtattgcttttcggatgacacgttaccggacggctacgctgtcaagaaaggtgacatggtgaactaccagccgtaccaaatgggcaggatgaagttcctgtggggcgcggacgccgaggagttcaggccagagaggtggatcaacgacgacggcgtgttcgtcaacgagagccccttcaagttcacggctttccaggcggggcctcgcgtctgcttgggaaaggagttcgcgtacaggcagatgaagatcttcgcagcggtgctggtctacgccttcaggtttgagatgtgggaagccaatgctaccatgggctaccggcccatgctcacgctcaaaatggacggcccgctgtatgttcgggcatcgctccggcaatgaggtgtgggcgactgggcggcggccacgaagtcaaaatacgttgcgtactgttatgatactatcttagatattaaacttgttaaaataaatattttattttatcttagctaaaagactgaaaataatacgagttgaagagaaactcaacctttttgttatagctcgctcgatctctcgtcatctttcaactagcgaaatggtattatatgaaagtgttgtactatgtata

SEQ ID NO: 101049 - DNA, 3881 bp, Zea Mays
tacttctctgcctcgtctccttcctcgctgccgtccttacctcttctccacgaaatctgccattgctgcttgtttctcttctgcagcctcgctaggcatctgcagcttcgctaggcatcgctaacatgccctcgatggccaccaccgcagcgcccgcggccgatctctcggcgcccgataagcagcaggactcggctcttccggagctcactacgaaattcatggtggacatgaaatgtgagggatgtgtaacagctgtgaaaaacaagctgcaaactcttgaaggaataaaaaacattgaggtggacttgtctaaccaagttgttagggttctgggatctcgtccagtgaagataatgttagatgtcctttatcaaacaggtcgagaagcacgactgattggacaagggaacccaaatgatttcttagtttctgctgctgtagctgagtttaaagggccagttgtatttggtgttgttcgtctggcccaagtaaacatggagttggctagagtggaagccacgtttagtggtctatcacctggtgaacatggatggtcaataaatcagtttggggatttgacaagaggtgcagaaagcactggcaacatatataatccgccagatcatttatctgaacaaccacttggtgacctgggaactctagaagctggagagaacggggaagcccatttctcaggaccgaaggagaaattgagagtagttgatttgatcggccgctcgattgctttgtatgcagcgaaggacaaatcagaccctggcatcgccgcagcggtgattgcaagaagtgccggcgtaggagagaactacaaggaactctgcacttgtgatggtgtcaccatttgggaatcaagctaaacctgctagcagcaaattttccgtactatttgcttccatttcttgtacactcattaatgtagaaacaatcaaactggcaactgaacatttggaataagcatgaatacattgaagaataaaggcggttctcatgtggagctttgacagtatttttccgttggttagtgaacctgttctgccgctgccgctgccgctgcgacacaacggatctctggcttgattacccaggcccagaggttcctgctccattgcttgctctaaacgcacggtaaataaacgaagctcacatcggtggcagccatgtgaggacaagggggctccggacgatgtggacgccgtcgctccaagacagcgctccgaactccggtgtcttctgggcagccttggttgtcatcgtcaccttgtaggttagcttctggttcgaacttgtgaagtgcagggtgcttggttcgacgacaatgtctgcgcctttgaactctgtaaccttgacatggtaagtcgaagacggcgggccgacgttcgtcacggtgcgacgcaccgtcagcgcagcagatggctgctccgcgaagaccgcggagatggccggataattcaagtcacccggcgagctgaaggtgtgcttgcatgtcttgctcgagttcttggtgaaggacctgagctgcaacggcgtcaggttctccacgcagaggaactccaggtagtcgtcctggccgatgtcgtagaccaggccagggttgagggcacgcagcgggtgtatgtgcccagctccgtgatcgaacggcgtggacgccttgccggtggccgcgtccttcagcgaccggtacgtgttgtcgtggacgtacgcggtggtcatcagcgcggacttgatcttcgcggggctccagtccgggtggctggccttgatcagcgcagccacgccggcgacgtgcgggcacgacatggacgtccccgacaggatgttgaagccgacccgccggcggtcgctggacaagctcgacgggctggcgtcgccgctccatgccgccaagatgttcacgccgggcgcgatgacatccggcttgaggatctccagggtcaggaagtttggtccccgggacgagaacgcggctacgactggcgatgggcggatcccgagcttcgtcccgtcgaagctgagcgtggccgttggtttcggggcggttttgctgtacttcttggcggcaatgccttcagactgcccaacggccactgctggcaggaggtggctgtcggcgacaagctcctcgccgtttgccggtgtgttggcgagtatcatgcccgcggcaccggcgttcttgacaacctgacccttctgcacccgaggactaatgccgcggtcgcagatcacaatctttccagcgacctcgtggggctggagtgtcccctccaggcacagggacctggggtcagggatgctcgagttgccgcccatgtagactaacgggtactgctccttggacgaaagacctcgccggcctttgtagagcgaaaccccggtgaggtttgcgccattgccgagcgtcaccgtggccgggaagtcccggtccatggtgctcgcgcccaccgtggttatccacggcgacaggttggtgaggcttatggggtccgggccgccgttgccgcccgagcaggcgacgaacacgcccatctgcatggcaccgaacgacgcgatggccaggctgtcgcggaagtagggggacgagccgccgccgagcgagatggagagcacgtcgacgccgtccgccacggcgcggtcgacggccgccaggatgtcggagctgaagcagccccccgtccagcacaccttgtacgccgcgacgcgggcgcggggcgccatgccacgggcgacgccgctggcgtagccgaagaggctggcgtccggcacgggcgcgcccgcggcggtggccgcggtgtgcgtgccgtggccgtcctggtcccgcggagatttgagctcggccgtctcgttgatggggcccgacgaggcctcgtagccgttgtagaagatgcgcgcgccgatgatcttgcggttgcagctggctacggtgaagccgcggccggtctggcacaggcccttccacctggccgggacagggccgaggcccttgtcgctaaagctggggctctcgggccagatgccggtgtcgagcacgccgacgacgacgtcgtggtcggccaggccggcggaccatatgctgtcgctgatctccgggctgatgcccaggaagtccgggctcctggtggtgtgcagctgcaggaccgtctccgggagcacggccaccacgccgtccgcctcggccatccgctcggcctcgtcctcgtccagcttcgccgcgaagccgtggaacgccgtctcgtagttgtagacgatcctcgcggcgtaatggtcgtccgcgtctccttccagctgcacagagctcacggatttcacagtggatgcgtaccattcgtggtggaaatcgaacgagctcggcatctcagacgcggccatctgaacgatgtaagtcttgggagctgccccgcgagcagggaggcatgcttgcagagccacgagagctaggcacagcggcagagccttccatctgacgccgccagaacccatggaggacgagtctcgaagctgtgatggatggacagaggtggaggagccagctcagctgccgtgccttatgtatgctgctgctgctcgtacagcgtcctcgagtgagctccggtgtccggtgtgggaagcaggggagtggagattggagagtgaacagcaggcgccagacgggaaggtggtggttgccggtgtcctcatttattaagtttattcatcactcggctcagctgtgcggtgggactgtaaatggcgagagccgttgtttggtgcgctcatgccatgccgccattacttcttggagatattttaagtgggccattgacgcttgtgttcttctgcttctcctgcctgcaagctgcaaggttagattcgagcaaagggaaagg

SEQ ID NO: 101050 - DNA, 2024 bp, Zea Mays
atggttaatttcggaaagaaattgatggccgatcaagtggaagaatggaaaggatactacatcaattacaagctgatgaagaaaatgttaaagcaatatgtccaacagacccagcatggtgggaaagatcgtgaacaagttcttaaagagttttcaaggattcttgatgaccagattgaaagaatcgtgctttttctgctacaacaacaaggccatcttgccagtaggattgaggaattgggagaaaaacgctctgctctggaagagtatgacatatcacaagtttatcagctacatgatgcatacagagaagtcgggcttgatcttataaagcttctccgctttgttgacgtgaatgctaccggtatacgcaagatactaaagaaatttgataaacgctttggctacaagttcactgattattatgtcaccactcgcgcaaatcatccttattctcagcttcagcaagtctttaagcaagtgggaattgtagctgttgtaggtgcattatcgcgcaaccttgaatatctgcaacatcatgaaggaagctttgtatccatctatgatcgtccagcagttactttgaaggaccctattatagaccaagtaaaccatgcagtacagaagctcacgcatgccacgaattttatgcaattcttgggacaacactcgcttattgtccaggaagatgcacaaagcgggtcagaggaccttgttgatgatcagagctaccatttcatgtcgctgatgcttaatctagtgaacacattcctttacatggtgaatacatatatcattgtgccgactgcagatgactatgcagtaagccttggggctgctgcaactgtctgtggtataattattggatcgatggcagtcgctcaagttttctcctcagtctacttcagcgcctggtcaaataagtcctacttcaaacctcttgtattcagtagcattgtgctgtctcttggaaacctgctgtatgcattggcatttgatctaaattcactgtcagttctcctaattggacgactgttatgcgggttaggctctgcaagagcagtgaaccgtcgctatatcagtgactgtgtgcctctcaagatgaggctacaagcctctgccgggttcgttagtgctagcgctcttggcatggcatgtgggcctgctctggctggttttctccagactaaattcaagatatactcgatcacttttaatcagagcacattgcctggatgggttatgtgcattgcttggcttatttacttactgtggctatggtttacattcaaggagccggaacacttcactaaaactttggtcaatgaacatccatcagaatcagatagtaaggcccagctgttgatatacttcatgctcaagtacgcaatggagatactactctcagaatcaagcgttgtcaccacatactattttagctggtctactagttctgtggctatctttctagcgattcttggattaacggttcttccagtaaatgcaatcgttggaagctacattacgaacttgtttgaggataggcaaattttgctggcatctgaagtcatggttctcattggtataatcatgagctttcgtttcacacctcactactccattccgcaatatgtcatttcagctctcatcacatttgtattttctgaggtgcttgaaggagtgaatctgtccttgctttcacgagtgatgtcgtcaaggctttcccgagggacctacaatggtggactcctttcaacagaggccgggacgttggcccgtgtagttgcagacgccaccattactgcagccggttatctaggcacggacctccttctcaatgtcactcttctgccacctcttgtgatctgcatagtctccatcgcagcaacactctacacttacaacaatctctactgaagaagcatgtctcttgtagctgtacaagtgtatagcaatgttcctaagctaaaacgattcctgcccagaatgggtttgtatatctgttcgagcatggtttgtaaaca

SEQ ID NO: 101051 - DNA, 1341 bp, Zea Mays
atggcagcgtctgtccgcgcccacaaatcgtgcgcagattcatggcagccgcgccccgctcccaaatttcgtctgcgccagggatccgccacgaatcgcccatggcagacgcgctccatccgcccccttccatccatggcagctgctccatccgcgccctctttcttcccatcctccccctcaaagatctcgtccacctggtccccccgtaataggatctgggagcagggccaccaatgcagacgtccctcgtcgcggcgcagctgcggcctacgctcgacgtgcccgacctgctccgccacgctgacctggttatccgaggtcagccgcatcgaggaggtcgagcagcccctcaagccgacgctcaccttcgcctcgccgtccgagagaagattgtgtcttctgttctccacacaattcagtgaattcactcaatctgtcagcctgatttacttatcggtccggacgaattttggtgatattgagtttggcttctttcctcatgttgcacctaagactgtcgaacacattttcaaacttgtgcggcttggatgctacaacacaaatcacttcttccgggttgacaagggtttcgttgcacaagttgctgatgttatgtcaggtcgaaccgcccctatgaatgaggagcagaaaaaagaagcggaaaaaacaattgttggtgaatttagtagtgtcaagcatgtcaggggaatcctcttcatgggaaggcactctgatccagacagtgttggctcttccttttctattcttctgggcaattcaccgcatcttgatggccagtatgctgtatttgggagggtcactaaaggtgacgatacattgactaaactagagaggcttccaacccggagagaaggcatttttgtaatgatgtctgcaaatatctggggaaagcctgttaaaacggtggcttttgttttcttattgcatttaagtgttcatttggatagagctgtcctttctgctttgatacagattgcttgtcgatatattgatctagagagctgtgaagcagaaaaatctattctccggaggagactttctgaatcagcatcagaagttgagcgatgggtgattagtcacactagggaaaacagttgtgtcaaattcgaaagaattctagactctagagtacgaactgaacccacttcaactacagtctccaagaggagaggagcttctttacttgattggagcttggtttctcttattaatatgatcatcttctttgctattcgatttgctgttccaagaagaggtatggtgagaatgatggttatccttctcagaaagggagagatcaagaaagatgagatataa

SEQ ID NO: 101052 - DNA, 713 bp, Zea Mays
ccccccgaagccaagcgcaacttccaaagtccaaagcaggcaggaaggcgcccctgtatggccgaggcggaggcgagcagcaggcggcgccgctgcggcggcgcggcggagctgtgcgcgacggccgcgcggctcgcggacgcggcctcgtggtggtgcgcggtggcgctcgtggcgctcgtgctgctgggcgcgctccgcgccgagaccgacggcgtcggcgacggcgacggcggcggcgcctaccgtgcgctccggggcccgcgcctgggcggccccgcggcgcggccgtgcgaggaggtgtacgtggtcggggaaggcgagacgctgcacagcatcagcgaccggtgcggggaccccttcatcgtggagcgcaacccgcacatacacgaccccgacgacgtcttcccggggctcgtcatcgcgctctgccccaccaggaacacctagccagcgccgctctctgctcttcacagccgacgctcgtgggtcggggcgccgccgcgtgttctgtttctgctgcactgcactgcacctgctgctgcactgcatgcacgggtagcgtagcgcgcgccacgccacgccagagatggacatggacgcaaaagggtccttgcgttcttcgtttccttcggtccttttttttttggttttacactttgctccaaaactggtccttgcgatcttgacaaccttcttggagatgggaaaaa

SEQ ID NO: 101053 - DNA, 2117 bp, Zea Mays
tcgactccaccaaccaagcatcccagcttccaaaggggagacaagccgagaagcgctccctcatctcccccccacaacaggaactacgtacgatctcgtaaattgccttggagtttacctgcgcccgtgcgccgcaaaggccattcactcccttggcctcctcgcgacacacgcgcgcagagcagagcagagcagtttctctgtttctccagcagccatgacgtcgtgcgcgggagacgccacggtggcgtgccgggacgatgcgcgacggctcggggacgcggcctgcgtcatcgtctacccattgctcgacaaggctgcggaggtccacatcccggtggctggagacgaggcgccggccgtgcccgtgcccgtgctcacgagcaagtcgcccgggcggctcgccaccgcggtgagggaggctctgtccgtatccctgggcgtggcgttcccgacgacgccgttggtgtcgtccagcgaggcgcgtggagaggcgcggtcgattctgggcctcgcgctcccgatgatcctgacgggcctcctgctgtacctccgctccatgatctcgatgctcttcctcggtcgcctcggcgggctggccctcgctggcgggtcgctcgccatcggctttgccaacatcacggggtactccgtgctctccggcctcgccatgggcatggagcccatatgcggccaggcattcggcgcgggcaacttcccgctcctcggagtcaccacgcagaggacggtgctgctgctcgtcgcggcggccgttcccatcggtggcctgtggatgcacatgcggcctctcctcctcctgtgcggccaggacacgggcatcgcgtcggtcgccgagacctacattctggcctcgctcccggacctcgtcctccaggcgttcatccaccccgtgcggatatacctccgggcgcagtccatcaacctgccgctcacggtctgcgccgcgctagccattgccatacacctccccgtcaactacgtcctcgtcaccgtcctcggcctcggcatcaggggggtggcgttcgcctccgtgcttgcgaacctgaacctcctcctcttcctcctcgcctacatcctcttcaggggcgtccacaggcgcaccggcggcttcgtgctctcccgcgagagcttccggggctggggcgagctcgtcagcctcgcgctgccgagctgcgtgagcgtctgcctcgagtggtggtggtacgagatcatgatcctgctgtgcggcctgctgctgaacccgcaggccacggtggcgtccatgggcatcctgatccagaccacgtcgctcatctacatcttcccctcctccctcagcttcggcgtgtccacccgcgtcagcaacgagctgggagcgaaccggcccgaggaggcgagccgcgccgccgcggtggggctcgtgctcggcttcgcctccggcggcctggcctccgcgttcgcgttcctggtgcggaacgtgtgggcgagcatgttcacggccgacccggcgatcgtcgcgctcaccgcgtcggtgctgcccatcctaggcctgtgcgagctcggcaactgcccgcagacgacgggctgcggcgtgctgcgcggcagcgccaggcccaaggacgccgccagcatcaacctccgctccttctacctcgtggggacgccggtggcgctcgtcctggccttctggctccactacgacttcaagggcctctggttcgggctcctggcggcgcaagccacctgcatggtgcgcatgctgctggtcatcggccgcacggactgggcgtgcgaggccaagcgctcgagggagctcaccggagccggcggcgccgtggccaaggacagcgacgtcaaggctggcggagacgagaagtcgcgcttgctgttctacacggacatggaacaagcgaatgctcactctgctgatcagtgttgatagctgcagcgcgagccgcatgtgtgctctaatctactctctttccccctcattttgtgtggcggggaggaggaaccagaggctgacagagtgacaattttgttcaccatttgacatgtaaagattttgctgattatgatcacatacagtatctagagctgacacgaaagattctttt

SEQ ID NO: 101054 - DNA, 435 bp, Zea Mays
tgcaggttgcttgcttcgtgcatggccttcccggttcccgctgtacctgtacgctaggccaccgcgcggcaagtagtactacgtttcgatccaggagctgtcgatcgcggaggcgcccggctggcgctctgggcctggcactggcaaaccgatccgcagccgcagtggtgcgtgacctgcagcgagcggattgcactctgcgaacgtacagtgctatgcagggaaaaggcgagggaggaggccggtcggtcgagctagcagatgcggagcagcctggcgtccatcgcgcgcgtcgtcgccgccaccggccgcagccgagcctggttggtggggcatgcagttgcagctttgagggctgaggttgtccagtcaccagtcagtcagtgtgtggccgccggcgcatgttgcattcagcgccagcatgcatgatcagaa

SEQ ID NO: 101055 - DNA, 1553 bp, Zea Mays
ttttccaagtctcacctccacacctccgcctctctttctcttgagtcgccttcctcttgttctccacccacacgcgtggcaacgggagagcagcccatgcatggtcttggtctcttgcgcttgccccttgctccttggggagcaagtaggttgaattgaagaagaagcggccgaccgacggttatcaaactgtcgctaaccgcatagagaagaaaggcatccatcctacacagctcctctcgcattgcgcgcgtcgaaatcttgcagttccgatgggggtgggcgcgtcgagcgtgggggcggcggaggggtgcggccgggggtgggggccgcggcacacgtcgctgggcgacatgccggagagctgcgtcgcggcggtgctgctctacctcgacccggccgagatctgccaggtggcctgcctcaaccgggcgttccggggcgcggcctccgccgactgcatttgggccgccaagctgcccgccaaccacaggtacctcgccgcgctcgcggccgcggcagacgacgacgactgcagctgcggctgcgacggcgtggcggccgaaggcagctgttccactgtggcgatcaagaaggagctatacgcgcgcctctgccggcccaccccgttcgacggcggtaccaaagagttctggatcgagaagaagggaggtttctgcatgtccatctcctcaaaggctatgtcgatcacaggaagaaatgatcggaggtattggagcgacctgtccacagaggaatcaagatttcacagcgttgcctatcttcggcagatctggtggctagaggtggatggtgagatcgacttctgcttccccgccggatcatacagcctattcttccggctccacctgggccggccgcgcacgcgccgagctcgccgccgcggtggctccgacaacgacatccacggctgggacatcaggccggcgcggttccggctctcgacctcggaccaccagcagcacaccaccgcgtccgaggctcacgctcgcctagctagccccggaagatgggtcctttaccacgtcggcgacttcgccgtgtcgagcccagacgaggtgacggagctcaggttctccatgatgcagattgactgcacgcacacgaaaggcggcctgtgcgttgattcggtctgtatataccccaagcgtcacggcgggtacgaggaggactgcgtgttctgccagaagatcttgtaagagcgcttggatcccttggccagcctgtttcttcttcttcttcttcctttcgggatgttctctgtccaaaagggtagtgcgcatattctcttttatttttcttcttcttctttctgagagattttgcatgaacattcacttttttttggggggggggggggggggcaaggtcttattctgtatttagttttggtagtgtcagtaagtagggaggtcaggaagtagatagtaggtaataggattatagcgatttatgattggggcgattgagacgtgtgtgttgaaattgaaacaggtgtttcattacatgtacatagatcttgtgtttataca

SEQ ID NO: 101056 - DNA, 453 bp, Zea Mays
aggaagaaagagctaacgagaaggaggagaaagaccttgtggctcagcagaacatgtatgcgcagctgcttcctctcgctttgccggcgccgccaatgcctggcatgggtggccctccacctccgatgggtggaatgggcatgcctcccatggccgggatgggtatgctgccgatgggccctggtccgatgccagcattcggaatgggaggctactgaattgtggttttgcagggagcttagatgatgatgtgaattgttccattgcaagcataagtggaacctcattggagctatacatggtttacagtttgggaaatcaatattctttattgtaccaggaaactttttttgggcgagtcagtgaaatcagcctgacccatagtttgagaagcgcaacctatgatatgttttacaatgggatcggaaataggatgattaggttgtttcagca

SEQ ID NO: 101057 - DNA, 694 bp, Zea Mays
gttgctgcagcttcagagttgatgcctgattgcggggtcaattgtcaggttatatgacactttgaatttgaactaatttaaccttgtgcagataattgaactactctctgtccgtcctcctattgatgcaaagttgaaactgatgaaagaaatagctgaggaacatattcctgtagtgcactttgaatagaagccctgtttcaattccgtcccaaaaatctgattcttgttgctctttggacaggctggtcagttgcatcttatgaaaccatatatggttgcagttcagagtaacaatgtctctgccgtgaatgaagccttgaatgaactttatgtcgaagatgaggactacgagagactccgtgaatcagttgacatgcatgacaactttgaccagattggtcttgcctagaagcttgagaagcatgaattgctggagatgaggaggatcgccgcctacatttacaagaaggctggcaggtggaagcagtccattgctctatcgaagaaagacaacatgtacaaggactgcatggagacatgctcacaatctggcgaccgtgaactatcagaggacttgctcgtgtatttcattgagcagggtaagaaagaatgttttgcttcttgcctcttcatttgctatgacctgatccggccggatgtcgctcttgagcttgcatggatggacaacatg

SEQ ID NO: 101058 - DNA, 747 bp, Zea Mays
accaatcgcatcgcagcagcacgagcacgccgtgccgctccaaccgtctcgcttccccgcttagcttcccatcgcgccatggcgtcgaccaaggctcccggccccggcgagaagcaccactccatcgacgcgcagctccgtcagctggtcccaggcaaggtcttcgaggacgacaagctcatcgagtacgatgcgctactcgtcgaccgcttcctcaacatcctccaggacctccatgggcccagccttcgcgaatttgtccaggagtgctacgaggtctcgaccgactacgagggcaaaggagacacgacgaagctgggcgagctcagcgccaagctcacggggctggcccccgccgacgccatcctcgtggcgagctccatcctgcacatgctcaacctcgccaacctcgccgaggaggtgcagatcacgcactgccgccgcaacagcaagctcaagaaaggtggcttcgccgacgagggctcagccaccaccgagtccgacatcgaggagacgctcaagcgcctcgtgtccgaggtcggcaagtcccccaaggaggtgttcgaggcgctcaagaaccagaccgtcgacctcgtcttcaccgcgcatcccacacagtcctcccgccgctcgctcctgcagaaaaacgccaggatccggaattgtctaacccagctgaatgctaggacatcactgacgatgacaagcaagagctcgatgaggctatgcagagagtggtacgtacat

SEQ ID NO: 101059 - DNA, 669 bp, Zea Mays
accaattccccaatttttttgtttccattccacaaaaccacaaccgcgcggttttctccctcccccgactcccgcggcgcaagcgcagcccacccaagcgccatggcccccgccgcccccgacgccgacgcctatgatatcccgtgggtggagaagtaccgcccctcccgcgtcgctgacgtcgtcggaaactccgatgccgtcgcccgcctggaggtcattgcccgcgacggcaacatgcccaacctcatcctctccgggcctccggggaccgggaagacgacgagcatcctggcgctggcgcatgagctcctcgggcccagctatcgtgatgccgtgctggagctcaatgcctcagatgacaggggtttggatgttgtgcggaacaagatcaagatgtttgcacagaagaaggtcaccctacagccagggcggcacaaaatcgtgatcttggatgaggctgacagcatgacatcaggagcacagcaagctctgcgaagaacaatggagatctattcaaacaccactagatttgcacttgcatgcaacacatcatcaaagataattgaacccattcaaagccgatgtgctatcgtcaggttctcaaggctctctgatcaggagatcctcggtcgcctcatgattgttgtggcagctgagaagtgttaa

SEQ ID NO: 101060 - DNA, 585 bp, Zea Mays
atgggagggacctcgctggctgagcgagctggaagagagaagcaaggggagggcgcagggaaagaagaagcgctcggcgcagggagctgggcgccagagcaggaggcttcagggtgcggcgcagggacacgcgcggtcagcgaacttgagttggagccagggagcaggaaatcagggcgacggcgcgtgcacagagaagcgaccgcgccatgggcgttcgcgggcggacgaactaagaagcttgagggagctcggcgagctgcacgggaggagcacgcagggaggtacgccggcgagggagcaggagagagaagggagtggctgcgcgcggcgaggaagctccagagaactgccatgggagctcagcagagaggaaacgcaggggatgggagacgcgctggcatgggaggaaactgggggtcgcggcatgggcgatctggaacaagcgagcagaggggcgcggtccgagcgccgggcgccgggcggagtcgagggcgtgacccagggcgagcgccggctggaagaagagcagcgcgcactggaaataacgacggccgggcggtgggatttttcttcacacgttga

SEQ ID NO: 101061 - DNA, 88 bp, Zea Mays
gtcaaggcttcgtctactcaagggacgcgatctcgcctcgtccgagccgagcctcgggcgggaacagtagtcccagacggattctcgc

SEQ ID NO: 101062 - DNA, 1300 bp, Zea Mays
ccatttgggctctgtccaagtgtaactcagcccatcaatccaaacgggcactctctagaaacaacgcacgtgtcggctaccgcaaggaaagtcgggaaccttctagaacccgctggatgcttctctcacctaggtccaacttaatctcatccccaaatccacctttctagatgcgtcttcctcgctctgtcctctcctcacactttcctttccgcggcccctctgctcaccgcactccgttgcctgatggcgttgccggcggcggggacgccgcccttcctgacgaaaacttacgccatggtggaggactcggccacggacgatacgatctcgtggaacgacaccggcacggccttcgtggtgtggcgccccgccgagttcgcccgtgaccttcttcccaagcacttcaagcacagcaacttctcctcgttcgtccgccagctcaacacctacggattcaagaaggtagtcggggacagatgggagtttgccaacgacggcttccggagaggcgagaagcaccttctcgccggaatacagaggcggaaggggaccggcgccgtggcggcggtaccggtgccgggcataccggcggggataccgttaccgctctcgtccccgcccacgagctctggcggggagccggcggtctcctcgtcgccgccgcgtggctcgacggctggagttagcggcgcggtggccgagctggaggaggagaacgcgcggctgcgacgcgagaatgcgaggctggcgcgggagctggcccgcgcgcggcgcctctgcgacggcgtgcgccagctcatggctcggtacgacgacgaccaaggcagaggcggagatgaggatccggcggacggcgacgaggggcatggcggcagtggggaaggtcccagcggcccagaagtgaagccaatgctgttcggcgtcccaatcggggccaagcggctacgcggtgcgcgtggtgatggagacgatgtagatgacggcgaggacaacgacgaggaacaagatgaagacgacgagaggcaaacggtgcggaagcagggggttaaagcggccaggaggaacgaggcgtcggatctggacgtgctgacgctgtccgtgcgggcggccgcggcggcgaggacgggcggaggatcacgtgaccgcaaaagccccattaacgcccaccccgataggagcctcagtctagggctgaaatgactgacactcgtgtagagtactgtagtatcgattgtagtattgtattgagtggtgctgcacggttgaattgaatcatctagaaatcaaaatttagcaa

SEQ ID NO: 101063 - DNA, 920 bp, Zea Mays
ctccacgaggattcggccattcggataaaccacagcccacaggccacaggcgcgacaacaatgaccggcagcgacaccgccgcggcctcggcgcagcaggcggacgcggccgctatatgcggtcagatcgcgtccgtcttctccgcgccctcgccgcgcccgcccgcgcgctccgtcctggtctcggagctggaggccgcggcctcgcggggcggccgcgtgttcgtgcacggcgtcgggcgggagggcctcatgatgcgcgcgctctgcatgcggctggcgcacctgggcctccccgcccactgcgtcggcgacgtcacggcgccgccagcgggcggcggggacctcctcgtggcctcggcggggcccggcgcgttctccaccgtcgacgccatctgcggcgtggcgcgcggcgccggcgcgcgcgtcctgctgctcacggcgcgcctcgaaggggacttcccgcggcgtcaggccgacgtggtggcacacctccccgcgcagaccatggcggatgacgaggagggggcgggggagacggagacggagacggaggcggaggggtcgccggcgcgggcgaagctgccgatgggcagcctgtacgagggagctatgttcgtgctgttcgagatggtggtcctggagctcgcgcgcgtcttgggtcagagcccggcccagatgagggcccgccacacgaatttggagtagtgttgagcgccgctgccggtgtttggcaactacagagcgtcactgccaactcacacgagtggcttggctacacactggggtatttgtgcgctgaagggaagtgggaaggagcagattgatccttgttcttgatagcgtgtgtgtaatcagagctaataatttgttagcagctgagtaataaagtcacgcccagttttttttttaaaaaaaaa

SEQ ID NO: 101064 - DNA, 246 bp, Zea Mays
gttatatggaaatgaagccaaacagtaacgttggtaatttggcatatccttagtactttcctgttttaactgagcctttatgagactgtaaatggcctatctacacccaaaaaacttgctaacgagatccttccaactttcaagttgggtgcatttcccttcacagtcaacgctggactgttctatgttctaacaaccttcctcagtggctctatgcaacaatttacttatatatattaagatggc

SEQ ID NO: 101065 - DNA, 366 bp, Zea Mays
acccaagtgggtatctgtgtgttgcaaagtgagcatgaaatggccacatacaataagtgcctgggtgaatttgacctcatgggcattccacccgctccaaggggcttgcctcagattgaggttacatttgacatcgatgctaatggaatcgtgaccatcttagccaaatataaggctacgaggaaggatcagaacatcaccatccgatcttcgggtgggctgtctgaggctgacatctagaagctggtgcaagaaggtgaactgcgtgcctagaagaatcaggaacggaaaagccctcaccaactaatctaattcttttgtccattattttgctgagaagtccatccctcgataagtgttcccttc

SEQ ID NO: 101066 - DNA, 1513 bp, Zea Mays
gcgcctcgccttttgaggagggagcgagcgagagagacggaaagagatacggtgcagggcgctgcgacctgcgactgcgaggagaaagggcggcgccagcttggacttgccggtgccgtcgcgcgcgagagagagaaggaagcgacaacctgcttgccggtgcggcagctctgggcagggcttacacatataataacaagggtggtcgatcagagagcgagggaggagctgaggacaggagggaacaaaagggcaagtttggttcgctccttgctagggcccggtgagctgagctccatatcatccagatccaggtaggtgaggtcgtgaggcgatccaagagatgggcggcggcggcaggaatggcactgtggtgaggcggtacatccggtccaaggagcccaggataaagtggagcgccgacctccaccgcagcttcgtacaggccatagactgcctcggcggccaacacaaggccacgccgaagctcatcctccagttcatggccaccagggggctcaccatatctcatgtcaagagccatctccagatgtacagagctgcgaggcttggcgcaggaaggagagggatgcaagcccagctgctgcaaaggaggcactcatgcactggtgatgagcaagaggagttcctgcgcccaccaccacctctgaaaagggcccggatggggtacgagagcatgcagggactgggaagccatggagtcagtgatgcgcggaccgcagccgctgccgggggcctgtactgcatcgatgattacatgcaagccatggcggccatgggctggagaataaaggaggagggactcaccagatggcagtggcagaggagggatgctgctgcgccttccgacctccaagccatgggatgtttggtgcaagaacctgacccctttaagcagatgcgccgaccagaagcacgccgtcttggttcagcgctgaggaatcagcaggacgactccagcgaagaggacggaaacggatgccccctcctctccagcagcagcttcagcaatgcagcgaacgacgacgagccgtctgatgagcagtgctccctctcgctgtcccttggcctggacacaaaaggcgcccgtgccatggcaacctcctcgccgagcggcgagagcagctgcatcctcacggcggcctcgcctgcgaggaggagctctagcgactgctgctgctccggccattcaggctgcttcgtcggcccgggcgttagcctggaactctccctgtccatctctggatcctacctagatcactccgattctgtacatcgacccggtccggccggctgctcgcgttggtgatcgccgcgcttgttttggatgttcctggcgtcatggccgtgttagaaagttacaagtagccaattccaagttggtagtaggataatgaccgtagaacatgttacttctagctaagctgctacggtactagtcagaaaacgtgtacaatgcgcactgttatatctatcacatttaatttagata

SEQ ID NO: 101067 - DNA, 1641 bp, Zea Mays
atgttgatcgccaccaccatgccacgaggtttcgctttcgcggcgccatgccgcagcctccagacgacgacagtcaggtgcaaggctaccggcgccgccgaccgccgcgacgtgctcctcggcctcggcggggcggcggcgtccggcctcctcaggtcgtcgtcctcgtcgagcagcggcggcgcgcccatccaggcgccggacctccggaactgccacccgcccgacctccccgacacggcggaggatgtgaactgctgcccgagcccggggatcgtcgacttcactccttcgccgcggctccgcgtgcgcccggccgctcacctggtggacgcggagtacgtggccaagtacgagaaggccgtggcgctgatgaagcagctgccggacgacgacccgcgtagcttcgcgcagcagtggcgcgtgcactgcgcctactgcgacggcgcgttcgaccaggtcgggttcccggacctggagatccagatacacaactgctggctcttcttccaatggcacaggttctacctctacttccacgaaaggattcttgggaaactcgtcggcgacgacaagtttgcactgccgttctggaactgggatgcgcccggcggcatgtcgctgccggcgatctacgccgacaagtcctccccgttgtacgatgaaaggcgtgaccctgctcaccagccgccattcacgcttgacctcgactacgacgggaccgagccaaccataccaagagctcagcagatcgatcagaatctaatgatcatgtaccgtcagatgatctccggtgccaagaagaaggaactcttctttgggatgccttaccgccagggcgaccagccagatccgggcgcgggcaccgtcgagagcatcccgcacaacccagtacacttctggagcggcgacccgaggcagccgaacggcgaggacatgggcaacttctactccgccgcgcgcgacccgctcttcttcgcgcaccacggcaacatcgaccgcatgtggtcggtctggaacggcctccgccccggcaacagcgacttcaccgaccccagctggctggacgccagcttcctcttctacgacgaggaggcccgcctcgtccgcgtgcgcgtccgggactgcctcgacaccgctgccctgggctacgcctaccaggacgtcgccctgccgtggctgaacgccaagccggccaaggaggccgggtctccggcgcccaccgcgggcgcgctcccggcgacactgaaccagaccgtgcgggtggccgtgacgcggcccaagacctcgaggacccgcaaggagaaggacgccaaggaggaggtgctggtcgtccaggggatcgagatcgctgaccactcgagcaggttcgtcaagttcgacgtgttcgtgaacgactcccagagcgggggcggcatgccggcggcggcgcagtgcgcggggagcgtggcgctgacgccgcacgcggtccggcctgggaagggcaagggcacggtgaagaccgtggcgaggttcggcatatgcgacctgctcgacgacatcggtgctgacggggacaagacgatcatcgtgtcgctcgtgccgaggtgcgccggggacatggtaactgttggtggcgtcgggatcgagtatgtcgggtga

SEQ ID NO: 101068 - DNA, 2626 bp, Zea Mays
gatttgtagtggggcatgtaagcttgtgggagaggaaagcagcaggagacgaaggtagtagacaaggaaaagtatgccaaagaaaatgagagaacaaccttcttagcttctcctccagtctctctccaccaccgctctatctcctcggtaggaagaagagcaagcaagagaggagcaagctagctagcggtacaagggagagtgagcggcgaaggggacggacgaattgaagaacacctgccagtccgatcgagctggtggtgccgccaggataaatcgggaggtatatgatggcgtcgaattcaccggcggcggcgttctttggtgttagggatggggaccagcaagaccaccagattaagccgctgatatcaccgcagcagcagcagcagctggcagcggcactgcccagcgtggcgtccggccaaggcgcgccgacggcggcggcgcagccaccgcccaagaagaagaggactatgcccgacccagacgctgaggtgatcgccctgtcgcccaagacgctgatggcgaccaacaggttcgtgtgcgaggtgtgcagcaaggggttccagcgagagcagaacctgcagctgcaccggcgcgggcacaacctgccgtggaagctgaagcagaaggacccgctgcaggcgcagcggcggcgcgtgtacctgtgcccggagccgacgtgcgcgcaccacgacccggcgcgcgccctgggcgacctgacggggatcaagaagcacttcagccgcaagcacggcgagaagaagtggaagtgcgacaagtgctccaagcgctacgccgtgcagtcggactggaaggcgcactccaagatctgcggcacccgcgagtaccgctgcgactgcggcacgctcttctcccggagggacagcttcatcacgcaccgggcgttctgcgacgcgctcgcgcaggagagcgcgcggctgccgccgaccagcagcctcagcaacctcaccagccacctctacggcgccgccaccaacgcgggcaacatggcgctcagtctctcgcaggtgggctcccacctcacctccactctccaggacggccaccaccaccgcccgtccccggagctcctgcgactcggcgctacggccggcggcggcggtggcagcagcatcgccgcgcgcctcgaccacctcctgtcgcccaacggtgcctccgccttccgcccagcgcagcctccgtccttcttccacaacgcgggggcatcggtcggccaggactttggggatgacgcgggcaatgggccgcactcgttccttcagctgcaggccaacaagcctttccatggactactcatgcagctgcccgacctccaaggcaacggtgctgggggccccggcgcctcaggcggacccagctctctcttcagcctgggtttctttgctaacaatggcaacagcagctcggggtccagtcacgagcatgcaagtcaggggctcatgaacagtgaccagttcagcggcggcggttcggaggcacaggcggcggcagggatttttggcgggaacttcgttagtgctggtggagatcaagttccaccgccggggctctacagagaccaagcctccatgctgccgcagatgtcggcgaccgctctgctccagaaggcggcgcagatgggcgcgaccacgagcgccaacggcgccagcgcggcgtccatgttccgaggcttcgcgggctcttccccacaacacgtgcggccagcgacgccgcacatggaacagagcgacgcgaacctgaacgacctgatgaactcgctcgctggaggcggtggcctcggtgccggcggaggaatgttcggcggcggcagcaacggcgccggccacgcgggcatgtttgatccgaggcagctgtgcgacatggcggagcgcgaggggaagttcggcttcggccagggtggtggcggagacatcacgcgggacttccttggcgtcggcggaggcggcctcgtgcgcgggatatcgacgccgagaggagaccaccagagcagcagcgatatgagctccatggaggctgagttgaagtcggcctcgtccttcaatggaggcaggatgccatgacagagaccgacccatcgatcaagattatacagacataagctcgcgcacagtaatccagagacttgatcaaccagatgcaatgggagagcagtaaggtcgtcgtcatgaagttagaaactgagtcgcatgagtgagttcatgcatgggataaagctagctagctagctttcatcatccgaagggaccttgggtgagaaagatgcgtcttctctgactaatggagcagtaagctggagtgcgagttggacgcatgtgatcacccatttgctcgtgcatggcgggggttggtgttcattctgctggtctcgttcttgttggttttcccttcctttgtagttggataatctttgttggatcaagtatagtttttctagtgatagtatctataaggatgttatttgtagctagcttataaaggggcgtgatttgcagcttaatttgctccattcccctcctcctattttttatttccttttctcttgtatcaaaacaatacccccccttacaatgtcattaatcatgctagctgaaattcatca

SEQ ID NO: 101069 - DNA, 2655 bp, Zea Mays
gatttgtagtggggcatgtaagcttgtgggagaggaaagcagcaggagacgaaggtagtagacaaggaaaagtatgccaaagaaaatgagagaacaaccttcttagcttctcctccagtctctctccaccaccgctctatctcctcggtaggaagaagagcaagcaagagaggagcaagctagctagcggtacaagggagagtgagatcaatcccaagcacgtacgtatgagaagcggcgaaggggacggacgaattgaagaacacctgccagtccgatcgagctggtggtgccgccaggataaatcgggaggtatatgatggcgtcgaattcaccggcggcggcgttctttggtgttagggatggggaccagcaagaccaccagattaagccgctgatatcaccgcagcagcagcagcagctggcagcggcactgcccagcgtggcgtccggccaaggcgcgccgacggcggcggcgcagccaccgcccaagaagaagaggactatgcccgacccagacgctgaggtgatcgccctgtcgcccaagacgctgatggcgaccaacaggttcgtgtgcgaggtgtgcagcaaggggttccagcgagagcagaacctgcagctgcaccggcgcgggcacaacctgccgtggaagctgaagcagaaggacccgctgcaggcgcagcggcggcgcgtgtacctgtgcccggagccgacgtgcgcgcaccacgacccggcgcgcgccctgggcgacctgacggggatcaagaagcacttcagccgcaagcacggcgagaagaagtggaagtgcgacaagtgctccaagcgctacgccgtgcagtcggactggaaggcgcactccaagatctgcggcacccgcgagtaccgctgcgactgcggcacgctcttctcccggagggacagcttcatcacgcaccgggcgttctgcgacgcgctcgcgcaggagagcgcgcggctgccgccgaccagcagcctcagcaacctcaccagccacctctacggcgccgccaccaacgcgggcaacatggcgctcagtctctcgcaggtgggctcccacctcacctccactctccaggacggccaccaccaccgcccgtccccggagctcctgcgactcggcgctacggccggcggcggcggtggcagcagcatcgccgcgcgcctcgaccacctcctgtcgcccaacggtgcctccgccttccgcccagcgcagcctccgtccttcttccacaacgcgggggcatcggtcggccaggactttggggatgacgcgggcaatgggccgcactcgttccttcagctgcaggccaacaagcctttccatggactactcatgcagctgcccgacctccaaggcaacggtgctgggggccccggcgcctcaggcggacccagctctctcttcagcctgggtttctttgctaacaatggcaacagcagctcggggtccagtcacgagcatgcaagtcaggggctcatgaacagtgaccagttcagcggcggcggttcggaggcacaggcggcggcagggatttttggcgggaacttcgttagtgctggtggagatcaagttccaccgccggggctctacagagaccaagcctccatgctgccgcagatgtcggcgaccgctctgctccagaaggcggcgcagatgggcgcgaccacgagcgccaacggcgccagcgcggcgtccatgttccgaggcttcgcgggctcttccccacaacacgtgcggccagcgacgccgcacatggaacagagcgacgcgaacctgaacgacctgatgaactcgctcgctggaggcggtggcctcggtgccggcggaggaatgttcggcggcggcagcaacggcgccggccacgcgggcatgtttgatccgaggcagctgtgcgacatggcggagcgcgaggggaagttcggcttcggccagggtggtggcggagacatcacgcgggacttccttggcgtcggcggaggcggcctcgtgcgcgggatatcgacgccgagaggagaccaccagagcagcagcgatatgagctccatggaggctgagttgaagtcggcctcgtccttcaatggaggcaggatgccatgacagagaccgacccatcgatcaagattatacagacataagctcgcgcacagtaatccagagacttgatcaaccagatgcaatgggagagcagtaaggtcgtcgtcatgaagttagaaactgagtcgcatgagtgagttcatgcatgggataaagctagctagctagctttcatcatccgaagggaccttgggtgagaaagatgcgtcttctctgactaatggagcagtaagctggagtgcgagttggacgcatgtgatcacccatttgctcgtgcatggcgggggttggtgttcattctgctggtctcgttcttgttggttttcccttcctttgtagttggataatctttgttggatcaagtatagtttttctagtgatagtatctataaggatgttatttgtagctagcttataaaggggcgtgatttgcagcttaatttgctccattcccctcctcctattttttatttccttttctcttgtatcaaaacaatacccccccttacaatgtcattaatcatgctagctgaaattcatca

SEQ ID NO: 101070 - DNA, 555 bp, Zea Mays
atggcgaaagctacaccagctgcagctcttgctgcctccctgaaaatggtggctccagcaataccaagcctcccacctcgtccacgcttgctcctcgcaactctccagcgccgccccagcgcccacatcagcagcaccccagtggtggctcgggtggcggctctggatcttcgcagcagtgctggaaacgcggcaagcgcgatggtggacacactcctggtggcagcagccacacctttggtgcccccaactcatccatggaccatgggccacaactactacaacccctggacggacgccatctatgtggctggggcaacgtcctccctcttcctcttcttcacgtcctcctgctgggccgacctagcagtcacacgctctcatcgccggaacgcccggacagtggggtgtcccgctgcagcttatgggcctccacctggctatgttggcccggtctcctctccgcctggttgggaccaacacaccttggccaccaacttccagaccatgactcttcaacgaccacaagactggtattttggtactggtgcttag

SEQ ID NO: 101071 - DNA, 1013 bp, Zea Mays
atgtgcatcgcggcatgggcgtggcactgccacccgacgcaccgcctgcttctgctgttcaatcgcgacgagtatcactccaggccgacgcagccggcgcagtggtgggcggcgggggaggaagccaaggaaatccttggaggcagggacgagctcggcgggggaacgtggatggggtgcacgagggatggtaagctcgccttcctgaccaacgtgcgggaacccagctctctgatcggggccaagaccagaggacagctcccggtcaggtttctacagggcagcctttgtccattggagtatgccacagaaattgcaaaggaagcagatcagtacaacggctttaaccttatattggctgatgtgaactcaggaaccatggtttacatctctaatagacccggaggcgatcctgtgattcaaacagttgctcctgggcttcatgtgctttcgaatgctgcaattaattccccttggccaaaggcaatgcgcttaggacagagtttcaaaaggtatttgacaatacacgatgatgcagaagcctctttaaaacaaatggtagaagagttgatgatggatactgccagacctgatagatctatggtgcctgacaccggcgacgaccctgagtgggagtacaagctaagctcaatattcattgacactgcaaaggaacaggcaaaaaccatggcacgatatggaacacgaagcatggtggcactagcagcgaaattggaaggtgaggtaacattctatgaaagatgtacagtaatgtttatccaaataccacaagaagaattggttgcatgtgctattccccccttgccgctgtataattttggaggacatcaattctttgctggcacaaaattgctgaaactacaatgtcaccctatgattctttatatgctttgtgcctgtattggagagtacaccaagagtgtttcaactgaggtcacatctgtatccaatccaaagtcagatgggcataaattaggatattacatctgact

SEQ ID NO: 101072 - DNA, 870 bp, Zea Mays
cgtgttggtttagtagttctggatttcataagttttatgtaacactatgggctatattctagtttcatcaagtaaacctagtcttgttcacttcatatgtgctctgctccctagtccctattattaagtattgatgtacatataccatcattttctactcttttaagtaattttcagactaagtatcttccaataatttaaaatcaaacaattgtcgaacatggtttacttgtggcattcgtttctcaccgtgcaggcaatgcgcttaggacagagtttcaaaaggtatttgacaatacacgatgatgcagaagcctctttaaaacaaatggtagaagagttgatgatggatactgccagacctgatagatctatggtgcctgacaccggcgacgaccctgagtgggagtacaagctaagctcaatattcattgacactgcaaaggaacaggcacgatatggaacacgaagcatggtggcactagcagcgaaattggaaggtgaggtaacattctatgaaaggtacttggagaacagtttgtggaaggagaatctcatacagttccagatggagaaggcacaataggacttgagagaaacttaagaacactcgcaaagactggtcgattgcttattattttgctatcactttatctttaaagtgtatagcaaggcatatacaagagcagtgtataatatggctactattaattacccttttgtgcagatgtacagtaatgtttatccaaataccacaagaagaattggttgcatgtgctattccccccttgccgctgtataattttggaggacatcaattctttgctggcacaaaattgctgaaactacaatgtcaccctatgattcttt

SEQ ID NO: 101073 - DNA, 1190 bp, Zea Mays
acctttctgcaaatacagtagcatactcgcatagatagatccaaccatatttcgatcctcttcaggacgtttccacctccatcaccgctggtcggctatgtgcatcgcggcatgggcgtggcactgccacccgacgcaccgcctgcttctgctgttcaatcgcgacgagtatcactccaggccgacgcagccggcgcagtggtgggcggcgggggaggaagccaaggaaatccttggaggcagggacgagctcggcgggggaacgtggatggggtgcacgagggatggtaagctcgccttcctgaccaacgtgcgggaacccagctctctgatcggggccaagaccagaggacagctcccggtcaggtttctacagggcagcctttgtccattggagtatgccacagaaattgcaaaggaagcagatcagtacaacggctttaaccttatattggctgatgtgaactcaggaaccatggtttacatctctaatagacccggaggcgatcctgtgattcaaacagttgctcctgggcttcatgtgctttcgaatgctgcaattaattccccttggccaaaggcaatgcgcttaggacagagtttcaaaaggtatttgacaatacacgatgatgcagaagcctctttaaaacaaatggtagaagagttgatgatggatactgccagacctgatagatctatggtgcctgacaccggcgacgaccctgagtgggagtacaagctaagctcaatattcattgacactgcaaaggaacaggcacgatatggaacacgaagcatggtggcactagcagcgaaattggaaggtgaggtaacattctatgaaaggtacttggagaacagtttgtggaaggagaatctcatacagttccagatggagaaggcacaataggacttgagagaaacttaagaacactcgcaaagactggtcgattgcttattattttgctatcactttatctttaaagtgtatagcaaggcatatacaagagcagtgtataatatggctactattaattacccttttgtgcagatgtacagtaatgtttatccaaataccacaagaagaattggttgcatgtgctattccccccttgccgctgtataattttggaggacatcaattctttgctggcacaaaattgctgaaactacaatgtcaccctatgatt

SEQ ID NO: 101074 - DNA, 1185 bp, Zea Mays
acctttctgcaaatacagtagcatactcgcatagatagatccaaccatatttcgatcctcttcaggacgtttccacctccatcaccgctggtcggctatgtgcatcgcggcatgggcgtggcactgccacccgacgcaccgcctgcttctgctgttcaatcgcgacgagtatcactccaggccgacgcagccggcgcagtggtgggcggcgggggaggaagccaaggaaatccttggaggcagggacgagctcggcgggggaacgtggatggggtgcacgagggatggtaagctcgccttcctgaccaacgtgcgggaacccagctctctgatcggggccaagaccagaggacagctcccggtcaggtttctacagcctttgtccattggagtatgccacagaaattgcaaaggaagcagatcagtacaacggctttaaccttatattggctgatgtgaactcaggaaccatggtttacatctctaatagacccggaggcgatcctgtgattcaaacagttgctcctgggcttcatgtgctttcgaatgctgcaattaattccccttggccaaaggcaatgcgcttaggacagagtttcaaaaggtatttgacaatacacgatgatgcagaagcctctttaaaacaaatggtagaagagttgatgatggatactgccagacctgatagatctatggtgcctgacaccggcgacgaccctgagtgggagtacaagctaagctcaatattcattgacactgcaaaggaacaggcacgatatggaacacgaagcatggtggcactagcagcgaaattggaaggtgaggtaacattctatgaaaggtacttggagaacagtttgtggaaggagaatctcatacagttccagatggagaaggcacaataggacttgagagaaacttaagaacactcgcaaagactggtcgattgcttattattttgctatcactttatctttaaagtgtatagcaaggcatatacaagagcagtgtataatatggctactattaattacccttttgtgcagatgtacagtaatgtttatccaaataccacaagaagaattggttgcatgtgctattccccccttgccgctgtataattttggaggacatcaattctttgctggcacaaaattgctgaaactacaatgtcaccctatgatt

SEQ ID NO: 101075 - DNA, 1182 bp, Zea Mays
acctttctgcaaatacagtagcatactcgcatagatagatccaaccatatttcgatcctcttcaggacgtttccacctccatcaccgctggtcggctatgtgcatcgcggcatgggcgtggcactgccacccgacgcaccgcctgcttctgctgttcaatcgcgacgagtatcactccaggccgacgcagccggcgcagtggtgggcggcgggggaggaagccaaggaaatccttggaggcagggacgagctcggcgggggaacgtggatggggtgcacgagggatggtaagctcgccttcctgaccaacgtgcgggaacccagctctctgatcggggccaagaccagaggacagctcccggtcaggtttctacagggcagcctttgtccattggagtatgccacagaaattgcaaaggaagcagatcagtacaacggctttaaccttatattggctgatgtgaactcaggaaccatggtttacatctctaatagacccggaggcgatcctgtgattcaaacagttgctcctgggcttcatgtgctttcgaatgctgcaattaattccccttggccaaaggcaatgcgcttaggacagagtttcaaaaggtatttgacaatacacgatgatgcagaagcctctttaaaacaaatggtagaagagttgatgatggatactgccagacctgatagatctatggtgcctgacaccggcgacgaccctgagtgggagtacaagctaagctcaatattcattgacactgcaaaggaacaggcaaaaaccatggtgttcagtatttcagtagctaccattattctgtttggaaataaattatatccatttttcttcttgatttcaggcacgatatggaacacgaagcatggtggcactagcagcgaaattggaaggtgaggtaacattctatgaaaggtacttggagaacagtttgtggaaggagaatctcatacagttccagatggagaaggcacaataggacttgagagaaacttaagaacactcgcaaagactggtcgattgcttattattttgctatcactttatctttaaagtgtatagcaaggcatatacaagagcagtgtataatatggctactattaattacccttttgtgcagatgtacagtaatgtttatccaaataccacaagaagaattggttgca

SEQ ID NO: 101076 - DNA, 756 bp, Zea Mays
acctttctgcaaatacagtagcatactcgcatagatagatccaaccatatttcgatcctcttcaggacgtttccacctccatcaccgctggtcggctatgtgcatcgcggcatgggcgtggcactgccacccgacgcaccgcctgcttctgctgttcaatcgcgacgagtatcactccaggccgacgcagccggcgcagtggtgggcggcgggggaggaagccaaggaaatccttggaggcagggacgagctcggcgggggaacgtggatggggtgcacgagggatggtaagctcgccttcctgaccaacgtgcgggaacccagctctctgatcggggccaagaccagaggacagctcccggtcaggtttctacagggcagcctttgtccattggagtatgccacagaaattgcaaaggaagcagatcagtacaacggctttaaccttatattggctgatgtgaactcaggaaccatggtttacatctctaatagacccggaggcgatcctgtgattcaaacagttgctcctgggcttcatgtgctttcgaatgctgcaattaattccccttggccaaaggtaagagtgtaagatatacatggattttagaaagatattgtgaatgttaggaacacaattatttttggaagttgtaatacacttcaaagttgagattctggttctttgaagaatctaatgccacaatacttgtttggtcatggctgtagtctcgacagtccaggtctatttgatct

SEQ ID NO: 101077 - DNA, 313 bp, Zea Mays
acctttctgcaaatacagtagcatactcgcatagatagatccaaccatatttcgatcctcttcaggacgtttccacctccatcaccgctggtcggctatgtgcatcgcggcatgggcgtggcactgccacccgacgcaccgcctgcttctgctgttcaatcgcgacgagtatcactccaggtgcgcgcccctcccctcgccgtccatctccacatccccatctctctctctctctaaatctctaagccggtacacccgcgaatcggtccaggccgacgcagccggcgcagtggtgggcggcgggggaggaagc

SEQ ID NO: 101078 - DNA, 3366 bp, Zea Mays
cgccggacgaccagaccaaatgccaccgatcgccataatggcgggcaggtacgagtaggaaggagaggggggtatgggtatacactgcccgcctgctccatcactccactccagtctccagagacctctgaagagcccgcgtcgtacttgtacccgttcgttcgcgcgcccgcagcgtagcgcaggcacgccacgcgatggggtgcaaggggtccaagcttgacgaccaggaggccgtcgcgctctgccgcgcccgcgccgagctgctcgccgcggccgtccgccaccgctacgcgctcgccgacgcgcacgcggccctcgcggactccatcgactcggtcgccgcgccgctgcaccgcctcctccgtctgcaggctcagccgcgggggctcgtactgccctccgcgcgcaagggcggtggcgcgcccgcgaaccggttgctgccgcgctccttcgacccgtcctcggcgctgcctgcccacggccattcctcgcaaccccagttcggcgcgtcgccgggatccgagccggcgccgacggccgactcgcctccgcgccgccgccgccgcgtacccgagcagctgccgcacccgcattacgccgcgtacgggtacgactacgcgacgcagcccgcgtacgcgtatccggcgccggcgagctcgctgcagttctactacgctcgcagccgcccgccccccgcgtcagtcgccgtcacgcagcgcgcgccggggacgtcggagcgcgtgcactttggctcgttcgacgcggcgggcggctacccgcagcactacgcctacagcgcccagcgggcccaggccccgcctccggttgcgccgcagcggtctgctccgccttcgcctccgaaggcgagctcgtgggacttcctgaacgtgttcgagaactacgactcgtacgaacacgacagctactactacgactccgccacggcacctgctgcgcccgcggcgccgttcatgccgagccggagttcgcgggaggtgcgcgaggaggagggtattccggacctagaagacgacggcgaggaagacagcgtgggcgtggtcgtgaaagaggtggccgggcagtactcagcacctgggaatggcggtgcccgtagccggcgcaactcgctcggcggtgccagtagcaccgccgagctcgaccagccggagaatgctatcgcccataaggacgtcatcggcgagtttcggcgaaggccaacagcacatggtaatgtgtcggtgcacgcgccaccacctcccgcgcggagggtcgtcgacaatgcgagtgtagctggcgaaatcaaggcacagcttgtccgcacggccgaggcggctaggcagctcgcgccgatgctcgaagtcggaaggccaagctaccaaggccgcagctcagtctaccaatgttcctcaaagatgatgtcggctatctccgtggctcatttggggtgcaaagacatggacgtgttggacgtcggagtggtagggaagatggtggacacgcggagcctatcctcggcacttgacaagctctatttctgggagaggaagctgtatgctgaggtcaaggctgaggagaaaacgcgcctacttattgccaagaactccaagcgactgaaattattagatcaaaagggtacagagcctgaaaagatagatgaaactcgaaatttgttgaggaagctttcaacaaagataaggatagctgtgcgcgttattgccaagatttcaagaaaaataaacaaattaagggatgaggaattgtggccacaagttaacgctttgattcaagggtttgtactaatgtggcaagataaattggacgcgtaccatagtcagtgtcaagtgatatcagaagccaaaaactttacttcggttttgtcaggtggaaatggccaggatttggtgttagagcttgaggtagagctgattaaatggatcatcagtttttcttcttgggtgaattcacaaaggaactttgtaaaggcactgaatggatggctagcactctgtcttaactatgagcctgaggataatactactggagctccatcttactcaccaggaagcattggtgctccactggttttcgttacctgcaacaaatggtctcaagccatggatcggatttctgagaaggatgtggttaatgccatgcaagctctagtgtctagcgtgtggcacctatgggagcagcagtatcttgagcaaagtgaacaaataatctcgatgcgagaaagggaaaaatggatcaagattttagagagaagaacccaggatattaataaggaggctgatgagctaaacaagaagttggcgttaataccaagccggcaaaggatgcatgtgcctcggagagtacaactgtatgaggcgcactgtgttgaggcaagtaacttgcacataaatctgaggctggttcttgaagctttagagaactttgctgccaattcactgcaagctttccaggatgtggcaaaaagtgctgaagggacaagactgccaagagataatgtgagaagagagcaccgtagttcggaaagaagttcaaactacaaaactagctagttagatttgaatctattcttatctaggtgggatgaaaatataatgtgaggagagatgcagatctggtagcgttcaggtgtggtggcttcctgtgcagatgaaacttggatggggtcttgcattgtgccacaggtaaaacaacttgaatggggttttgagctgttgaagatctgacattgaagaagtttgggggtgagtgatagaattttttttggggggcaagaattaaaagaaatcctaccagaaagagagtttggacagtgttcaggttcgttgtttgccttggttcagggacgtgtatatacccctcgtggcctcgttgaacaaccgcgaggttatactgggtgcgaagaccgagcagaaatatgcggtacggctgtcgcttctacgaatggtcctctccaaaatcaaagcagttggattttggttacatgtgcattcctgaacgatcttttgccacacgaacttgtacatatttatggtgtatctgcaatcatcttactttgcagaagtcttgtaggccggtagcaattgagctgtccgtgtttccagcagactctgaatttgttgtttcctgtaaattacattttaacttttccttctccaagacaatgctaacgcaaacagtttggcagcaaaacgaactgaaaagagggactcctcacggtggacgcatcgtcgctgacggattggtggattctgttagcatgtgaagctacgaagctatgtcttacatttatattaagagatcattaatataaacttaggtcggttaattatatcaggtttatcttcaagc

SEQ ID NO: 101079 - DNA, 2868 bp, Zea Mays
atggatcagcagcggaagagcagcctcaggtcgtacgggtccaacgcctcgtcccagtcagggtccttcgacttcaaccacgaccaggacacggaacgcgccggccagcccggcggcgacgaccgccgggaggtcgtcgtcaagatcgacgccgagccgcactcgccggtctccctccacgcggccggcggcgtgtccgggcacagctccgcggccagcacgccgcgggccggtggcgcggcggtgcgcattctcgcgccgtctgcgtccgggtcgagcgcgtcgacttccagcgtcggaggcgacgcgtccggctccggcgaatcgttcagcttcaggaaacgcccgccgcagtctccggccggcggggactccggcgaggatccgccgagccgcctcatcggcagcttcctccggaagcaggcggcggccggcggcgagctgtccctcgaccccgacttcgaggtggaggagatgagaaggccgccacgcgcgccgacgtctgtcaacgcctccagggagctgcgcgtctcgttccaggacccccggaaacggatgtccccgtccacgtcgtccgcgtcgtcctcctcctacggcgccggcggcgacagccggaaccagagcaccatcgacgtggacgctgccgaggtgctgcgctgcacgtcgacgtccaccggttcctccctgctggcgcgcagcaggacgcgatctcggctgatggatcccccgccaccgtcgacgtcgtcgagtgcccccgccaacgagggggatccccgaaagtcatttgtctcgaaggggctgccgcccaagtccggtcagctccggtcgggtcttatcggcaagtcggggctcatcggcaagtcggggcccatcggcaagacaggtgcgttcgacgatgaggacgacgacccgttcatggacgagggcatgacctcggacttcaagcgcgacacgatggattgccttctcatcatggagtgggtcagcctggtggtcatcgtgggcgcgctcatctgcagcgtcaccatacccagcctgtcggtaaagaagctctcggggctccacctctggaagtgggagctcctcgtgttcgtgctcatctgcggccgcctcgtctctggctgggtgatccgcatcgcagtcttcttcgtcgagcgcaacttccttctgcggaagaaggtgctctacttcgtgtacggcgtgcgccgcgccgtgcgcaacgtgctctggctgggtgtggcgctcgtgtcctggcacctcctgttcgacaaggccgccaagcgggagacgcacacgctggtgctgccctacgtcaccaaggtgctgtgctgcctcctcgtggccaccgtgatccgcctcgtgaagacgctgctgctaaaggtgctcgcctcgtccttccacgtctcctcctacttcgacaggatccaggaagcgctcttcaaccagtacgtcatcgagaccctctccggcccgccgctagtagacgagagccggatgatggctgaggtgcagaggctccagagcgcgggagcatccatccccagtgagctcgaagcgacagcgatgccgggcaagtcccggccactgcccaagagtgggcgcctcacgacggtcgcgtccaagcgaggaggaggaggagcagcagcagccagcaagcagctgcataggcagaaaaccgagcgccatttggatgacggcatctcgattgaccagcttcacaagctcagccagaagaacatctccgcgtggagcatgaagaggctgatgaagatcgtcaggtacggggcgctgacaaccatggacgagcagctcaagcatgcaacaggcgaggacgagctggcgacagagatacacagcgagtacgaggccaaggttgcggccaagaggatcttccagaacgtcgccaagcctggatccaagcacatatacctgtcagatttgatgcgtttcatgaggcaggaagaagctctgaaggcgatggatctcttcgaaggagcgcaggagcacaacagggtcagcaagaggtcgctcaagaactgggtggtaaacgcgttcagagagcgcaaggctcttgcgctgacgctcaacgacaccaagaccgcggtgaacaagctgcaccagatggccaacgtcgtggtcgcgctgatcgtgctcgcgctctggcttctcatcctgggcatcgcgacgtccaagttcttcgtcctgctcagctcgcagctcctcgtggcggtgttcatgttcgggaacacgctcaggaccatcttcgaggcgatcgtgttcctgttcgtgatgcaccctttcgacgtcggcgaccggaatcgtcaactgagatttctggctgtaacacacttcccgatcccgatctgcatcgtcatgcaggtggtcgtggaggagatgaacatcatgacgacgatcttcctccgatacgacaacctcaaggtgtactacccgaacagccagttagcccagctaccgatcatgaattactacaggagccctgacatgggagattcggtggacttctccgtccatgtcgcaacaccggtggagaaactgtccctcatgaaggagaggctattgcattaccttgacaacaagaaggagcactggtaccctggctccatggtcgtcctgcgcgacgtggacgacacgaacaagctgaaggtctccatctggtgccgccagacgatcaacttccacgacatggggatgaggttcgagcggagggagctgctgctccaggagatgatcaaggtcttgagagacctcgagatcgagtaccggatgctgccgctcgacgtcaacgtccggagcgcgccgaccatccagtcctcgaggatgccggcgacatggacgtttaactactga

SEQ ID NO: 101080 - DNA, 1204 bp, Zea Mays
aaaagttgcacaagtgatggttgagaagagtagacggaacgggacccaacccaccctaacccatcattcattcattctccactagaagcacgggttactgcacccatgacctgtaggtggtggtgcaagatacttcagataaagatatatatgtgcgtgtgtgtgaaagacagagaacctggctacgcctcaatctagccgggaagaacagctccacggaagaaacaaaggcggcagagtgctagaccggccatccgcgtgccagactgccagtgccctctcctctgcagccaccaactcctgcttcccagaagctagatctggacgaacatggcagcagtcccggtctacagcatcacaagagcggagatcgacgagttctggagcaggaaggaagtggaagcagaggagcggcgactcgctgccgagaaggaagctgcaagaatcacggccaagacactcaagatggaagattacgtgctctacgagcaaatggtcagggagattctcatggaggggaacggaggagacggatcagccatagcggcagctgccaccggtggcactaccgaggcacagatcgttggcatcaaacactggtggacaaggagtgcttatgcttaatctgaacacgctgccttgtccatggatgggaatggcagaagcaacaagcatgctaatgctatcccatacgttccgcaggagagatgtaccgccatattctgctcatcaactccacgccagccaaacgtcgatgctcttgccatcttttaggtgtccccgccaaggataagctggggcgtgggggaatcaggaaatgtggatgtgattcatgtgtctgataatattttgggttcaataagctgcgacttatttcccatatggaatttaatttaattgtatatctatcttccagtattgcttgagagatcaagtaacaagtatggataatcatgttgcttcacgtataaaagcaagatactgataagaaatttaattgtcattacatcattgcttgccactacgacgtacgttctgtcatgtgaaaccttgacttcttcaaaaatacgagttgcaatattgcttgtattcaggtttcaaagtatattcgtgttggaaatccataaaaagcggctagcgctaaccaaatgttcatcaagcttgtgagcctgagtagggatcaataacgaaacaaaaaaaaata

SEQ ID NO: 101081 - DNA, 2967 bp, Zea Mays
tcccatatatatgcatgccatagttaggagaggcgtacatctctcgtctccatttcctccgcaagaagttgtgtggtcaggaacaggaccaagcaaacacaaatctttgcatccattccctattttaagccacaccaccactttaccacagaacgcttagccacttttagagcacaagaacaaacctgcaagtgcaagaggcatgtagcgcacctcgtcgtagtgtcatctccctcccatttcgttccgccacaccccccatggacaatccaatccacacaaggttcacgctaccgtgtcttggcctccgcgctgccgcggccgtgctcctcctcctcctcctcctgtccccggcggcgatcactccggtcgcgagccacaatgaccacggcgagcacaaaaactacctcgtcattgtgcgcagcaggtacgagtacgacaagaatgtgcacaagaacgtgtcgagctggcacgcgtcgctcctgtcgtcggtgtgcgacactgccaaggaggtcctagaagcggacccgaccgccattagccggctcatctactcctaccgcaccgtcgtcaacggcttcgccgcccgcatgacgccggaggagctggacaagatgtccaagatggagtggttcgatcgagccctccccgagcagacgtttcacctcctgaccacgcgcacgccgcacatgctcgggctcatgggcggccgacggcacggcggcctgtggaacacaagcaacatgggcgagggcgtcatcatcgggatcctcgacgacggcatctacgccgggcacccgtcgttcgacggggccgggatgcagccgccgccggccaagtggaagggccggtgcgacttcaacaagacggtgtgcaacaacaagctcatcggcgcgcggtcctacttcgagtcggccaagtggaagtggaagggcctccgcgacccggtgctcccgatcgccgaggggcagcacgggacgcacacgtccagcaccgcggccggcgcgttcgtgcccaacgccagcgtcttcggcaacgggctcggcacggcggccggcatggccccgcgcgcgcacatcgcgttctaccaggtgtgctacgaggacaagggctgcgaccgggacgacatactggcagcggtggacgacgccatcggggacggcgtcgacatcctgtcgctgtcgcttggccacgaggatgccatcgacttctcggacgaccccgtctcgctcgccgggtacacggcgatcctcaacggcgtgttcatctgcgccgcggcgggcaacaccggcccgtccccctcgaccctcgtcaacgaggcgccgtggctgctcaccgtgggcgccagcaccaccgacaggaggttcttggcctccgtaaagcttggggacaacgtccagattgacggcgagtcgctcaacgaccctaacaccaccatgggcgacctggtcccgctggtgcgcgacgtgtccgatggcctgtgcgtcaacgggaacgtgctgaaggcacaaaacgtctccggaaagatcatcatctgcgaagccggcggcgatgtcagcaccgcgaaggccaagatgctaaagggcatcggcgtggtcggaatgatcgtggtgaccccggagttgttcggtccggtaatcatcccgaggccgcacgccatcccgacggtgcaagtctctaacgcggcggggcagaagatcaaggcctacatccacaaggcgcggggcccgacggcgacgttcgtcttcaaaggggcagcgttcaacaccccaaggtcgccgatggtggcgcccttctcctcgcggggcccgaacaggaggagccgtgggattctgaaacccgacatcatcggccccggggtgaacatcatcgccggcgtgccctcgatcgaggacgtggacctgctgcgcaacgcggaggtgcccaggttcgacatcaagtccggcacgtccatggccgcgccgcacctgagcgggatcgccgcgctgatcaagcacgcgcacccgacctggtcgcccgcggtcatcaaatcggccctgatgacgacggcggagcctaacgacaacctccggaagccgatccaggacgtcaacggcaggccggcgaacttggtcgccattggcgccggccacgtgaacccgaagaaggccatggaccctggcctcgtgtacaacatgacggccatgggctacgtgccgtacctgtgcgggctcaactacacggacgacaaggtgagcacgatcatctacccggagccgccggtgtcgtgcgccaagctgtcaaggctcgaacaggacgacctcaactacccgtccatcaccgtcatcctcaaccagccgcccttcaccgcgaaggccaaccgctccgtcacgaacgtcggcgcggccagctcgacgtacaccgtggaggtgaacgtgccggcgtcggtgacagtggaggtgaacccgccgaagctgactttcaaggcgctggaagaggtcctgaactactctgtcacaatcaagtcggccaacggccaggcgcttaccggccctgtcgagggggagctcaagtggttgtccggcaagtacgtcgtgcgcagcccgatcctcgtcactaacgaatccgggccctcgccggcggagacacgtaaaccgtaaccctcgatagcagctggcaaatgcctacttattacgtacatggtaacgattagtttgccatatgagccagcgcttgaaatcgatgggattgtgagcttcattcacttttgattcggtagactaaattaggcatgcagatgcagagcaaatccctccatttgtggtggaagtgagagatacatatataattacctccttgtttttttatatatttattattaagaaattcctgacgaatttattacaagtttaacaacgtcgtggttctaccattaacaatgtcgagtaattcatattttatattgcatgaccaactttggccacaggc

SEQ ID NO: 101082 - DNA, 452 bp, Zea Mays
aatagcgattacagaggattatagtctgggaaggaagaacaacatgaggattaaggataggagaagaatgtcgaagccattctagaagggtctagaagaatctagaggggaaggtagaggatacatagaagagaggaaactggagaaggaaataacagtagcactctgaatattcgatgcctatcctcctgaccgccctgctcttttcaacctgggctggcatgggccgtttgggctcacattccctaacattctccccttcttaaaaatcggcttgcacccaagccgatacatggcatcaattccaccgagatcccattgcaagtgcaaggaatttatccaaataataccagtgtgctatcctttgatcggctgaacattgtgatcaccaggatcccaaacaaagatggagaaattgccttggtcaccgaactcattggtcttctgcaacc

SEQ ID NO: 101083 - DNA, 965 bp, Zea Mays
gcccgctaattggagtctctcccgtagtcccgtgtttgagttgttctctcatctccatcttcgcaacgaccacgaattccacggccaaccaatctctggtctatcgctctcttctccttgtctttaaatctgagacttttttttgttcgcgtcctccgccctcaaccgtagccacctcgctgcccctgccgccgacacccctgctcgccgttgctgcagccgcacaggcgatggatcatgaagaagtgaccgaattcctgggccaggtgcccctcctgcagtgcctcccgggttcctctatccgcagaatcgcggaggccgtccaggtcaagaactacgaacctggtgactatgtcgctcgcgaaggtgaacctgtcaatggcctttacatcatagtggatggccaggctgaagtttctgcacctgcgaatgcagaagaagcaaatcgcccagactatgtgttaaataagtacgactactttggttatggaactaatagttctgttcatcaagtcaatgttgttgcactatcaaagctgacctgcttcatattgcccaatcaatatggacatttgttacaaccaaaaacaatatggaatgcagaggaaacacctgaacattctttgctggaacaaattttgcacttagaaccactagaggtcgatattttccgtgggtttactttgccggaagctccaacttttaggcaagtttttggaggacaattcattggacaggcactagcagcagcatccaagactgttgattgtctaaaaatggtgcatagtttgcatgcaatttttcttgttgctggagacaataacataccgataatatatcaagttcatcgggcacgtgatggatccagctttgccacaagaaaagtggaggcaaagcagaagggcctagttgtattcaccttgattgcttctttccagaaggaagaagtgggttttgagcatcag

SEQ ID NO: 101084 - DNA, 930 bp, Zea Mays
atggcgcacgcagatcccaggtggttgaggatctgccccaccctcctccccacgccgtcgatggcgcgcgcagatccaggtggccgaggatctgcgccccccaaatctcgcatccccaccctcctccccacgccgtcaatggcgcacgcagatcccagatatttcttcacggtagctctctgctcagcaaccatctcccagcagagccgccatgccatctccctgaccatcaccagctgtgccctctcggcatttgcaagtgtgaccatcattgtaaggaagcattttgatgatatgtggaatatcgataactttgcctatgtcctgcatcccggaaggcgtcgaggcggttcagtctgtggagaggagggagaagatgagtccatctatgttgtcattgattgctccgccgcggcactaaagctcacgctcatgcccacaacgacaagaatatggggaggagagagaagaagagtcggcgtgcgcaacttgtacctcgccgactccgacgctgacgttgatgaccaccttgacctacagctcaaaggactatttggatgccaaattcaagaaaatagggcacaacaacatgtactcccctcatgctacccccaactcattgttctcctttatgtcacaagtatggggcactttaaacagagacggacgacggacgagaggcttttctacaagcttttaattgataatgtggtggagctgcttccttttgtttacacaacaactgggaaggtcctagatgttctaaagaactggccacatagaaacattcaagttatctttgttactgatagtgagcgaatcttgggacttggagatttgggttttcaggagcatgatgagcttattgaagagttcatggctgctattaagcaattctacggtgaaaaagtcctcattcaagtgaattag

SEQ ID NO: 101085 - DNA, 2698 bp, Zea Mays
atgccggcatgccgcccaaggaactggagaagtggagagacagcgccgcggcccatacctcttgctcttgttgccgccgcgcagcctctctttctaacagctgggtcccaactactcctgtccccacttggcattgtaaccaagctgccgcagcccgcagcggccaccaatgcggagcggccgcctgcgtcccttcacctatccgaatggggcttatcgccaccatccaatcgaagctctggaacctcctccactcccagcttccgccgacgctcgcttcagctgctgctttccttcccatccttcaacaggtctgtataatcctctaatgtgtccggatcttgtgaagtagctactgattgggttaagatgaagcattgtgttgttcatttgttgtttgctgtctgtcgttcctggaaaaaaatgttcgtaaatggcggagtttcgctgcaagattgcgccttgttgcttcgcatttgttgtccaatagttgggatggagctaattaaactgagctccttatgctaaagttcgccttttattctgacacttgttgtaagttcgcctaaaatgcggaaggcatgtctataggaaaagttactgttaggttgttctttttataggtccatatgatgatctatctgtagaaatgctttcaagaagtgaggctctgcatatgctttcttcctaaactctaagtatactgccagcagaactaagataacgaaccaattgcttatccccagctagctgattttaatggaaaaaggaattcttgccccccttttgcagatttctttagtatttttgtttttggatcaaaggcttttacctagctttattagaaagcatattgctcaaaccctgacccagcactgggtttgccagtaaaaaacaaacaaacaaaactcgcataccagcgtgcaaagcacttctagttaacccctgctcacagatttctttagtttctcactgaagctaacactctataactaaacaagctgttaacatggagcatctatctctcgattgatgctggcaatgaatttatgcactgtgcattatgttgttataactttgcgaaagcaccattggtacagttgtaagatgtggaagtatagctccactcactatggctcaaatcctagtgtgcacatattgaagagaggtaaatggtggcgtgtacctctagttggtgcagaaggtggatataccccctccaatattttgtaaatttttttataccttttgcttgttcttaatgcaggtgcaatttgcatttcccatggagctcactgattaataacgtgtgagctgaacttgcttttctgtggacaatttggaacttcagtactagtttccgataggattcagggagaaatgatctcttttaacaatttattttggagctcccttcagccttctttcaagttttacagaaagtgcctgacaaactgcccatattttgcactgaccatgcattcaactacaaagcccttgggttcatctatgccggtaaagagggcgcatttgaagccacatgccgcagacatcaagaggaacccccatgtacatgagctttacaaattggtttaccgacttccggagaaccttagctggctgttggcaccaccagaaattcctaaaagacctgcctcaaagaagaaaaaacaaaaagacgaaatagtggccggtaacagctttggtgtgatcttggagtgggagggagttgttgtggatgatgatgatccagacttggagccccgggtttggtatgttctatcactagaagaggggaagtctttccctccagatgcattgctgaagaaaatcgagggaatgagaactgaccaggctattgcagaagtcttatgttggtcagaagatccagcagaaatccaaaggttggcaacacacaaggaggttatatatcaaaaacttcaaggtggatactaccagctgcgaccacatgtgcttgatttcttgaacacccttgtgggttttgacattccaatagcaattgcagctcctcgctcaaggaagagccttgaagaagggatcaaaactgttggtctgcaaggctacttcgatgctatagttgcattggaggacttctgcttagggaaacctgatggtgagatgtttgaagtcgcagcggagcaacttggtctggaaccagatgcctgtgttgtgtttggtaactcaaacttgacgacggaatctgcacataacgctgggatgaggtgtgtggcagttgcaggccgacaccctgcctatgagctccaatcagcaaaccatgttgtgagatggcttgatcagctctctattgttgacttgcagaggcttgctaatggtgaagttattggtcgcaggggtagagaatctgacatggatatggaaattgtgattgaggaatgatgatgtttctgcaaaaatgacgcactaatatattgttgtgcttataatctgatacacctaagtaatgcattacattttgtaaacaggccaagcagtgcaagttccggactaaggatactccggagtttgcattaccttcctggtttgcttgtgatgaattggaattcgcctaaaactcttttagtcattagagttggaagtgaagaaactcccacccgtaacttgtgtatgtacagtatatatatgtattacctattcttccctacatctttgaaggtgt

SEQ ID NO: 101086 - DNA, 1731 bp, Zea Mays
atgccggcatgccgcccaaggaactggagaagtggagagacagcgccgcggcccatacctcttgctcttgttgccgccgcgcagcctctctttctaacagctgggtcccaactactcctgtccccacttggcattgtaaccaagctgccgcagcccgcagcggccaccaatgcggagcggccgcctgcgtcccttcacctatccgaatggggcttatcgccaccatccaatcgaagctctggaacctcctccactcccagcttccgccgacgctcgcttcagctgctgctttccttcccatccttcaacaggtgcaatttgcatttcccatggagctcactgattaataacgtgtgagctgaacttgcttttctgtggacaatttggaacttcagtactagtttccgataggattcagggagaaatgatctcttttaacaatttattttggagctcccttcagccttctttcaagttttacagaaagtgcctgacaaactgcccatattttgcactgaccatgcattcaactacaaagcccttgggttcatctatgccggtaaagagggcgcatttgaagccacatgccgcagacatcaagaggaacccccatgtacatgagctttacaaattggtttaccgacttccggagaaccttagctggctgttggcaccaccagaaattcctaaaagacctgcctcaaagaagaaaaaacaaaaagacgaaatagtggccggtaacagctttggtgtgatcttggagtgggagggagttgttgtggatgatgatgatccagacttggagccccgggtttggtatgttctatcactagaagaggggaagtctttccctccagatgcattgctgaagaaaatcgagggaatgagaactgaccaggctattgcagaagtcttatgttggtcagaagatccagcagaaatccaaaggttggcaacacacaaggaggttatatatcaaaaacttcaaggtggatactaccagctgcgaccacatgtgcttgatttcttgaacacccttgtgggttttgacattccaatagcaattgcagctcctcgctcaaggaagagccttgaagaagggatcaaaactgttggtctgcaaggctacttcgatgctatagttgcattggaggacttctgcttagggaaacctgatggtgagatgtttgaagtcgcagcggagcaacttggtctggaaccagatgcctgtgttgtgtttggtaactcaaacttgacgacggaatctgcacataacgctgggatgaggtgtgtggcagttgcaggccgacaccctgcctatgagctccaatcagcaaaccatgttgtgagatggcttgatcagctctctattgttgacttgcagaggcttgctaatggtgaagttattggtcgcaggggtagagaatctgacatggatatggaaattgtgattgaggaatgatgatgtttctgcaaaaatgacgcactaatatattgttgtgcttataatctgatacacctaagtaatgcattacattttgtaaacaggccaagcagtgcaagttccggactaaggatactccggagtttgcattaccttcctggtttgcttgtgatgaattggaattcgcctaaaactcttttagtcattagagttggaagtgaagaaactcccacccgtaacttgtgtatgtacagtatatatatgtattacctattcttccctacatc

SEQ ID NO: 101087 - DNA, 1362 bp, Zea Mays
atgccggcatgccgcccaaggaactggagaagtggagagacagcgccgcggcccatacctcttgctcttgttgccgccgcgcagcctctctttctaacagctgggtcccaactactcctgtccccacttggcattgtaaccaagctgccgcagcccgcagcggccaccaatgcggagcggccgcctgcgtcccttcacctatccgaatggggcttatcgccaccatccaatcgaagctctggaacctcctccactcccagcttccgccgacgctcgcttcagctgctgctttccttcccatccttcaacaggtgcaatttgcatttcccatggagctcactgattaataacgtctcccttcagccttctttcaagttttacagaaagtgcctgacaaactgcccatattttgcactgaccatgcattcaactacaaagcccttgggttcatctatgccggtaaagagggcgcatttgaagccacatgccgcagacatcaagaggaacccccatgtacatgagctttacaaattggtttaccgacttccggagaaccttagctggctgttggcaccaccagaaattcctaaaagacctgcctcaaagaagaaaaaacaaaaagacgaaatagtggccggtaacagctttggtgtgatcttggagtgggagggagttgttgtggatgatgatgatccagacttggagccccgggtttggtatgttctatcactagaagaggggaagtctttccctccagatgcattgctgaagaaaatcgagggaatgagaactgaccaggctattgcagaagtcttatgttggtcagaagatccagcagaaatccaaaggttggcaacacacaaggaggttatatatcaaaaacttcaaggtggatactaccagctgcgaccacatgtgcttgatttcttgaacacccttgtgggttttgacattccaatagcaattgcagctcctcgctcaaggaagagccttgaagaagggatcaaaactgttggtctgcaaggctacttcgatgctatagttgcattggaggacttctgcttagggaaacctgatggtgagatgtttgaagtcgcagcggagcaacttggtctggaaccagatgcctgtgttgtgtttggtaactcaaacttgacgacggaatctgcacataacgctgggatgaggtgtgtggcagttgcaggccgacaccctgcctatgagctccaatcagcaaaccatgttgtgagatggcttgatcagctctctattgttgacttgcagaggcttgctaatggtgaagttattggtcgcaggggtagagaatctgacatggatatggaaattgtgattgaggaatga

SEQ ID NO: 101088 - DNA, 1147 bp, Zea Mays
atgccggcatgccgcccaaggaactggagaagtggagagacagcgccgcggcccatacctcttgctcttgttgccgccgcgcagcctctctttctaacagctgggtcccaactactcctgtccccacttggcattgtaaccaagctgccgcagcccgcagcggccaccaatgcggagcggccgcctgcgtcccttcacctatccgaatggggcttatcgccaccatccaatcgaagctctggaacctcctccactcccagcttccgccgacgctcgcttcagctgctgctttccttcccatccttcaacaggtgcaatttgcatttcccatggagctcactgattaataacgtcccttgggttcatctatgccggtaaagagggcgcatttgaagccacatgccgcagacatcaagaggaacccccatgtacatgagctttacaaattggtttaccgacttccggagaaccttagctggctgttggcaccaccagaaattcctaaaagacctgcctcaaagaagaaaaaacaaaaagacgaaatagtggccggtaacagctttggtgtgatcttggagtgggagggagttgttgtggatgatgatgatccagacttggagccccgggtttggtatgttctatcactagaagaggggaagtctttccctccagatgcattgctgaagaaaatcgagggaatgagaactgaccaggctattgcagaagtcttatgttggtcagaagatccagcagaaatccaaaggttggcaacacacaaggaggttatatatcaaaaacttcaaggtggatactaccagctgcgaccacatgtgcttgatttcttgaacacccttgtgggttttgacattccaatagcaattgcagctcctcgctcaaggaagagccttgaagaagggatcaaaactgttggtctgcaaggctacttcgatgctatagttgcattggaggacttctgcttagggaaacctgatggtgagatgtttgaagtcgcagcggagcaacttggtctggaaccagatgcctgtgttgtgtttggtaactcaaacttgacgacggaatctgcacataacgctgggatgaggtgtgtggcagttgcaggccgacaccctgcctatgagctccaatc

SEQ ID NO: 101089 - DNA, 868 bp, Zea Mays
tcaattgcgtgcgcggtgcgccctcgcctgtccccgcgtccccgcccctgtctcctgaagtcgtccgcgaccgccgccatgctcccctcgccccgtgccgcatccgtcgtgatagggatccgagaacaccccatggatgtgtccgggattcgaggcctctcccgtcccttcccctcccccacccccatcggcgatgcccggatccgcgaccaccgccgtccaaccccggcctccgtctgtgaccgctccgtggtggcgcaagcgctggaggcatccacagggggctaccgacggctgggacgggttcgtgctcaccaccgacggctgggacgtccatcgggggaccttcccggcatggatggtgtcttcgcaaggaaacgacagctcgctggtgctgctgaacacccgtccgggtccggctgcggacggcgcaggcatggcggagcacctgcagctgcacctggggcaggtgagcttacggagctggtcgagtttcgctggctactgggtggcccgctggaccttcccatccgactgcagatccagcgccttcttctgcgtccgtttcggcatttgcaccagcgtcggcacgtgtgcctgcgtcgacgaattcgagccttcgaaaccctgcgagtggcagcgcgggtactttgtggacgggtgcaccaccaggtctcacccgctgagctgcaccgcagacgatagtggccgccgcccgacgacggagcaggacgactcgtttctgctcctggacaacctgcgagggctcccttacagttccatcccacagcgaagggccacggctggccgcgcttcttcacggcggccgcggcgtggggaggcatcagctggatctggtgatggatga

SEQ ID NO: 101090 - DNA, 162 bp, Zea Mays
atgaaccacatcaccttcaatccccaattaagtggtgttgcattgccgtcaacaaaactttatctgacagctaaactcaatatggtacaagatacacttcctacaaaacttcatggaaaataccagctgaatctcaatctccctataaaacatataagttga

SEQ ID NO: 101091 - DNA, 827 bp, Zea Mays
gtcagctccgccgcttttgctttctctctccaggctctcggcttcgtccacaagctacagccgcgcgctcctccttgacccggcctgaccccgctagttcgccgcctgccgtctgccgccccagcatggccgccgcgtcgtccgccacctccgtccacgacttcaccgtcaaggattcgagcggcaaggacgttgacctcagcgtctacagggggaaggttcttctcatcgttaacgtcgcatcccaatgtggcttaaccaactccaactacactcagcaggcccagctctatgagaagtacaagaaccaaggctttgaaatcctcgctttcccgtgcaaccagtttggtgggcaggagcctggtaccaacgaggagattgcccagtttgcctgcacacgcttcaaggctgactaccccatctttgacaaggttgatgtcaatggtaacaatgctgcgcccatctacaagtttctgaaatctagcaagggtggccttttcggcgacagcatcaagtggaacttttccaagttcttggttgacaaggaggggcgtgttgtggatcgctatgctccaaccacttcacctctgagcattgagaaggatatcaagaagctgcttgggagctcttaaacgatatctggctgcaaaactgtagaaaaaactgtatgaacattgctctgagagctgaagtatataacaatcttgtcttaataaagtagttttagtatttgagaggttgcagtacctgctttatttcccttgcatgcactctgtacttgtacttgcgacacgatccgatagaaatgatattccttttccttgcat

SEQ ID NO: 101092 - DNA, 124 bp, Zea Mays
atctcttagaggtcttcttggtgatctaagaaatgtttccggaagggaaacatcttttccacggataaaaattcaaacagagagatctgcattgcagagagctttaatagtgttcttccgcaat

SEQ ID NO: 101093 - DNA, 2710 bp, Zea Mays
gtagcgtgctatagctatcacacagcggcaacaggcaggtgtaggcacaccgctcctcctcgctgttctacgcccacccgcacaagcaatcgtcgcatcgccaccaccaccaccgagaagcagccgcctcgcgccccagatctcgccggcaggggtcgcacgccctagcatgcgcgagtaagtacatgagggcggcgcccttcagtgccgacgggaaaggggcggggaccatagaggcgctgctttggccgaacgggaagggcggcggcggaggggacctgctgttggagccgacgtcggtgctggactgtagacggagcccgagcccgcggtactcgtcatcgacgctgtcttcgtccctgggtggcgccgcgggagactcctcttccggcgtggcggcggtttcggagaacagcgccgccgccgccgccgaagccaccaaatgggcggcgccaggcgagcaccgcggcggcggcgaaggaggcggaggcggaggaagcaggaaggagtggtccggcggtgagctgccgcccataccggggaccctggacatcggattcggcgcggaggagggctgggatgccatgctcggcgacgccgcggcggtggtcgggcaggaccagacattcctcaactggatcatgaccgcgccgggcgacatggaaccgccggcgctggcgctcctcggtaatgccgccggcttcgagttcccggcctcggacccgatcgggttctccctgcagcatcaccccaccggcggcggcacctcggttggggcgctggcctccgacctatcgtcccccagcgcgaggtcgctcaccagcagcagcggcagcagcagtaaggccacttccactttcggcctcctacgaaccgaggcagtttttcagccgccgccgccggccacgaccatgcctttccacgacggtgccgacataaagcccgctcaccttggagtcccgtcggcaagtctactcctcaatcaacaccaagcgttgtcagcagcctccttcatgccgctcccctccttccctgaccatcagcaccagccacatctcccgcccccgccgaagcgccaccactctatgcccgaaaacctgttcctcctccaaaaccaactccagccgccgccgccgccgccgcagggtctacgattcccaccactgcataccaccgcgcccttccagctccaaccatcgctgcaaccaccgcgaggttcgatgaaaacaaccccggcggcgcagcaacatcaacagcttctggatgagcttgcggcggcggcaaaagcggctgaggtcggcaactccatcggcgggcgcgagatattggcgcggctcaatcagcagcttccccctatcgggaagcctttcctccgctccgcttcctacctcaaggaggccctcctcctcgcgctcaccgacggccaccaaggctccactcacctatcctcccctctcgacgtcgccctcaagctcggtgcatacaagtccttctccgacctctcgcctgtgctccagttcgccaatttcacggccactcaggcgctcctcgacgagatcgcctcaacaacttcatcttgtatccacattattgatttcgaccttggtgttggcggccagtgggcttccttcttgcaggagtttgcacaccgccgtggaactgggaacgcccccctgccaatgttgaagctcacagccttcgtctcaagtgcttcccaccatccccttgagctgcatcttactcgggagaacctcacgcaatttgctgtggaccttggcattccatttgagttcactgacatcaatcttgatgcgtttgatccggcagaattcattgctcctagccccaatgaggttgtggctgtttgcatccctgttggttgctctgcacgcacgccaccgctccctatgttgcttcagttggtgaaacagcttgcgcctaagattgctgtggctattgaccatggcagtgaccggggtgacctcccattttcacagcacttcatgaactgcttccagtcttgtatgttccttctcgactcacttgatgctgctggcactaacgcggatgctgccagtaagattgagaggtttctgattcaaccgagagtagaggatgcagtacttggccggcggaaagctgaaaacgcaatggcttggcgggcagtgtttacatcggccgggtttgctccggtaccgctcagcaacctcgcagaagcacaagctgactgcctgttgaagcgcgtgcaggtccgaggattccatgtggagaagtgtggaatgggtctagcactctactggcagagcggcgagctcgtgtctgtctcggcatggcggtgctgatcatacggaccccatccatcaaccatcatgacacctacaccaatttgcaggcatgtttaaccctggtaatgtgcattttgtcttgcaatttcaaacatcgtgaagaaaactattgtatttgttgttacacgcctctgattgctttgctgatgttggagtaccgcctctctaaaatgtaacatgttggtctagggtctcataactctgttcttgctctcttcttggttagccagaggataatttggcaaatctgtggcaatgatgttgttattttactaggtaattcagatgaaaactgacatggactgaaatggttgggtatattaactttcttggcctcatattccaagattgatgtatagatttct

SEQ ID NO: 101094 - DNA, 401 bp, Zea Mays
gtgatgggttcaaatagattgttgtcatcacaattacttgatgaatcatcatctgatgacgaggaggatttcatactttctgccgtgcaaatcattcatactgtttcacaagttcgtacaaagccaggaggctctattccaggccgtgcatatatttatcgagatagagaagcgggacacgcgagattgtaccaagattacctggctgacattcctacttatggcccaaacttgtttcggtggaggtttaggatgcatcgatccctgtttattcgcataatgaatgttgttgaacaacatgatgattactttgagcaaaaaagaaacgcaactcaacaacaaggtttaagttgtttgcagaaggttaatgcagtatttcgtatgctaacttatggagtggc

SEQ ID NO: 101095 - DNA, 1217 bp, Zea Mays
ataaatacccatactcggctccctaaaccatcccatctcacggctagctagcacaagcatagtgcaggggcttgccacctaagtaaggcccgcctgagagccatggcatccaaggccgtcctcttcttggctctcaacctcctgttcttcacggtggccaacgcctgcggcaactgcccgaccccaacgcccccggtcgagccaccgccgccgcctcctgctgctaccccacccccttcgtccagcggcaagtgcccgctgaacgcgctcaagttcggcgtgtgcgccgatgtgctcggcctcgtcaaaggcgaggctggcaaggtgcctgccgagccatgctgtaccctcatcaaaggccttgcggacttcgaggccgccgtctgcctctgcacggccatcaaggccaacgtgctcggcgtcgtcatcgatgtccccatcaagctcagcgccctcgtcaactactgtggcaagtgcgtgcccaagggctacttgtgcgcgtaagcagcttccggcggtcacacgctcgtagctgttcacgtacgagattacatatgcacgcaccctgcatggcacgaatgcatgcattgtgtctgctgatatatctctcctgtctcagttgcattgtgcacctttcggttctacaaaacctagaaccattccagccaaatacttgtcagttcaattcgcatgtattgtctcttgttgaattcccatttttttttgtatttggtcatttcctcgtaagagtccgacaccttctccaaggaaaaagggcagtgttgagagtcattgttgtgtatgtaaaaccaaacacttgagcttgtagtaccttattcgatttcttatttattcctgtctttcggagtgagaataaagccatctggtcaatctctcgtgatctacttttattaggattctaggacttctataacaagcaaattttttttccttttccaaatgagaagtatagtatatatttgaaatcttagatctatgtcgagtgactacaatcatttaggtcggagctctgcttagcacacgaggcacatgcacctaataacttcatcgttcatgaaatgacagatagatggtagcatccagttcaaatctctataagtgtgaatttcagattgggttatttaagggtctaagtttctgatgcaacgagttgcatatatatatacggttggatgtagatcaagtaaaaaaaaata

SEQ ID NO: 101096 - DNA, 866 bp, Zea Mays
accatcacatcacaggcgcttattagcagtcgggttattaatataaggccgcccagccagcctaatcactccgcataattcgtgcttgtgatcgagcagctgtcgctgtgtgtgtataatggcactggcaggcaaggcatcggtcgcgctgttcctcgccgtgaacctggcggtgttcatcgccatggccagcgcctgcggtggcaactgccccacgccgaccccgtccaccccgtcgacgccgaccccgacgccggcctcgttcggcaagtgcccccgcgacgcgctcaagctgggcgtgtgcgccaacgtgctgggactgatcaaggccaaggtgggcgtgccgcccacggagccatgctgccggctgctggaggggctcgtcgacctcgaggccgccgtgtgcctctgcaccgccatcaagggcgaggtcctcggaatcaagctcaacctgcccgtcgacctcagcctcatcctcaaccactgcggcaagaccgtgcccaccggattcaaatgcctctaagtctaagcacgcattcagccgcgcgctcgtcgctgaagagtgtagctggatcgtttggattcagatttatttggtttgtatcgtttgtactggtctgtacacgtagctcttgtctgatcagatttggcttcccttgcttgcattgattttcgatctgtttgttttaatcgttttgtattattcgatctctgtatgaataaatacttttatctgttcagtacgtacgtacatttactaaattcgtttcagccgcttgtaccgtattcttaatgcagtgcgtacgtcgtgacacgcgccctgtgcaaactcccataacattacatcgatactaggcccaagtgct

SEQ ID NO: 101097 - DNA, 86 bp, Zea Mays
cctcccccatccccacagcggtacgtccggactccggcgtggtattctcctccggtcctccctagctctcttcccccgccgccggt

SEQ ID NO: 101098 - DNA, 817 bp, Zea Mays
atcacaagcgcttagtgatcagttaatactaagggcaggcacacctctgcttcgcgctagtgatcaagcaagtgctttctgtactctgcagcaatggcaggcaaggcctcggtcgcgctgttcctcgccgtgaacctggtggtgttcgccatggccagcgcctgcggtggcaactgccccacgccgaccccgtccaccccgtcgacgccgaccccgacgccggcctcgttcggcaagtgcccccgcgacgcgctcaagctgggcgtgtgcgccaacgtgctgggactgatcaaggccaaggtgggcgtgccgcccacggagccatgctgcccgctgctgaagggactcgtcgacctcgaggccgccgtgtgcctctgcaccgccatcaagggcgaggtcctcggaatcaagctcaacctgcccgtcgacctcagcctcatcctcaaccactgcggcaagaccgtgcccaccggattcaaatgcctctaagctagccgcgagcatgcggatatatatgtgttcttttggttgccattcgcctgcagacttcttgtcgtttgctacttattaagcgagtgctagctctgcatgcatgactacgtcctttgcatgttgatgagcaactttcgatacttttgggtgtttgttttatgtaagtgcttcgtcctttacatcgacagtgtcccagaactatttgtactgttattcttttatttgtacccagcaatctgctcgatgaaataaagcttattatatttattggaaatatgcatgtatgtttttattataacagattttgatatgatgcatattttgt

SEQ ID NO: 101099 - DNA, 1075 bp, Zea Mays
atcacaagcacttattagcgatcgaggcatcgcaagcagagctcctcacgaagctcagtctgctttgtgccttgtggtcaaggaggacactgctgtgcagcaataatggcaggcaacgcatcgatgacgctgttcctggccgttagcctagtgatgttcgccatggccagcgcgtgcggtggcaactgccccacgccgaccccgtccaccccgaccccaacgccggcctcgttcggcaagtgcccccgcgacgcgctcaagctgggcgtgtgcgctaatgttctggggctgatcaaggccaaggtgggcgtgccgcccacggagccatgctgcccgctgctgaagggactcgtcgacctcgaggccgccgtgtgcctctgcaccgccatcaagggagaggtcctcggaatcaagctcaacctaccggtcgacctcagccttatcctcaaccactgcggcaagagagtgcccaccggattcaagtgcctctaagctataagccgcggggagcatgccgacgtgctcttctgcttgccattcttcgtcttactgtctcaataatgcagccttcttatcatgtgctacgtacgtacgtgcttactagctagctctgctacctctgcatgcatagcatccgcacgaacacgcgtagtagctagtagctacgtatgtagagccggccgttttgatgagcagctttcgcttttgggtgtttcttttatgtaagtgtctcgtcctttgaatggacgtgaccctgaactattaagatttttgttcttttatttgtatccggcaatctgcttgatgaataaagcttatatattgttcgaaatatgtgtgcatattgttctaatatcagattttgttatgagtcatatttcattttcatacacgtttgcaaatgcactacataaaacataattaattgaggcaacgatccatatacatttgagacgtcgaattactagtattcatgcatgatacatttgaggcaattatccataattaatcgatcggcaacggctagcttccaaccgttagctagtccatgtagaaggcactagacgtgtctagt

SEQ ID NO: 101100 - DNA, 1180 bp, Zea Mays
atagcgtatcacaaatagaatacaaccaatggctagtcgtccgagcacattccgatttgccgtcgtggccgtgctgtcgaccctgccacttgttgccagctctgcctccggccacgagaaccccgagcccgtggtcagggactcgccgcagaacggcaccaacaggaggtacctgtgggcgtcgtcgtcggcgcgaggctacggcggctggtcctccggcggcgcgacgtggtacgggagccctaacggcgccggcagcgacggtggcgcttgtggttatcacggtgacgtcagccagcgcccattcaagtcgatgatcgcggccggcggcccttccctcttcaagaacggcaaaggatgcggcgcatgctaccaaattaggtgcacgggcaacagagcctgctccggccggccagtgaccgtcaccgtcaccgactcgtgccccggcggtgcctgcctcgccgagtcggcgcacttcgacatgagcggcacggccttcggcgccatggccaacaaccgaggcatggccgaccgcctccgctccgccggaatcctcaagatccaatacaggagggtggcctgcaactacaacggcaggaccgtcagcttcaaggtggacgcggggtctaacccgtactacctcgccgttctcatcgagtacgtggccggcgacggcgacatctccgcggcggacatcatgcaagccggctgcgactcgtgggcgccgatgcagcagtcatggggcgccgtgtggcgcgtcaactccaacaacggccagccactccgtgcgcccttctcggtccgcgtcacctcgggctccggcaaggtcctcgtcgtcaggaacgccatccccgccgggtggaccgccgggaggacctaccggtccaccgtgaactacggctactgaggcagtgcgtgcgtgcgtatctcttcttcggtcttgggttttataagtgcgtccggaaaacgcgagaggccgatctggaagaggaggtttaggtatattcgtacgcgttcgatgtaacgacgtcttggtgcctccctccacacagaccgcagtgtgttttccttgtgatgtactaatgtttttatattagtatcggttgctctaacccgacagtaatatcaaacatcacttcatgttattcttctaaaccgataatgatatctttatttaaga

SEQ ID NO: 101101 - DNA, 78 bp, Zea Mays
ctgctgccattagcttgtggatctcttcgcctatcactctgcgcttctcctcgtcgaatcggcacagaggctgcctga

SEQ ID NO: 101102 - DNA, 100 bp, Zea Mays
gtggcgcaggcggtgtggttgcttgcatgcagcatccggcgcgccggttgcgcgacgcgtgggcctgggcctccatgctggcgtgtcgggagtcggagaa

SEQ ID NO: 101103 - DNA, 1235 bp, Zea Mays
caaagctagcagcaactcacaaatctcacatctacttgcgccccttctcccaattcatcctagcagcaagcatatattgagccacttgagtactgtaacaacagctctatatggcttgcaagcctcagctcctgttcttcaccgcgatcgcggctctagcctcgatcatccatccttgtgcatccgtcgagtttcaccgcaagctatccagctggtccgacggcggcgcaacgtggtacggcgccgccactggggctggaagtgatggtggcgcatgcgggtaccgaggtgccgtcgaccaggcgccgttctcgtccatgatcgccgcggggagcccttccatctacaactccggcaagggctgcggctcttgcttccaggttaagtgcaccggtaacgatgcgtgctccggcgaccccgtgaccgtcgtcatcactgacgaatgccctggcggtgcgtgcctcagcgagccgtcccacttcgacatgagcgggacggcattcggcgccatggcgaagcccggccaggccgacaagctgcgcggcgccggcgtcctccaaatccagtacacccgcgtgcagtgcaactggcctggcgtgcagctaaccttcgtggtcgacgccggctccaacccggagtacttcgccgtgctcgttaagtacgtgaacggcgacggcgacctctccgccgtcgacctcatgcagaccggggctggggcatcgtgggcgtccatgcagccctcgtggggcgccgtctggaagttcagcgccgggtcgccattgctggcgcccttgtccatccgcctgacgtccagctccggcaagcagctcgtcgccagcaatgtcattcccgcggggtggacgcccggcgccacctaccagtcttctgtcaactactaaaaccacaactacatgcattctgcaagtatatatgcattatgcatgcatatttactgtataagtaagtcgtcgcgtgtgtcatagctgcctatatgtactgtttgtgtgtctggactctcgctagtcacaacggtggtgcggtagtgtagctcactactgcaaaagagcaataagggcaagaggcagagcaggaggaggcgcagataggcgagtatgggtctcccctcttcgccgctagtcaatgcctatatatgcatgctatactgagatgtgtgttaataatgctgtgtatcagtgacagcagcttggtgttaccgtataattaatgtactgatt

SEQ ID NO: 101104 - DNA, 801 bp, Zea Mays
caagtagcatcttcaacaatcttcaacaatttttttcaacaagtaacaaagacaaacacgcggctaaatcgcacacagcgccggcagcgaggaccaacggggcagctgcgaacccagaaggccagaacaccggatagaggagcatcattttttttccaggcgagaccacacctccacagacagaggccgagcatgccagccggacgaggacgagccttcgtgtcgtcgagcagggcccggcggcccgtagcttaaggagtggcatggacaaactctgcaggagccttggcggcaagacgctgtctgcggcgcgagggagcaccaggacgctgacggcgcggcaggagcagcgtcagaggctgaggctgaagcgtcaagcaaagcagcaacagagacagcgcagcgggggcagcaagcgatggggagcgcggtggctaggggagcggatgcagcagggcgcgcggcgcagggtggcactggccataggcgagaagcgcgaaggaggccgagatgaccagcagagcaggtgtggggcgggaccgagaggctggccgctggagagagcgatggggcgatcgcgctgcgcgccagagggactgccaccatcggcatgtgcagacgggcccgctccgaggcgcggcagcacaatccggcacggcggcagcggaagcacaggggacagaggcaaagcggggggcggcagcttttgcgagggaagcgccaccccactgggattggaacggggttgacggagcggcggggggcaggagagcgggcggtggaagggggtctgtacgcgag

SEQ ID NO: 101105 - DNA, 1561 bp, Zea Mays
tggctgcctgctcctccccgggaggctcgtctcgctgcccggttgctttatatggggtgccacgccacgccagcgtgggtagcataccggctgtacttccagcagcagcatcatcagccgccgccgccgccgccgcgcttccactttgtcttgagccctgccctcaacgacgactcgcgggccggcagcacagcacgtatagctatggaaggaaacggtggcgcgggcggcggtagcggaagcgcggcaccgccctgggatctcgccatgcactgggcacccgccgtagtgtcgtcctacccgccgcagcccttggagctgcagcagcaggagcttacctgcctcaagctggggaagcggcccgcctgctgctgggcaggggcgccgggcaaccaagcggcgcaggtccacggcaatggcggcgctggtggcgcagctgctgagggtaagaggaaggacaaggcgcctgccgcggcggccgtgacgaggtgccaggtggaggggtgccacctgtcgctggcggacgccaaggagtaccaccggcggcacaaggtgtgcgaggcgcactccaaggcgccccgggtcgtcgtcctcggcgccgagcagcgcttctgccagcagtgcagccggttccacgcgatctcggagttcgacgacgcgaagcggagctgccgacggcgtctggccgggcacaacgagcggcggcggaagagcaacgccagcgaggccatggcaagaggcgtcgcgcacccacacggagtgacggctttcggccacggcggcttcctgccctcgcgcggcctcgtccccgcagggtcgtccccggcggcggctggtgctctctctcttctgtcatcggccagaggcagcgtggcgggcgccagcgggccctggctggtcacggcggcgcgggaggacatcccggcgcgctccagcgcggcgctcgacgaccttatcgccgagaaccgcgccgccgcgctcctcgcgcggcagtacttcgtctccgaccgctcgccggcgcccagacgggatttcgtcgcctcttcgacggcgggttgctccctccagcagcagcagcacccgcccgaccacgaccacacagccggctggcacccgcacccccacccctacagtggcggtggcggtggcagctgtggtggtcggtaccagtaccaccacgtggcgccgccgagcgcgtggcacgcgacgacgctggaccttatgcagccgacagcaagcaccaccgccgctcccgccaccgccggcgcagcgttgtggccagcagtgccggagagggcgggcgcgaggtcgtctcgctctcgcagcgagaccaaggatggcgacgcgtcgggatgtagcggcttggacgcgtgggcgcccactggtggagctcgtgtgctgtgatcgccacgcgatcgacgagcgtgacggccattatatatgttgcgcctgtagtggtcgatcgggtgttgcgtggtgcctgatgtcccaaaagggatgtgtaatccaatgtacttcgggatgtgctttttttttggtaatgaatcatgtttttctcacc

SEQ ID NO: 101106 - DNA, 1707 bp, Zea Mays
tggctgcctgctcctccccgggaggctcgtctcgctgcccggttgctttatatggggtgccacgccacgccagcgtgggtagcataccggctgtacttccagcagcagcatcatcagccgccgccgccgccgccgcgcttccactttgtcttgagccctgccctcaacgacgactcgcgggccggcagcacagcacgtatagctatggaaggaaacggtggcgcgggcggcggtagcggaagcgcggcaccgccctgggatctcgccatgcactgggcacccgccgtagtgtcgtcctacccgccgcagcccttggagctgcagcagcaggagcttacctgcctcaagctggggaagcggcccgcctgctgctgggcaggggcgccgggcaaccaagcggcgcaggtccacggcaatggcggcgctggtggcgcagctgctgagggtaagaggaaggacaaggcgcctgccgcggcggccgtgacgaggtgccaggtggaggggtgccacctgtcgctggcggacgccaaggagtaccaccggcggcacaaggtgtgcgaggcgcactccaaggcgccccgggtcgtcgtcctcggcgccgagcagcgcttctgccagcagtgcagccggtctgttcatatttaatttaactcgactatatacgttactccatacatagtccgtgagaggtaaacctttggattgatgagaataacatgcatgcgcggaacgtcgcgttgttgtgtgttttttctggctgcacatacgcgcgtgcaggttccacgcgatctcggagttcgacgacgcgaagcggagctgccgacggcgtctggccgggcacaacgagcggcggcggaagagcaacgccagcgaggccatggcaagaggcgtcgcgcacccacacggagtgacggctttcggccacggcggcttcctgccctcgcgcggcctcgtccccgcagggtcgtccccggcggcggctggtgctctctctcttctgtcatcggccagaggcagcgtggcgggcgccagcgggccctggctggtcacggcggcgcgggaggacatcccggcgcgctccagcgcggcgctcgacgaccttatcgccgagaaccgcgccgccgcgctcctcgcgcggcagtacttcgtctccgaccgctcgccggcgcccagacgggatttcgtcgcctcttcgacggcgggttgctccctccagcagcagcagcacccgcccgaccacgaccacacagccggctggcacccgcacccccacccctacagtggcggtggcggtggcagctgtggtggtcggtaccagtaccaccacgtggcgccgccgagcgcgtggcacgcgacgacgctggaccttatgcagccgacagcaagcaccaccgccgctcccgccaccgccggcgcagcgttgtggccagcagtgccggagagggcgggcgcgaggtcgtctcgctctcgcagcgagaccaaggatggcgacgcgtcgggatgtagcggcttggacgcgtgggcgcccactggtggagctcgtgtgctgtgatcgccacgcgatcgacgagcgtgacggccattatatatgttgcgcctgtagtggtcgatcgggtgttgcgtggtgcctgatgtcccaaaagggatgtgtaatccaatgtacttcgggatgtgctttttttttggtaatgaatcatgtttttctca

SEQ ID NO: 101107 - DNA, 129 bp, Zea Mays
attctctcgagatctaaatgttcattgaccaaatttgacactgtgtatgcaactatgtttttgtatgtcactgaaactacctataaaattatcactgtgtatcagtgtatgcagttggcttgatgtgag

SEQ ID NO: 101108 - DNA, 1602 bp, Zea Mays
ctattcattccttattttgctttattttgaattaactgttgttatgttcgatgttattgatgactcttgtaaaattttgaaggctccatattattcagtataagctcccaaaggtccacaatggtgctcattgtgacggtggccctggttgaattcatgaagtatgactgcaaagcttcatttggagggttttagtttcgaaaatatgaaggacaagcttggtgcagtggtgagaagccttaccagttaccaccgagccaaaggtagttcgacacagcctttctacaaaaatacagggatacggcttgccacgattatttctctcgggccctactcatgtggaagtctgtctttttttttcccctcgaaaataccctggccgatccggtgctagtaccgaactggaggatttattttacctggtccttggcttcagcttgatcagattctctcttatgtacaggttgttagttctagagttccggtacaatgggcgctagtgcgctacatatttggaaacccgatagattaactattcgaaaatccggaagtaacatgactgtttattaagttatttttctcccccctcccaaaacaactggaagctgaagccaacacaggcggtgccaaagtggcctttaatattttcagaagcacgggagcactgtctatgcacaatccgttgcagttaaatgtctaggttggcaatgcgccaatgtagtgactgtcggatacttgtggttactgagctttaccggctcttggaactcgttactacagtaccaaagaagtgaagaagctgaagccaacgcaagctgtgccaacgaggcacgaaatatttgcacaggctcgggactcgggagctcactctgtctatgcactataagttgcagttaaggttcgttctagctgtcacgtcattatcaatcactagtgttagtttttatctacctcaacgatactgttgagaatcactattggtgatcaacaccattacatgtctcaatttcttccttattttcttggtcatctatttttaattctttggacaattctttaatggtcaaatgtggatcattttcatgtcattatttatttggtcggtgttatgattcatcgatttatcgttcaaacaattttatataatttaacttcatgttatctatatagaggtgtttcgctatggccttcttttggtcagaggtctaggtgcgttgcttgcactttgcattgcgctctagccctatcgcgaccaaacagggcgtggtggttcgacactatcggactttggagtcatagtatcgcatgcatcacttcggttagtgacaaagtgcacaatacatgtgctctagccagaaccagtttgtcgggcctgccatggaagtcatcctttgcaacttgaagcagctaggcatcatctaatctgcttggctgggtcgtaggcaagcagttgtggatgttgttgaagagggtgatatttcaattgtttgtggaccatcgatccttgagctcagctacatgatggtacacttgcgagaaggctcagtagtggagttgtatgtggttgtttagcttgtacacaagcatggcactttgatctcc

SEQ ID NO: 101109 - DNA, 726 bp, Zea Mays
gcactgcttgtgcaggttgactggcactatccacggataggctggcgctttgccactcttttgtgggttgtcagcaagggaggtttttaaaatcagcaccgaaatttgttcctgcaggaagttgaaatgagtcgttggaggtgctgagtcacaatcactaggctatgaatcctttcaccagtgagctgtactatcgaaggaactctgcacggtcaaggctccatattattcagtataagctcccaaaggtccacaatggtgctcattgtgacggtggccctggttgaattcatgaagtatgactgcaaagcttcatttggagggttttagtttcgaaaatatgaaggacaagcttggtgcagtggtgagaagccttaccagttaccaccgagccaaaggtagttcgacacagcctttctacaaaaatacagggatacggcttgccacgattatttctctcgggccctactcatgtggaagtctgtctttttttttcccctcgaaaataccctggccgatccggtgctagtaccgaactggaggatttattttacctggtccttggcttcagcttgatcagattctctcttatgtacaggttgttagttctagagttccggtacaatgggcgctagtgcgctacatatttggaaacccgatagattaactattcgaaaatccggaagtaacatgactgtttattaagttatttttctcccccctccc

SEQ ID NO: 101110 - DNA, 2580 bp, Zea Mays
ctcttctcagcatctcttgagtatgatacgagcaacacattacggatagttctctctaagctaaaaagtacagaggattgggttgtgactgttcctgagggccgtgtcgaggtcctgactatcattgaaagatacaacacaaaactttgttcactgacgaagaagtttgacattaaagatgagacctaccattggacccataattatcattttaattttaggttatatgagaagttactttgcagtgtgtttgatattctcgaagatgggcaacttgtagaggaggctgatgagatactggaaataacaaagctgacctggcctatattgggcgttactgagaagctgcaccacatattctatgcctgggtgcttttccagaagttttctcaaactggggagattcttctactgaaacatgcaagccttcagatacgggaatttcgattgtaccatgacgttaaagaaatagagttatatacaaacagttttatttgttctgtggatgcctatggtggcaacaaggttctaagtttggttgacagtgtcctactcaaaataaatgtttggtgccgcagacagctaggcaattatcatgcacactatagtaagaataactactcgatctttgaggccacactgaacttggtcttgctattggtgacaaactccagtgaggacgattttgaagaaaccatgttcattgagagcccagtagggagtacaccagaactgaagttgatccatttactcattgtcagatccatccatgctgcttataagcaagcactaatttcatcaaatggccgatcagattcagaatttaagcatccattgacaattcttgcaaatgagctaaaggcagtggcagagaaagagtgcactgacttcagtccaatacttaacaagcactatcctgaagctcaaagagtagctctaatcttcttacacatgctatatggaaaacaattggaacttttcttggaaaggacagataattcggagaactcaaaagagatactggcagcatcaaataattttgagctctttatagctcagaagctttactcagtgtatggggaaactgttgggtcttcattctccaactatttaaagccatacatggtaggtcacttttcttcaccccttgttctccaatggcttcatgctcaacacgagaatgtcttggagtggacaaaacgtactattgagatagaggattggacacctttatcagctcacgagaaacaagcaagatctgtggttgaagtattccggattgtggaggagactgttgatcagttctttaatacgagcctgcccctggaaattgtccacttgcgaagtctactcatcggaatcactaggagtcttgaagtctatttgcttcacatggaaaatcaacaagtgcctggatctactcttctccctagtgctccagtcttgacacgttatgcagaatcaatgaatccatttgcaaagaggaaacttattgagcctacggttcctgaagaaaaggttgctatgaagttgaacaatttggcagtgcccaaattatgtgtgaaactcaacactcttcaattcatcagggatcaacttgatgccatagaagaaggtgtcaaacaatcctgggtctctgtcttgtcagctgtcagattgttggattatttgtcttgtatggctagtggaagagctctttcagaaagtttgacatcatctgatgaatcggttgatgagttgtttacaatatttgatgatgtgcgaatgactgctgtgaagataactgatgtgatcttgaactttattggaacaagggctgtattttgggatatgcgggattcatttattttctctttgtatcgagacagcgttgaaggagcacgcatgcagatatttatccccacaattgaccaagttcttgatcaggtatgtgatttaattgttgatgtgttaagagaccaagttgtactcagaatatttcaagcctgcatggatggactcatttgggtcctactggatggaggcccatcacgtgctttttttgagacagatgtggatttgatgcaacaagatcttgctattctcaaggatctctttatagcagagggtcaaggtttaccaatagatatagttgaaaaggaggctagacaaactcaccagatattggacttatatatgctgaaggccgatgcagttattgatatgctgataaatgcaagtgaccaaatgcctcacgatcctgaagctacaaatgctcgaagaagatatgtacatgatgccaacacccttcttcgagttttgtgtcataagaaggataaaattgcctctacattcttgagaatccagtaccatcttccaaggtgttcagattatgatgatgttcctgtgaaggatgtgtcatctaaagtacctatcttttcagacatgctgaaaagaggtacctcattcaattggtctgagacagggcaacaaagctttagaattatgaagaagaaactgcaagaagctacttggcagtaaagatgggtcttgctaaggaaactctgcttggtttgcagttttttttatatatacaacagc

SEQ ID NO: 101111 - DNA, 2740 bp, Zea Mays
gtttgcattaactacatgtgtatcttcatatttgaagtatacatttaaagttctaactcaccttccttaacaatacatttccaacagtggaaaagtacacttctctgaagaaaaaagagaaaagaagcacaaattcttgaagggacgaagaactaagactgaaggatcaaatccatcacctcaggtggaagatggctatgcccacattcttgatctgacccgagtacaaatggaggattgggttgtgactgttcctgagggccgtgtcgaggtcctgactatcattgaaagatacaacacaaaactttgttcactgacgaagaagtttgacattaaagatgagacctaccattggacccataattatcattttaattttaggttatatgagaagttactttgcagtgtgtttgatattctcgaagatgggcaacttgtagaggaggctgatgagatactggaaataacaaagctgacctggcctatattgggcgttactgagaagctgcaccacatattctatgcctgggtgcttttccagaagttttctcaaactggggagattcttctactgaaacatgcaagccttcagatacgggaatttcgattgtaccatgacgttaaagaaatagagttatatacaaacagttttatttgttctgtggatgcctatggtggcaacaaggttctaagtttggttgacagtgtcctactcaaaataaatgtttggtgccgcagacagctaggcaattatcatgcacactatagtaagaataactactcgatctttgaggccacactgaacttggtcttgctattggtgacaaactccagtgaggacgattttgaagaaaccatgttcattgagagcccagtagggagtacaccagaactgaagttgatccatttactcattgtcagatccatccatgctgcttataagcaagcactaatttcatcaaatggccgatcagattcagaatttaagcatccattgacaattcttgcaaatgagctaaaggcagtggcagagaaagagtgcactgacttcagtccaatacttaacaagcactatcctgaagctcaaagagtagctctaatcttcttacacatgctatatggaaaacaattggaacttttcttggaaaggacagataattcggagaactcaaaagagatactggcagcatcaaataattttgagctctttatagctcagaagctttactcagtgtatggggaaactgttgggtcttcattctccaactatttaaagccatacatggtaggtcacttttcttcaccccttgttctccaatggcttcatgctcaacacgagaatgtcttggagtggacaaaacgtactattgagatagaggattggacacctttatcagctcacgagaaacaagcaagatctgtggttgaagtattccggattgtggaggagactgttgatcagttctttaatacgagcctgcccctggaaattgtccacttgcgaagtctactcatcggaatcactaggagtcttgaagtctatttgcttcacatggaaaatcaacaagtgcctggatctactcttctccctagtgctccagtcttgacacgttatgcagaatcaatgaatccatttgcaaagaggaaacttattgagcctacggttcctgaagaaaaggttgctatgaagttgaacaatttggcagtgcccaaattatgtgtgaaactcaacactcttcaattcatcagggatcaacttgatgccatagaagaaggtgtcaaacaatcctgggtctctgtcttgtcagctgtcagattgttggattatttgtcttgtatggctagtggaagagctctttcagaaagtttgacatcatctgatgaatcggttgatgagttgtttacaatatttgatgatgtgcgaatgactgctgtgaagataactgatgtgatcttgaactttattggaacaagggctgtattttgggatatgcgggattcatttattttctctttgtatcgagacagcgttgaaggagcacgcatgcagatatttatccccacaattgaccaagttcttgatcaggtatgtgatttaattgttgatgtgttaagagaccaagttgtactcagaatatttcaagcctgcatggatggactcatttgggtcctactggatggaggcccatcacgtgctttttttgagacagatgtggatttgatgcaacaagatcttgctattctcaaggatctctttatagcagagggtcaaggtttaccaatagatatagttgaaaaggaggctagacaaactcaccagatattggacttatatatgctgaaggccgatgcagttattgatatgctgataaatgcaagtgaccaaatgcctcacgatcctgaagctacaaatgctcgaagaagatatgtacatgatgccaacacccttcttcgagttttgtgtcataagaaggataaaattgcctctacattcttgagaatccagtaccatcttccaaggtgttcagattatgatgatgttcctgtgaaggatgtgtcatctaaagtacctatcttttcagacatgctgaaaagaggtacctcattcaattggtctgagacagggcaacaaagctttagaattatgaagaagaaactgcaagaagctacttggcagtaaagatgggtcttgctaaggaaactctgcttggtttgcagttttttttatatatacaacagc

SEQ ID NO: 101112 - DNA, 773 bp, Zea Mays
ctcttctcagcatctcttgagtatgatacgagcaacacattacggatagttctctctaagctaaaaagtacagaggattgggttgtgactgttcctgagggccgtgtcgaggtcctgactatcattgaaagatacaacacaaaactttgttcactgacgaagaagtttgacattaaagatgagacctaccattggacccataattatcattttaattttaggttatatgagaagttactttgcagtgtgtttgatattctcgaagatgggcaacttgtagaggaggctgatgagatactggaaataacaaagctgacctggcctatattgggcgttactgagaagctgcaccacatattctatgcctgggtgcttttccagaagttttctcaaactggggagattcttctactgaaacatgcaagccttcagatacgggaatttcgattgtaccatgacgttaaagaaatagagttatatacaaacagttttatttgttctgtggatgcctatggtggcaacaaggttctaagtttggttgacagtgtcctactcaaaataaatgtttggtgccgcagacagctaggcaattatcatgcacactatagtaaggtttgttgttgtccctatgtcccttgtttgcaactgcatgtttttaagcagacgaattcttactgtacacaatcaactaatttcttgatgtgctttcctgtttttttagaaaacgtaggagaactgcacatctttatagataatagagagaacaagactta

SEQ ID NO: 101113 - DNA, 1799 bp, Zea Mays
agagaaaagactccagggtccctaaatcccgtcccccaattccattctcggaagagaccatttccttcctcctgatctctcacggagttcctctccatggcgacgccccgctctccgagcccccgcgccgaagcgcccctcgattccgcgccgctgctgggcggtgcctccggcggcgggagccgtcgccgaggcggagcgctccgccgaccctcgctccgcggtgcggcgcagctgctgcgccgcggcgggcggcgagccatgcgggagccctcggtgctggtgcgggaggcagccgcagagcacctggaggaacggcaggcggactgggcctactcccgccccgtcgtggcgctcgacctgctctggaacctcgccttcatcaccgtcgctgcggtcgtgctcgtgctcagccgcgacgaggactcgcccatgccgctccggacctgggtcgccggctacgccctgcagtgcgtcatacacatggtgtgcgtcgcaatcgagtaccggatgcgccatggccagcgcggcggcgccggcgcagcgcccgctgacgaggaaaggggcagcgacggatcgtcgtcgtctagtgatgaggatgacagggagctcgatcgccatggtcgccgcaccgattacgccagtattgcaaaacacttggagtctgctaatacaatgttctccttcatatggtggataatcggattttattggatatctgctgggggtgaagaggttatccgggacgcacctcagctttactggctctgcatagtcttcctggcatttgatgtgttttttgttgtattctgtgttgctctggcttgtatcattggtattgctgtctgttgttgccttccttgtatcatagcaattctctatgcagtatctgatcaggaaggagcatctgaagatgacattcgtcaaatcccaagatacaaatttcggcggaccgatgagcctgaaaagcaagatgttgaccccatgggtccttttggtggaataatgacagagtgtggcaccaatcaacctattgagaaagtgcttgcagctgaagatgcagagtgttgtatttgcctatctgcttatgatgatggtgcagagttgcgggaactcccttgtgggcaccatttccactgcacctgcatcgataagtggcttcacatcaatgcaacatgccccctgtgcaagtacaacattcggaaaagcaacagtagcagtggaagtgaagaagtatgaatgcaaccgcttgacaatgccaatctgtttaaacttcgtgcctgtgtcgttgctaatgtaactccagggcttgagcagtgtaaatttttgtactaaaagaagtgctgatagagtcaattatgtattaaagttactcaaagtgctgtctatatgtcgtataagttaataaatagttgggtgtgcatctgtatttactgtcaggaatgattagttgcactgtaacttgtattctttcgagtgattcgggcgttttcctgctgggctatgatggcagtttgtcttccatggtttctactgacaagaaattttcgactggccattatttacagcagcgacatagctgatgaaagaagccaattggtgatggatgcttcgggtatagtccgtacagtgctatcatttgcatcgcaaagtagcgttcactgtttctcttgcggtgtactgtttcgtacagcgcccgtactccgcattttgcacatccgaagtcactgttccgccctccagcaagctttgcacatctgaagtcactattctgccccccagcaagctccttgaaccac

SEQ ID NO: 101114 - DNA, 2081 bp, Zea Mays
atggggctcctcagctccctgccgccccatcgccggggcgccttctcgggtggcggatggcagtggtcgttcctcgacgtcgtatggggggtcttcctcatcgccgtggtcgtcttcctcgcgctcgtcttcactccgcggcgcggggaccccatcctaaccaccccctctgtcgcccgcgccggcggcacggtgccgccgtgcgctgcctctgaggtggacctcctcccctgcgaggacccgcgccgcagctcccgcctcagccgcgagatgaactactaccgggagcgccactgcccaactcgtggcgaggcgctcgcgtgccttgtgccgccgccccgaggttaccgcattcctgtgccctggcccgagagcctccacaagatctggcatgacaacatgccttatggtaagattgctgaaagaaaaggtcatcaagggtggatgaagcatgaaggttcgtacttcatttttcctggcggtgggactatgttccctgatggagctgaacaatatattgaaaagcttagccagtatgttccaatgaaaactggtgtcatcaggactggtcttgatatgggatgcggggttgctagctttggtggatttttgcttaaggagaatatcatgacactttcatttgcaccaagagattcacataagtctcaaatacaatttgctttggagagaggagttccagcatttcttttgatgttgggcactcgccgtcttccttttccagcacagtcctttgattttgtccattgttcccggtgtttgataccttttactgcctataatggatcttactttattgaagctgaccgtctgctaaggcatgggggctatctaatcatatcaggcccccctgtgagatggaagaatcaggagaaggaatgggatgaacttcaagcaatggcaggagctttgtgttacaaattgatcactgtagatggtaatactgccatttggaagaaacctgctgaggcttcatgtcttcctaaccaaaatggatttggccttgatctttgtagcaccgactatgatccagatgaagcatggtacttcaagttgaataaatgtgtcagtaaaatttcagtggcggaagagacagctataggttccattctcaagtggccagataggctgtctaaaccttctgctagggcatcagttatcaacaatggagcaaacttgtttgaagtagatagtcagaagtgggttaggagagtgtcatattataagaaatcgcttggtgtgaagcttgggagcacaaacatacgcaatgtcatggacatgaatgcattctttggaggattcgcagccgctataatatctgatcctgtatgggttatgaatgttgttcctggtcagaagccattgacacttggagttatttatgataggggccttataggggtttatcatgactggtgtgaaccattctcaacgtatcctcgtacctatgatcttattcatgctgatgcaattgactccttgataagtggcccgatttcaggcactagcagatgtgacctgtttgatgtcatgttggagatggatcgcatactgcgcccagaaggaactgccgttatacgggcctcgccagacgtagtagccaaggcagcacagatcgctcagtcgattcggtggaaggcacaggtgcatgacagtgaaccagaatcaggcagtaccgagaaaatacttgtggctaccaaaacattttggaagctgccactaacaaaacaataggctaatgcgagtttgaactttgaacccttttcacttgcgctcccttaattttgtattcttttggggtgcgctgaagggatatagcaggctaatgggattgctggagtagtttagtcaaggtggtcattctttccttcatttctttatagcgcaaagttaggtgtggtgtgattctcgttgtggctccattcccttgattctgattgatgttgttatagcctatgaacattactttaagccatctggtttattcccgtggtggttacagcaccctatgatcaagagaccaaccgatctagctgtataagagatttttttagttctgttac

SEQ ID NO: 101115 - DNA, 655 bp, Zea Mays
gctcgatctaggcgagctaatgtgggaaccgagcgcatgttagaccatgtgaaaaggcagtcctgtaactggagttcggcaatgccaaggcagtcaattgtgctattgaacagggagcaaaggtggttgtccaggtggccctggtttttgtcagcagcgcctctcaacatgttgaagtcgccgaccaacagccagggacctgagatactggggaggaggtctgcaagttcagcaaggaaggctagagagtcttggtggttggatggggcatagacgttggtgatggtgagggtcgcgtctgttaggtgcgagctgaaggtggtggtgagggagaaagatcgtgaaatgctggacgtgaggtcgaacacaacactgtcctaggcggtcacaatgccccctggaaccagcggcgttgaggcagaggaagctaggaaggtttttaggcagaaatgagcgcgctttgaaacaattgagctcgcaaagtttggactcttgcaggcaagcaacagagggggaggcaagggagatagcatcacgaacgatagtgcatttatccggattgcctaatgaagcgtcccgatcctttgggactcaaatgtgatacaattactagtcccaggaggctagtaaacacatttcttacttcaaatagtac

SEQ ID NO: 101116 - DNA, 1519 bp, Zea Mays
ccttcctctcctgctgcctttctctcttctcggtgaagcgtgtgttcatttcactgttttggtttcatctcccgctctttctttaccccgtgctccggccaagtgctggaaccaagaaagcctcatggggcggccggccgacgggcggtagagaggcggagatgggctgggcgcctaggtggctgcgcgggctgctcggcggcggcaggaaggccgccgtgacgaagccggcgaaggagaagaagctctggggattcgggaagtccttccgggcaacattgtgcggcggcaggcggcggagacgctgcgatgcatgcacgcgctcgtccgcgtccaggcgcgcgcgcgcgcgtgtcgcgcaattcgctcgcagcatgtcgcggctcatccggatccgccaacgccggagaagtacgatcaggcgggtgcccccaggcacgcccgttccggctctctgaaggcaaactcttccaagacgccgggcggcgagaggctgggtagggagaggtcggaatcttgcgggaggaactggctggaccgctgggtggaggagaggtacacggacgacgagaagaacgccaagattctcgaagtggacaacggcaagccagggcggcacggttccaagcggcgcggcggcaaccatcaccagtcgccgtgctcgacgatgacctccgagcagaacagccggagctacgcgaccatgccggagtcgccgtccaaggactcgacgaccgcgcagcagtccgtgccgagcccgtcgtccgtgggcatggctgccgaggccctgagcccgctgcgcgtgccagcggacatcgccgagctctgcgacagcccccagttcttctcggcgacgtcgcggcccgggagctccaggagggggggcgcgttcacgccggcggccaagagcgagtgctcgcgcagcctcttcggcggctactccgactgccccaactacatggcgaacacggagtcgttccgcgccaaggcgcgttcccagagcgcgcccaagcagaggccgcagcagcagtacgagaagtcgggctccctccgcagggcgtcggcgcacgccctcgcggcggggccggcagcggcacagaggtcggtggcctcgttgcacgccatgaaggcgtatccgggctccggcagattggaccgacttggcatgccggtcaggtactgatccggatcctacctagctcgcttcaggataatgtggtgctgcgcctgaactgattgatacccagtgtctcaactcaagcgatgaggatgaagtgaattctactagtggtcgttattagatcttgttccttcggtggtgcctattaccgtcaacagttttctgtttgttgctttgtgtagcgaagtgtaagttgctggtacgtagctggtaatactatgcgtgcttaaccgcaaaaacgactcccctctacgtgatctccgtggtatatagctgctgccgtcaaaaccatgcatgtgaattggaaccaaatatattaagttaggagtactatgctgt

SEQ ID NO: 101117 - DNA, 1426 bp, Zea Mays
cgttactgttattgcaggcggctaccgccgtagccgcgtagtaatggcggtggtgggttggtatggcaagttgcgagatgccaacctcagctttgtactgtagatgcccatggccatgggaccattgctgattaactaaccccctgtgttattgaaggcgaggcgggcgctgaaggcgttgagggggctggtgaagctgcaggcgctggtccggggcaacattgtgcggcggcaggcggcggagacgctgcgatgcatgcacgcgctcgtccgcgtccaggcgcgcgcgcgcgcgtgtcgcgcaattcgctcgcagcatgtcgcggctcatccggatccgccaacgccggagaagtacgatcaggcgggtgcccccaggcacgcccgttccggctctctgaaggcaaactcttccaagacgccgggcggcgagaggctgggtagggagaggtcggaatcttgcgggaggaactggctggaccgctgggtggaggagaggtacacggacgacgagaagaacgccaagattctcgaagtggacaacggcaagccagggcggcacggttccaagcggcgcggcggcaaccatcaccagtcgccgtgctcgacgatgacctccgagcagaacagccggagctacgcgaccatgccggagtcgccgtccaaggactcgacgaccgcgcagcagtccgtgccgagcccgtcgtccgtgggcatggctgccgaggccctgagcccgctgcgcgtgccagcggacatcgccgagctctgcgacagcccccagttcttctcggcgacgtcgcggcccgggagctccaggagggggggcgcgttcacgccggcggccaagagcgagtgctcgcgcagcctcttcggcggctactccgactgccccaactacatggcgaacacggagtcgttccgcgccaaggcgcgttcccagagcgcgcccaagcagaggccgcagcagcagtacgagaagtcgggctccctccgcagggcgtcggcgcacgccctcgcggcggggccggcagcggcacagaggtcggtggcctcgttgcacgccatgaaggcgtatccgggctccggcagattggaccgacttggcatgccggtcaggtactgatccggatcctacctagctcgcttcaggataatgtggtgctgcgcctgaactgattgatacccagtgtctcaactcaagcgatgaggatgaagtgaattctactagtggtcgttattagatcttgttccttcggtggtgcctattaccgtcaacagttttctgtttgttgctttgtgtagcgaagtgtaagttgctggtacgtagctggtaatactatgcgtgcttaaccgcaaaaacgactcccctctacgtgatctccgtggtatatagctgctgccgtcaaaaccatgcatgtgaatt

SEQ ID NO: 101118 - DNA, 1484 bp, Zea Mays
ccttcctctcctgctgcctttctctcttctcggtgaagcgtgtgttcatttcactgttttggtttcatctcccgctctttctttaccccgtgctccggccaagtgctggaaccaagaaagcctcatggggcggccggccgacgggcggtagagaggcggagatgggctgggcgcctaggtggctgcgcgggctgctcggcggcggcaggaaggccgccgtgacgaagccggcgaaggagaagaagctctggggattcgggaagtccttccggggcaacattgtgcggcggcaggcggcggagacgctgcgatgcatgcacgcgctcgtccgcgtccaggcgcgcgcgcgcgcgtgtcgcgcaattcgctcgcagcatgtcgcggctcatccggatccgccaacgccggagaagtacgatcaggcgggtgcccccaggcacgcccgttccggctctctgaaggcaaactcttccaagacgccgggcggcgagaggctgggtagggagaggtcggaatcttgcgggaggaactggctggaccgctgggtggaggagaggtacacggacgacgagaagaacgccaagattctcgaagtggacaacggcaagccagggcggcacggttccaagcggcgcggcggcaaccatcaccagtcgccgtgctcgacgatgacctccgagcagaacagccggagctacgcgaccatgccggagtcgccgtccaaggactcgacgaccgcgcagcagtccgtgccgagcccgtcgtccgtgggcatggctgccgaggccctgagcccgctgcgcgtgccagcggacatcgccgagctctgcgacagcccccagttcttctcggcgacgtcgcggcccgggagctccaggagggggggcgcgttcacgccggcggccaagagcgagtgctcgcgcagcctcttcggcggctactccgactgccccaactacatggcgaacacggagtcgttccgcgccaaggcgcgttcccagagcgcgcccaagcagaggccgcagcagcagtacgagaagtcgggctccctccgcagggcgtcggcgcacgccctcgcggcggggccggcagcggcacagaggtcggtggcctcgttgcacgccatgaaggcgtatccgggctccggcagattggaccgacttggcatgccggtcaggtactgatccggatcctacctagctcgcttcaggataatgtggtgctgcgcctgaactgattgatacccagtgtctcaactcaagcgatgaggatgaagtgaattctactagtggtcgttattagatcttgttccttcggtggtgcctattaccgtcaacagttttctgtttgttgctttgtgtagcgaagtgtaagttgctggtacgtagctggtaatactatgcgtgcttaaccgcaaaaacgactcccctctacgtgatctccgtggtatatagctgctgccgtcaaaaccatgcatgtgaatt

SEQ ID NO: 101119 - DNA, 1849 bp, Zea Mays
agactctcccagtcccttcctctcctgctgcctttctctcttctcggtgaagcgtgtgttcatttcactgttttggtttcatctcccgctctttctttaccccgtgctccggccaagtgctggaaccaagaaagcctcatggggcggccggccgacgggcggtagagaggcggagatgggctgggcgcctaggtggctgcgcgggctgctcggcggcggcaggaaggccgccgtgacgaagccggcgaaggagaagaagctctggggattcgggaagtccttccgggaaaaggaccccgcgccagcgccggaacggcctcggacgccttcggtgcagcccacggcgacgcctcgccgggggtttgcggcggcgccggatgaggcggacgacgagcagagcaagcgtgctatcgctgtggccgcggcgacggcggcggtggcagaggccgccgtcgctgctgcccaggcggccgccgccgtggtgcggttgacgagctccggccggtgcccaccgccggccgccgcgaagcgggaggagtgggcggctgttcggatccaggccgctttccgtggctacctggcgaggcgggcgctgaaggcgttgagggggctggtgaagctgcaggcgctggtccggggcaacattgtgcggcggcaggcggcggagacgctgcgatgcatgcacgcgctcgtccgcgtccaggcgcgcgcgcgcgcgtgtcgcgcaattcgctcgcagcatgtcgcggctcatccggatccgccaacgccggagaagtacgatcaggcgggtgcccccaggcacgcccgttccggctctctgaaggcaaactcttccaagacgccgggcggcgagaggctgggtagggagaggtcggaatcttgcgggaggaactggctggaccgctgggtggaggagaggtacacggacgacgagaagaacgccaagattctcgaagtggacaacggcaagccagggcggcacggttccaagcggcgcggcggcaaccatcaccagtcgccgtgctcgacgatgacctccgagcagaacagccggagctacgcgaccatgccggagtcgccgtccaaggactcgacgaccgcgcagcagtccgtgccgagcccgtcgtccgtgggcatggctgccgaggccctgagcccgctgcgcgtgccagcggacatcgccgagctctgcgacagcccccagttcttctcggcgacgtcgcggcccgggagctccaggagggggggcgcgttcacgccggcggccaagagcgagtgctcgcgcagcctcttcggcggctactccgactgccccaactacatggcgaacacggagtcgttccgcgccaaggcgcgttcccagagcgcgcccaagcagaggccgcagcagcagtacgagaagtcgggctccctccgcagggcgtcggcgcacgccctcgcggcggggccggcagcggcacagaggtcggtggcctcgttgcacgccatgaaggcgtatccgggctccggcagattggaccgacttggcatgccggtcaggtactgatccggatcctacctagctcgcttcaggataatgtggtgctgcgcctgaactgattgatacccagtgtctcaactcaagcgatgaggatgaagtgaattctactagtggtcgttattagatcttgttccttcggtggtgcctattaccgtcaacagttttctgtttgttgctttgtgtagcgaagtgtaagttgctggtacgtagctggtaatactatgcgtgcttaaccgcaaaaacgactcccctctacgtgatctccgtggtatatagctgctgccgtcaaaaccatgcatgtgaatt

SEQ ID NO: 101120 - DNA, 1874 bp, Zea Mays
actctcacgaacccacacagaacctccctagctcgtctccccttagcacatgcaactatatcttcagctagcttctccctgcctggccaccaccatccctctctccgggaaccttcttgtcacctcggaggccatggcttccatggcctatatagctgcctgtaccgcggcattggcgatcttcgtcgctctgctcctctgggcgtaccgatggagccaccccaagtcgagaggcatgctcccgccgggctctatgggcatccccctcctcggcgagacgatgcagttcttcgcgccgaacccgacctacgacgtgtcccccttcgtgaaggagagggtgaagcggtacgggagcatcttcaagacgagcatcgtggggcggcaggtggtggtgtcggcggacccggacatgaactacttcgtgttccagcaggaggggaagctgttcgagagctggtacccggacaccttcaccgagatcttcggccgcgacaacgtcggctccctgcacggcttcatgtacaagtacctcaagaccctcgtgctccgcctctacggccaggagaacctcaaggcggtgctcctcgccgagacggacgccgcctgccgaggcagcctcgcctcgtgggcggcgcagcccagcgtcgagctcaaggaaggcctctccacgatgatatttgatcttaccgccaagaagctgatcggctacgagccgtccaagtcgtcagagagcctgaggaagaacttcgtggcgttcatccgcggcctgatttctttccccgtcaacattcccggcacggcctaccacgaatgcatggaggggcggaagaacgcgatgaaggtgctgaagcgcatgatgaaggagcggatggcggatcccgagcgtcggtgcgaggacttcttcgaccacgtgatccaggaactccggagggagaagccgctcctgacggagaccatcgcgctggacctcatgttcgtgctcctcttcgccagcttcgagaccacggcgctggcgctcaccctcggcgtcaagctcctcaccgacaaccccaaggtcgtcgacgcgttgagggaggagcacgacgcgatcgccaagaacaggaaggacccggatgcccccgtcacgtgggccgagtacagatcgatgaccttcaccaatcaggtcatcatggagatggtaaggcttgcgaacatcgtgccggggatatttcgaaaggccctgcaagacgttgagatcaaaggctatacgattccggcgggatggggcgtcatggtgtgcccaccggcagtgcacttaaaccccgacatctatgaagaccctctggcgttcaacccgtggagatggcagggcaaacctgaaatcaccggtgggacgaaacacttcatggcgtttggaggtggcctcaggttttgcgttggcactgatcttagcagggtcttgatggcaacattcatccacagcttggttacaaaatacagttggaggacggtaaaaggaggcaacatagtccggacccccggtctcggctttcctgatggcttccacatccaactttttcctagaaattgaaattggcccttttcaaacctctgactaggtcgtgcatgtaattaaattggataggtctcttaggaccaacgccgcaacagtaaaggattggaaatcatatacttagcctagtgttagcctgttagggtagacatcactagttacaagttcagtcatgttactggtactacctctaatctttgcaaggggtttttgtacttggttgtttgttttccatgtggttagtaatctacccatgtgtttgtatgtatatctggttatacatgtctaatgaaagaaaaaatacaggagctgtgcttaaaga

SEQ ID NO: 101121 - DNA, 337 bp, Zea Mays
catgacatttgtgctataggtaatatgatcttctaactcaagtttgcattcagtttagactttaggttatgttagtcataacaagcttgaaaagacatattaacaaggaaagatcatattaacagttcatgttacgtttgcagatatggacctcagtggttttctccacattaggaaagccggaagagccttttgaactcagttttttgctaacagtggtgttatggtgaaaccgagttttgtgtgtatgtaccaacagctaaaatgtaaacacgacattatcatagctgagtacaggaataattatctcttatatcttattgtaaaatctgaaaca

SEQ ID NO: 101122 - DNA, 713 bp, Zea Mays
cagcgccacgtgcgccactcgctcgcccccgcctgggccccataaggaccacgacgacgcagccgctctccccggaaggccggaacacttcctcctacgagatcgcttagcgtcgaggcaatggctcgagcacctggcggcgcccgccggcggggcggaggcagcggcaggaggggccaggcggacgggggccaggcggtgcgcaagggccactggacggcggaggaggacgcggtgctgctgaggcacgtgctcgtgcacggcccccgggactggagctccattcgatccaaaggcttcctgccgcgcacgggcaagtcctgccgcctccgctgggtgaacaagctcaggccagacctcaagactggctgcaagttctccgcagaggaggagcgggtggtgctggagctgcaggcgcagttcgggaacaaatgggcgaggatctccacctacttgccgggcaggacggacaacgacgtgaagaacttctggagcacccgccagaagcggatcgccaggctgctgggaacgcctccccgcggccggtccagcaggagccggagccgcagcgccaagggcaaggcgcctgttgttgcctcctctctcgagtcacgacccgccaccgtggtaaagcccttgcacgttgcagcacacattgcccgctcctctctctcaggaacaaaataattgccgtgtttatcaagtttgactag

SEQ ID NO: 101123 - DNA, 871 bp, Zea Mays
tattagttatatacgtgttcagggcgtaattcattatcaaatcgtaggatcaatatacatttttgatgatttttcttgttttgtctgctcccagacacgcaacccatttagttctaatccttcgccacagcctccaattgactggattcgggggtgactggcgtcggcgagtcctgcagctcatacaggcgcttcgctgtggaccctgtcccacatgtcagtggtctggcggttggacacttccatgtgggctccgcatgtcggtgagatttcgggttgtatagagtgccaactccagcagctgaatcgatccccgaataccctagtgacggcggcggagatggacgaccgaggcggcggcggggacgccaagaggtggccgtggtgggctgcggcgagcgcggcacaggccgcggccgggctcgcgtggttccgacggggcaggagcggaacggcagtggcgatgccgttcaaggcattcggcatcgcctccctcatcgtcggctccggcgccaccgccgtcgccgctggggtgcttgccgcgggcgtcggatcggtggaggagatgaagggcgtgggcgcgagcatccggcggtggatgggagctcctcctcgccgagcgggaggtagtgactaaccctcgcactgcaactgtggtctgtctgaacctctgaggatttctcagctctggtaggaaactacagaatgagtgctgtagtgtgggctgcttcacgtttcagagctatgagagagtgtcattctgaattcatagccagaatgcagggcagtaataagattactgttgtaacctgtattgtatcacaagcttttgatccctcaaaatttatttccacagagcacatactccgaa

SEQ ID NO: 101124 - DNA, 1319 bp, Zea Mays
cgagaggtcaaggtggtaaccatgctagttgttctcgttcccttgttagttgagctctttcccttcctcgcttggaaccaaatcaattcggagcggcggagcaaaacgatcccttgcctcgcttccattcgaatcatctcgaatggggcactaatcgagaagctaatgacgcacaaatcgcgagatctgtagcgccactcggcttcaccggcggcgcggcgggcatggaagcgcagaacggctccggcgtaggggcgcccgtggtgctcaacgtgtacgaccttacgcccatgaacaactacctctactggttcggcctcggtattttccactccggaatcgaagtccacggcatggagtacggatatggagcacacgagtttccaacaagtggggtatttgaggtggaaccaaagagttgtcctggtttcacctacagaagatctgtgtggatgggcacaactgacttgtctagagcagagttccgctcgttcattgaaaatcttgcaggaaagtacaatggcaacacataccatttgatttcaaagaactgcaaccattttacagatgatgtctgtaaaaacttgaccaggaaatcaatctctgggtgggtgaatcggctagcaagagtgggttcatttttcaactgtcttctaccagaaagcatccaagtttccacagtaagacacgtccctactcatcctgcattttctgatgatgatatggattcggtatcttcatcggttattggagacagtgatctggaagagctggaccaacaccttctgccatcaactgctgacgtccattctatagacgtgccgccaaagctagcgaaagatcttctctgagttattcagcactttgggttttcacatagcaaggataacttggactgctgcagttgatgtccactgagtgcttctctgggtggcgcagccgcgcaggactccaggaatgtcgaatgctgctaattgtatcgattcttttgccactgaggtccttacatgcacacagagctctcgacagaaatgacacgctttctaatcctttgcctgttgttatgacttttatgttgtgacttcatcctaagtatcttgtgttcgagcgatactgtacgcattcagaatgccgtcaatggcgtgtctggttcgaggcatacaaagtagtatcttgtgttcgagtgatattgtaggcactgagaatgcgtcaatggtgtgtgtttgactggtcacaggtaatccatcgagtgtagttaaaccaaacaaatcttaatatcatctggcttcaatccgtgcagcttttcctagtgatatata

SEQ ID NO: 101125 - DNA, 1956 bp, Zea Mays
ttcaattccattccacacacacccgtctcagctcactccctcctcctccagtttcgtcagctcatcatcatcataaaccgaacacagagctctcgattccattccaggatgctgctgaacccggcgtcagaggcgtcggtgctagacaccatccggcagcacctcctcgaggagccagccgacgagagcttcgggagcctggtggcggaccagtggagcggctcgctcccgttccgcaccgacgacgccgacgacatggtggtgttcggggcgctgcaggacgccttcgcctacggctggctgcccgacggctcattcgtgcacgtgaagcccgagccggtgcggtcccccgactcgtcctcctacccctgctcctacgacggctcaccctgcttcggcctcctggacccggagccgccgctgacgcccggcaccaccacgcccagtagtagggggcaggaggaggccgcggcggccatggcccggggcaagcactacaggggggtgaggcagcgcccgtggggcaagttcgcggcggagatcagggaccccgccaggaacggcgcgcgcgtctggctcggcacgtacgacaccgccgaggacgccgcgctcgcctacgaccgcgccgcctaccgcatgcgcggctcgcgcgcgctcctcaacttcccgctccgcatcggctccggggacaagcgcccgtcgccggcgccgcccgagcccgccacctcctcggactcctcctcgtcttcggccagcggctcgcacaagaggcggaagcgaggcgaggccgcggctgccaacatggccatggcgctggtgcccccgccctcccagcttaaccggccggcccagccgtggttccctgccgcgccggtcgagcaggcggcgatggctccgcgcgtggagcagatcgtcgtctagtctagccatgcgccggcgaaagcgggggcaaggccctgcgctgcacttgcgtgacagctccaccggatggaatgcgaatatgcgataaagctcgggatgccgctgttgctccttgcaactggcgcaagtggaagaagctgtctctgtgtgtaatcaagtgtcttgtctgcggacgaattttcggtatgtgcgtcgttgtcactgctcgggattgtgctgctgctgataagttcggaaaactgtacaaagacgtagggagagagacgatgcgtgatcaagaacagcccgctttgttctttctctgataaaaaaaatatccagcggccaaacaggcgcgcaagtcaacagaacagcgacctgagctcgtgacacgagatcgagatcgaaatcgcccccactgaaaccagaactgcagagccgagcggtaatccaacgctgacgacgtagcaggaaaggttggcttgctcttgctcacggacacacccacagctccaacattgggtttgtgaggtaaaataaaatggaagggcttaaccgtatgcctttttaggcttttactagtttaaaatgcaagtggcgcgatggccggatggcggcatggcgccagcgtcgccatcgtgcttttgcggtggtggtgccggagacgaaagggagaagacgccgcaagccagcgatgaaaggagcctaagccccctcgtctttactcgtagccaacgataaaaatctgatgccccgtgcttatccgcaatttataccattgtatctgaaataagcatatgccccgtgccattgattccagacattttccagcacagcgttgtcgtgtcgcgcaacagctggacttgggacacggaccgagggagtagtatatgagattttctttcctttttcccaacctgttgggtgttctgctgttctatcgatcacagtggcacccgattgagcacaggtcattgggccaaagcagggcagtgtttcatgaaaagcagggcgctttcatgaatggtagctttattagcagaaagggaaaaaaaa

SEQ ID NO: 101126 - DNA, 877 bp, Zea Mays
gggaaccggcccctttgcctcctccggcgcggggacggggagcctgaaggcccaccagcccgacggatggccacggtggcggatatggctgcgccccttgcgccggacggtggcgtccaggcaggagacgacgacgggcaggggcagcgccgccgccgggagcgagagcacgtagccggggggccctcccactcctctcctcggccaccgccatccatgtcgccggtcgccctggtcgccgcagatcggcgggttcttgggtctaatccaggcggctgcgcctctcctttgccgccttcatccaccatcaccatgaacagcggccgcgcgagcaagcaggataggcggcaaccgacggaccggcggcgcgttagcagagcaagggaaagaaagaggtgggaaagatgcgcggcggggacacgacgctggcgggggcgggattattgcagggagggacggcgcgggcgggggcggaatgccgggaagggacggcgtgggcaggggcgggatgccgggaagggacggcgggggctggagcgggggcacggtgagggtggtggacgccctcgctccagccttaaggtgtagtagagatttgccagcgcgagacatctttttgcaaaagaaaaaaaattagattaatttcttgtttgtaaagtaatttttttttctcgaacacgcaggagagctgcgtatcattatattaaaggaagaaatacacaaggtctaaaatagaccggggtacaactgacgccttacggcggcctgaacgaaactagcatagattgactcatctataaaaactctaggctacatgagatagggaggcaacaagggatgtcaaccccttggccccggcagtctcccacagacggcg

SEQ ID NO: 101127 - DNA, 708 bp, Zea Mays
aacgactttttccgatctacgagtgatgaataggagggaattaaattcccttcaatttatctcaatacatctctaatcgagctcttttagcaacctgagatcccgggaggatccggcccaatccctaccggtgatttcgccgcacggtgatttcgctgagcacgagcactccctcgcacctgcgtgctcagtgaagcaccggagcttcctcgcgcacggctgcctcctcttcttcgcgcaagcaccggatcttcctcctcttctttatgcaaggcattagatctcccttctcttctcttctctggagagctttttctggagcttgggcgtgaggatcctgcaggccggtggcgtggagcgcgcgttccggcgcgccttgtcagccgagaaagtcgagctggtgaagtccctccactctacaccaccggcgggcccatagcacggcagcctcagcccccgcgcggtgagctaatctattgtcggcatggatgtagtcactccacttcagaaaagagtcagttgcatggctcctggcgaacattggacatgtttattttgttacctttgctgttacaaatttggcactcatttattttgagcgttgcgtggtcaaagaaagaaggttgtttatttgagtggcatgaataaaaaagtcttattaactgagtgtgagtgttttgatgatgaacataaaatgacctccgactg

SEQ ID NO: 101128 - DNA, 598 bp, Zea Mays
acatttggatcttgatctataatcatccctaccccgcctacgacgtcggggtggtggtgcctgggaaggagaggaacatagagcgaggtgcttgatctggctaagcgaggaggtcggcggcggggaaggtgcttgatctgaccagcaaggagcgtatggaattcaaacgaagccctccaaaacgatagcactattccaaatttctggaaggaataggtgatggccgagtgggagctcgaggtcaaagagctcaacgcctccgtgcaaagccgagagaccctactccagctcgatcagaccgctcctgcgcgcccggcttgagtgggaggacaacttgagggcttgttcggtttgaggtggtttgaggaaaattggagggtatttaatctcctcagcatggtgagctaatctattgtcggcatggatgtagtcactccacttcagaaaagagtcagttgcatggctcctggcgaacattggacatgtttattttgttacctttgctgttacaaatttggcactcatttattttgagcgttgcgtggtcaaagaaagaaggttgtttatttgagtggcatgaataaaaaagtcttattaa

SEQ ID NO: 101129 - DNA, 2075 bp, Zea Mays
ggaagagaagtggagcaccagcgaaccgcatatgctcggggttcttcgtcgcgcagccctcgccgcagcgtcatcgccggcggcggacctccgacagtttcagtgtgcttaccatagaagcagtgagagattatcacctatccgagccattacaaaatatctgcaaaatttctcgactactttttgttgcacagagaagaccaagaagtttcatatggtcttaattgggctattgctggaaaaggtgtcattgtgaaagataaggtcctccataacttggaaacatctgagcttcagaaaggtggcgctacttaccctgactttttgtctggtataccacttcatgttagaggagatgttattggtggtgtccctggtgtttctaaagctcaatttgcaaagcttctaaaactggtaggttctaaattttggcttcaccactcaggccctgttcgttttttgtcaaacaatggggattgagggggaacaaatcccctataagtcaaaatcctcctcaatcccttccaatccccccccccccaaatccccatgattttgggatgaaacgaacatggcctcaatgggatgatgatattcaatgatgattgtcatgaatggagctgaaatactgttagtccctttttttagcatctgattttttttctcatttttaatttagttgtgacatctccctatttgttgaagggcagtcctggtgcaacaatgagagctgtctcactgagtcatcaggtcacgggttcgaagtagtctctccgtatttgcgggggaaggcttgcttcggtttatccctatcctagacgtcacatatgggagcctccaacagtggatctacctttttttatctccctgtttgttgacagactacttgcttgcataggtgacgttccatctttcatccatctcgtgtctatatgttcaagatggcgccattggttcctcagcagaatgtgatgcaaaggttcgggtcattagtgataatccctctgctgttatgttactgtcgaatgtcctttggaaaataccagatcgtgcgatttcccatgacacatcccctttgactatatatgctaccagttcaataagtaacaacgttaagactgttcttggttctggaacacaatatgctaatggatttgctgtggcggatattgaacgatcatctctaatcctatgcggtaaagcatttgctgattcagctatcgtgaaagatgcacttactgctatgacagccccaatattgtctgcaagaggaggcctccctgttccaggatggattctgaactttggtggttctactgtattattgtttgccccagtggaaatcatgatgtcctgcgtagaaatccacaatgctctattgtccattgactgtggtgcagtcatatcttccaaggggtctactgtgcttttcccaacaaaggcaagcagggagcagaaactgcttaccaaaccaactgcagtaattatcgtatcatctgatagctctggcgccataccatctgtatgtaagctctctcctggccaggctgcctaccatttcttggctggatatcacgatggaaaatttgtcccagcatacaacagagccccctctcctgctgacccacttgcacttgcaagttctttattctcacatttgaaagaagatgatacaccatcgtatctgatcaacgctaagcactctggaaagtacattgacggcaatgggtttatgaaattattaaagctggcactatctcacgatcttcctgacatcaaaactgaaggctctagagttggggaactcaaggggaagtacaggagctttctatccagcaagtttggccaatgtttacccgaggaattctctttttaggagatacaccctgaggttgcaatgaacatgtatatttactggcataggtttacattttggtttgaaaaggtgtcagtattcccattctgtctcagtttcaatgtaatactctattaccttacattgcatctttccgcctcctggtgtttggatatactgacgtaacgacaatgtagctagtacctacatgcatgaattg

SEQ ID NO: 101130 - DNA, 1315 bp, Zea Mays
tcttggcctagaaaagcaaagtgagggacgagaaagggagggaagtgtgaaggtaggagagagagagagggagccaagggaagctctcttctttcttcctcctcctcgtcctctcgaattccgtctcttgtctctgtcctcctcgctcggcttccccggttcttgagaggggaaataggaggcggagccgaggagagggatggggagggacgagaggttcccagtgtgggaggccgcgctcggcgctggggtcgccgccgccttcgccgctgggctcgtcggggtttacctttccatgccggactccgactacagcttcctcaagctgccacgtaatctccaggaactccaaatcctcactggccatcttgagaactatactagcgactacaccctacaggtgttggtaggctactgcgccgtgtacatcttcatgcagaccttcatgatcccaggaacgatattcatgtcactgcttgctggtgctctgtttgggcagctccggggcgtggccctggtagtcttcgccgccactgctggcgcttcttcgtgctatttcctgtcgaagatgattgggaagccactggtgttcacgctgtggccagataaactcagcttcttccagagacaggttgctaaaagaagagagaagctcttgaattacatgcttttcctcagggtgaccccaacattgccaaataccttcatcaacttggcttcaccgatagtagatgtcccctaccacatattcttactgggaactctcattggccttatcccagcttcttatgtgactgtcagggctggaatcgctcttggagaattaacttcgctaagcgacctttacgacacccagtcgatagcgctgctattcctgatcggtgttgtttcagtcacaccagcattgttgggcaaggacgaggcacaagaaaaaccatcagaaatggctgtaggcgcgtcgtgatcaccaaagcaccgagcacctgtacatatcaacatgcagccatgcagtggcttcattagttcagatcgacgggcccgtgtggctggatgacaaaaacggttcgcatggctactacacagcttggataggccattcagcacattatgattatgaacgattgaatgaatctgggaagcagaatgcccgttccacaagctgctctgatgtgtaaacgagtagtgctgttcggataggcctggcatttagtctaatccctgtttatattgaccagattcattcaatccatattcagtggttcaaagataatgccctgtccagctgctgtgttcctcaatgtctttctccatttct

SEQ ID NO: 101131 - DNA, 1222 bp, Zea Mays
tcttggcctagaaaagcaaagtgagggacgagaaagggagggaagtgtgaaggtaggagagagagagagggagccaagggaagctctcttctttcttcctcctcctcgtcctctcgaattccgtctcttgtctctgtcctcctcgctcggcttccccggttcttgagaggggaaataggaggcggagccgaggagagggatggggagggacgagaggttcccagtgtgggaggccgcgctcggcgctggggtcgccgccgccttcgccgctgggctcgtcggggtttacctttccatgccggactccgactacagcttcctcaagctgccacgtaatctccaggaactccaaatcctcactggccatcttgagaactatactagcgactacaccctacaggtgttgctccggggcgtggccctggtagtcttcgccgccactgctggcgcttcttcgtgctatttcctgtcgaagatgattgggaagccactggtgttcacgctgtggccagataaactcagcttcttccagagacaggttgctaaaagaagagagaagctcttgaattacatgcttttcctcagggtgaccccaacattgccaaataccttcatcaacttggcttcaccgatagtagatgtcccctaccacatattcttactgggaactctcattggccttatcccagcttcttatgtgactgtcagggctggaatcgctcttggagaattaacttcgctaagcgacctttacgacacccagtcgatagcgctgctattcctgatcggtgttgtttcagtcacaccagcattgttgggcaaggacgaggcacaagaaaaaccatcagaaatggctgtaggcgcgtcgtgatcaccaaagcaccgagcacctgtacatatcaacatgcagccatgcagtggcttcattagttcagatcgacgggcccgtgtggctggatgacaaaaacggttcgcatggctactacacagcttggataggccattcagcacattatgattatgaacgattgaatgaatctgggaagcagaatgcccgttccacaagctgctctgatgtgtaaacgagtagtgctgttcggataggcctggcatttagtctaatccctgtttatattgaccagattcattcaatccatattcagtggttcaaagataatgccctgtccagctgctgtgttcctcaatgtctttctccatttct

SEQ ID NO: 101132 - DNA, 2072 bp, Zea Mays
gcatatttctgttgtacatgcaatgaatggcttttctggtcttgtgcagttgtgtttgcgtgttcgagcagcaaacatctgatgtaactgttaactcagagaacgaggaaaccaggaggggctttacatctgctgttatgttgccaaatgatcaaggattgctatgtgttactgctgatcagcagtttttgttctattgtcccaaaagaactgatgatggggactttgaactgtctctatatagacgactaataggttataatgatgagattcttgacttgaagtttatcggggaggaggaacaataccttgccgtggctaccaacttggagcaggtccgtgtttacgatgttgcgtcgatgtcatgttcttatgtactcgctggccacactgaaatagttgtttgcattgacacctgtgtctctgcttccgggaagacacttgtcgtaactgggagcaaggatcatactgtaaggttatgggatgccgaaagaaaaggctgtattggcattggcaaaggccatctgggagctgttggttctgttgccttctcaaagaaaacaaataacttttttgttagtggcagcagtgatcgaaccatcaaggtatggacctgggacgatgcacttggtgatgctgaggatgaagtccctcttaaagcaaaggctgttgtagctgcacatgataaagatattaattctctggcaatttcacctaatgatggccttgtttgcagtggttctgaggaccgaactgcttgcatatggaagctccctaacctagtgttatctgttgtccttaagggacacaaaagaggaatctggtcagttgagttttcttctgttgaacaatgtgtaatgacgtcctctggtgatagaacaatcaaaatatggtccgttgctgatggctcatgcttgaagacatttgaaggtcatacatcaagtgttctgcgagcttctttcctttcacgtggaactcaagttatttcttgcggaagtgatggtctagtgaagctatggacaatcaagacaaatgaatgtattgctacttatgataagcatgatgggaaggtctgggcattggctgttggcatgaaaactgaaatggttgctactggtggaaccgatgctgtcctcaacctgtggcatgattccaccatggaagataagcaggaagattttcgtaagaaggaggaagaagttttaagaggccaggaattggaaaatgctgtgtcagattctgactacgcaaaggcaatacaacttgcatttgagcttagaagaccacacagacttctagatttattctcaaagcttgcaaggagagctgatgcagaggatccaatagaaaaggctcttcttggtcttccaacggatggccttcgcgtgcttcttgaatacgtccgtgaatggaatacgaagcccaagttctgtcatgttgcacagtttgtgctttttcggttattgaggagtttctctcccactgatatcctggagatcaagggcatcagtgagctccttgagggccttattccgtattcgcagaggcatttcagccgagtcgatagactagtccgaagcacgtttctgttggactatacgctgatgcgaatgtccgtggtagatccagatgtagatgcgggaacaatcaaagatgaaatgaacggttcgtctgtggagaacggtgaacttgcagagcctcggcctgcttcacctgtaccacagaagtcaagcaagaagagaaaatctggcaaatcaggtaaaaagggcaaggagaagaaggtgaaggttgcctcaagcggactactcagcaaggatgtttctgttgaaccctaaatatctagctgagaatctgttttttttatgcatgccgccaattttgtagctgctgttgcaacggacgttgcccaacacacgaatcccatatgatgtaaatgcatttttgctgatttattaggagggcgaagtgttatcaaaatctgccatgccaaatgttctggtaagcaaaagttgccaaaagttggatggaataatttttacatagatttggtaagccaagtatgaggtattggt

SEQ ID NO: 101133 - DNA, 3016 bp, Zea Mays
gcctgagtgcctgacttaactttgcttaaaccctcttctccctccatctcccgcgccgccgccgcaaaaccctagctccgacgcccctccgccgttgccgcggccgccagaaccagccatggcttcgacgcatgtttataagaagaactaccgctgcgaccgctccctgcagcagttctacacgggcgggccctttgcggtcgggctcgcccccggcggcgatggcgagggcggcgccgaggctgaggccttcctcgcgtgcgcgtgcggtggagaggtacgcgtggtgtccgccgcggacgcctccgccataggggagcccgtcgacggagactcggaggccatcaccgcgctagcgctgtcccccgactcacggctcatattcgccgcgggccacagcaggcttattagggtctgggacctcgcgtcccgaacttgcatacgcagctggaagggacatgatggtcctatcatggccatggcatgccatgcttctggtggtttgcttgcaactgccggagcagacaagaaggtctgcgtatgggatgtggatggtggattttgcacccattttcttagaggtcatatgggcgttgtgacaaccattatgtttcacaaagatccaaagcgccttttgttgttttcaggaagtgaagatggcactgtgcgagtgtggaaccttgaaaccaaaaaatgtgttgctgttcttaaagagcatttttcagcagtcacttcattggcattgtctgatgatggacaaacattgctcagcgctgggagggataagattgttaccgcatgggatattcgtaagtacagctcaaagaagacaataccgacatatgaaatgatagaagctgtttccttcattggatcaggaagtgagctcttggcttgtttgggcatagaactggcaaatataaaggagaaatctgctggttattttcttacagttggtgaacgtggggtcgtgcgtgtctggtgcttggagagttgtgtttgcgtgttcgagcagcaaacatctgatgtaactgttaactcagagaacgaggaaaccaggaggggctttacatctgctgttatgttgccaaatgatcaaggattgctatgtgttactgctgatcagcagtttttgttctattgtcccaaaagaactgatgatggggactttgaactgtctctatatagacgactaataggttataatgatgagattcttgacttgaagtttatcggggaggaggaacaataccttgccgtggctaccaacttggagcaggtccgtgtttacgatgttgcgtcgatgtcatgttcttatgtactcgctggccacactgaaatagttgtttgcattgacacctgtgtctctgcttccgggaagacacttgtcgtaactgggagcaaggatcatactgtaaggttatgggatgccgaaagaaaaggctgtattggcattggcaaaggccatctgggagctgttggttctgttgccttctcaaagaaaacaaataacttttttgttagtggcagcagtgatcgaaccatcaaggtatggacctgggacgatgcacttggtgatgctgaggatgaagtccctcttaaagcaaaggctgttgtagctgcacatgataaagatattaattctctggcaatttcacctaatgatggccttgtttgcagtggttctgaggaccgaactgcttgcatatggaagctccctaacctagtgttatctgttgtccttaagggacacaaaagaggaatctggtcagttgagttttcttctgttgaacaatgtgtaatgacgtcctctggtgatagaacaatcaaaatatggtccgttgctgatggctcatgcttgaagacatttgaaggtcatacatcaagtgttctgcgagcttctttcctttcacgtggaactcaagttatttcttgcggaagtgatggtctagtgaagctatggacaatcaagacaaatgaatgtattgctacttatgataagcatgatgggaaggtctgggcattggctgttggcatgaaaactgaaatggttgctactggtggaaccgatgctgtcctcaacctgtggcatgattccaccatggaagataagcaggaagattttcgtaagaaggaggaagaagttttaagaggccaggaattggaaaatgctgtgtcagattctgactacgcaaaggcaatacaacttgcatttgagcttagaagaccacacagacttctagatttattctcaaagcttgcaaggagagctgatgcagaggatccaatagaaaaggctcttcttggtcttccaacggatggccttcgcgtgcttcttgaatacgtccgtgaatggaatacgaagcccaagttctgtcatgttgcacagtttgtgctttttcggttattgaggagtttctctcccactgatatcctggagatcaagggcatcagtgagctccttgagggccttattccgtattcgcagaggcatttcagccgagtcgatagactagtccgaagcacgtttctgttggactatacgctgatgcgaatgtccgtggtagatccagatgtagatgcgggaacaatcaaagatgaaatgaacggttcgtctgtggagaacggtgaacttgcagagcctcggcctgcttcacctgtaccacagaagtcaagcaagaagagaaaatctggcaaatcaggtaaaaagggcaaggagaagaaggtgaaggttgcctcaagcggactactcagcaaggatgtttctgttgaaccctaaatatctagctgagaatctgttttttttatgcatgccgccaattttgtagctgctgttgcaacggacgttgcccaacacacgaatcccatatgatgtaaatgcatttttgctgatttattaggagggcgaagtgttatcaaaatctgccatgccaaatgttctggtaagcaaaagttgccaaaagttggatggaataatttttacatagatttggtaagccaagtatgaggtattggt

SEQ ID NO: 101134 - DNA, 1406 bp, Zea Mays
ctcttaaatgttgccatgcacgaaacatccgtccctataaatataggggaccgtaccgtacccctggaccgcacatacctcctgcacccccgacatccatcgatcgatcgatcgagctgtagcaacaaggaggagatggggaggtccccgtgctgctgccacgacgccggcgtcaagaaaggcccgtggacggaggaggaggaccgcgccctggtggaccacatccagaggcacggcggccacgtcagcagctggcgcaacctgcccaaggccgccgggctcaaccgctgcggcaagagctgccgcctccgctggaccaactacctccgccccgacatcaagcgcggcaacttcaccgacgacgaggagcgcctcatcatcggcctccatgcccagctcggtaacaggtggtcgacgatcgcgacgcacctggacgggcggacggacaacgagatcaagaactactggaacacgcacatccgcaagaagctgctgcgcatgggcgtcgaccccgtcacgcaccagcgcctgccccccgacgacctgctgctcgccgtctccgcctcccccacgacgacgatcctctcggcggcggcgagccagctgcggggcctgaacaccgctctcatgcaggtgcaagcgctgcagtttctgctgcaggccgtcagtggagttggaaacgacgttaacgccgccgccgctgctgctaatggtggtggtggtctcgtccctagcctcagcgcagccgcagataataacgccgttctgaacgcgagccgtagcgtcgttccaggcttccaggacctgcagctgacgacgatgaccaggcctcttctcgtgtctcacgcgaatcacgggtcagctgatcatcatcccagctacatcgcaactgatgatgtggtgcagcgacgactgaacgcttcggctcctccggtggtcggcggcggcgcctgtgcagagccgctggctgttgcattggcgtccacggcttatcgacaccaagtggcagctgccgctgacgagccggtgaatggttttgccgagctaatactgtcggagcccatcgagatgccgagcatgtgctctctggaggacgaagatcatttctggaaggacatgctcgtagagagcagcagcttcagcctgccactatgaaatttccaagcgtgggaacgggaggacgactggcggtgcatgcatgtgttgtacaaaatcgtgtgattatctcaatgtttctttaactagcttcgcattgtcacttggtatatctatctgtgatctgtgtgcagtgtgtatttcacccacctcatataccagtgacatttccaagcgtgcagtgtgtattttacctatacccatacgaatatagttaatagaatactaacaatgtgtatcttgtttttttg

SEQ ID NO: 101135 - DNA, 1120 bp, Zea Mays
atcatccctagctgctgcccttttgtggccttgtcacagtagcggctcagccacccacctctcctttcccatggccgccgccgccgttcgccgcctactgcgtggggcctcctccacctccgtatccaacaccagccgtctcctctcctccaccacctcgccgcctccccaccggagccccaacaccaactcaccggttgccttcgactggtccgacgacgacgctgacggctcctcacatctaccgccgtccacggaaaagaaggatgaactacctcccccctactacgaccccttcaacaagaagcccgccattgccgagccgtccgaccccaccaacctacaggaggtcttccacaagatgcggaaagagggcctcaccgattacgccatcaagatgttcgacggattgtccaaggacgggctcacccacgaagctctcgcgctctttgccgtcatcaaggataggggctccatgcccgacgtcgtcgcccacaccgccgtcctcgaggcgtacgccagcgcaggccccgcgcactggcgcgacgccgtgcgcacgtacgaccgcatgctcgcgtccggcgtcatgcccaacgcgtacacgctggccgtgcttgtcagggggctcgcggccagcgaccggtgcgcagaagcaggcaagtaccttgtcgagatgctcgaccgcgggatgcggcccaatgtggcgacgtatctggccgcgttcgaggcgtatctgaggatggagaaagtggaagaggggaaagcactgctagagacgatgaaggggaaggggttcaggccagacgaggaggccgtgcgtggcggcactgtgaagcgggggcaagtgtttgatggcctaatgaaattgctctttggcaagtaatagtggtacgctatgattggtgcatgtatgaatgtttgaatcaaaaaataggagtatgtgcttgtgagtcttcaggacttccaagtgaaatatgtattgtttgtcctaagggctaatggataatgctccttgttttgtaggctaaacctacaagtttttgggacagattttgaatgctagaatgtctttttttaaatgggtagcatgcaatattattcactgtggatcttattttaa

SEQ ID NO: 101136 - DNA, 468 bp, Zea Mays
tcctacttgaggagatggtagactagtgctcctccccaagtgcaatggaggccaagccactggtactggcaacagggggttgcctgcatgctcttgatcaacttcgtactcaatagttgatcttatggtggatgcctcccgatcttctcctatgatctcgattcgcaccaggtatttcttgaagccacggtcaaaaaagcttccctcggttaccaggcactccttgacgcggttttcgtcatcgaccttgacgaacttctctttgaaagcctctgatccaggagtccctagcgagcgacatgagtgagtcgtaagaaagcaaagttactcggagctgagacgcgcatcatacggacctcaaagaagctcgtgttttcagtgttctaacctggcgggagagtgacgatcgagcagaaccgttccaactccaccgtctccctctacgagttcaacctttgagaaaactcc

SEQ ID NO: 101137 - DNA, 1179 bp, Zea Mays
ggggctcggaacgaacgagaacaaacaggcatggggaagggccgggcaccgtgctgcgccaaggtggggctcaacaaaggctcctggacgccggaagaggacatgcgcctcatcgcctacattcagaagtacggccacgccaactggcgcgccctgcccaagcaagcaggtctgctgcggtgcgggaagagctgccggctgcggtggatcaactacctgcgcccggacctcaagcgcggcaacttcaccgccgaggaggaggaggccatcatcaagctccacggcttgctcgggaacaagtggtccaagatcgcgtcgtgcctgccgggccggacggacaacgagatcaagaacgtctggaacacgcacttgaagaagcgggtgtcgccggccggggaggagcgcggcgccgccgggtccaagaagaagaagaaaaagaagacgacgaaggcagccgctggcggtggcgcggaggcgccgctgccgctcccgtcgccgtcgccgtcctcgtccacgacgacgaccaacttctccagcggcgactccggcgagcagcagagcaacaacatgagcaaggaagcggacgacgagctggacctggagaacttcgagatgatgccgatgctcgacgtcgacgaccccagcttcggcttcggcacgctggtggacaccgcgccagcgccgtacggctcggccgtgtccgtgtccgcgtccgcggcaacgtcgccgtgcgcctcgtccacgtccccgccgccggcgagcgccccgcccggcgtggacgacctgctcgtgctgcccgagatcgacatgggccatgagctgtggagcatcatcgacggcgacgccgccgaggcaccggcgccgcgctgccagaggaatccggcagagccgacgaacggcgccgacgcgggcagccacggagcggagggaaaggagtggtggttggaggacctggagagggagttgggcctgtggggcaccgtggaggactaccagtacccaatgggcccccagggtctgctggtcgctgaccacccggacccgcttcctgccatggtggacgacccagtgtcctgctacttccaggcgggccccgcctcggccgtgctccaggaactacccggataccctgtccctgctactgcagtcacaggcagtattaatcagatggggttgtga

SEQ ID NO: 101138 - DNA, 1227 bp, Zea Mays
cccggcatctcaccgcggggccgcgtgcgtgcgtgtatataaacgcctggccctgccactgtcccggttgcagctccgcacaggcccctggcacaggcgaggagcaggagcttctgaggtgtcgccgcgtagcagcaactgcagcttggggctcggaacgaacgagaagaaacaggcatggggaagggccgggcaccgtgctgcgccaaggtggggctcaacaagggctcctggacgccggaggaggacatgcgcctcatcgcctacattcagaagtacggccacgccaactggcgcgccctgcccaagcaagcaggtctgctgcggtgcgggaagagctgccggctgcggtggatcaactacctgcgcccggacctcaagcgcggcaacttcaccgccgaggaggaggaggccatcatcaagctccacggcttgctcgggaacaagtggtccaagatcgcgtcgtgcctgccgggccggacggacaacgagatcaagaacgtctggaacacgcacttgaagaagcgggtgtcgccggccggggaggagcgcggcgccgccgggtccaagaagaagaagaaaaagaagacgacgaaggcagccgctggcggtggcgcggaggcgccgctgccgctcccgtcgccgtcgccgtcctcgtccacgacgacgaccaacttctccagcggcgactccggcgagcagcagagcaacaacatgagcaaggaagcggacgacgagctggacctggagaacttcgagatgatgccgatgctcgacgtcgacgaccccagcttcggctttggcacgctggtggacaccgcgccagcgccgtacggctcggccgtgtccgtgtccgtgtccgcggcaacgtctccgtgcgcctcgtccacgtccccgccgccggcgagcgccccgcccggcgtggacgacctgctcgtgctgcccgagatcgacatcggccatgagctgtggagcatcatcgacggcgatgccgctgaggcaccggcgccgtgctgccagaggaatccggcagagccgacgaacggcgccgacgcggccagccacggagcggagggaaaggagtggtggttggaggaccttgagagggagttgggcctgtggggcaccgtggaggactaccagtacccaatgggcccccagggtctgctggtcgctgaccacccggacccgattcctgccatggtggacgacccagtgtcctgttga

SEQ ID NO: 101139 - DNA, 402 bp, Zea Mays
atggcgtgtttagttaaaatatcttgggccttttctctgtttgtctacttgcttgtgctcagtgatttagaggcagagttccatgtcgatgttgtatattctatgaagaagttcatacttatgtatgttacaagcacacttagtaccgtgaaggtgagcaatgtatcactgaaagcagcacagcgtgagataaaggaattcttttccttttctggtgacattgtgcatgttgaaatgcagagtggcgatgaactttctcaagttgcctacattacttttaaagacaaccaaggagctgagacggcaatgcttctcacggtatatttattgtctcatttgaaagttttggaggactcaaactatttttcatggattgatgattcactatctgtattatcgtga

SEQ ID NO: 101140 - DNA, 1573 bp, Zea Mays
ctcacgctgtcgccgagaaaaactcaggaacccaatcagccgacggaatctcacctgctctgctcctcagccccagcccaggccttcgctctcgctgccctgagccctccgcgttccccgcccgccacgcgatgccggcgtgggccgaagcggcgctcgtgctcgcctcaccatcccccgccaccgcctcctcgaccacgtcatcatgtggcgccaggccgcgcgccgccgtggggtccgtcaggctcttctgcaagggattcccttgtagcattcgttccaaagctggattccagattcataattaccgtacaaggatgtttaagattaaagcaaaagcagaatctggtgatggctacacacggcttgctccacttagatttgaatctccaagtggccagcttctgattcaaatactacaatcacaccctcatcttatccctgcaacagttgatcagcaacttgaaaatcttcaatcagagaaatctgcccaaagtgaagaagcctcaaaagttccccaggacctcctctacaagagaattgcagaagtcaaagagaaggaaaggcaaaatgccttagaagagattatctactgttgggttacatataggttcatggaaaatgacatatatatgacacctgcattatcaccagggggtggccctgtacgtgacatatccgcattgcctaatcaagaagacaaattgcgaaacatacactccgcagacgcctttgagatgatacaaaaccatctcaatcttatcatgggagaaaagatagcatcaccgcccgatactgttgttgagatcagcaacttgaatcttggaaagctgtatgcagcatccatcatgtatggttactttctgaagagagtggatgagcgattccaacttgagaaaactatgaagactctcccaccaaagcccaaccagcagatagtatttgaaaacctacagcctaatccattctgggatatggagtccttagtacagattacacctgatggggaggagataagtttggacgatgaaaaatcaaatccaaacaagttgaggtcttatgtctcacaactggatgctgacacattgcaaagatatgctactatcagatcgaaggaagccgtctcactgatcgagaagcaaactcaggcgttgtttggacggccagacatcaaagtattggacgatggttcggtcaatgcaaaggatggcagaatgataacaatcacatttacagagctcaatcatctggtcttggaggcagttgctttcggttccttcctttgggaagctgagagttacgtagaatcaaaataccattttgtcaacagttgaatgtgccttttcttatttgaattttggaaatggtttgtgtacatgtgatagggtaggatccatatctgatctattttttcagtgtattcatggttcttgctcgctatcagtaacagccaaagcatcaccacccatgaaccatgcctgtaacaggtttgagatttttcatcaaaggaagcgggcctgatccatagtgtaatctaacaggcaagtggaaattaacaaacagttgatgtttt

SEQ ID NO: 101141 - DNA, 825 bp, Zea Mays
cggaatctcacctgctctgctcctcagccccagcccaggccttcgctctcgctgccctgagccctccgcgttccccgcccgccacgcgatgccggcgtgggccgaagcggcgctcgtgctcgcctcaccatcccccgccaccgcctcctcgaccacgtcatcatgtggcgccaggccgcgcgccgccgtggggtccgtcaggctcttctgcaagggattcccttgtagcattcgttccaaagctggattccagattcataattaccgtacaaggatgtttaagattaaagcaaaagcagaatctggtgatggctacacacggcttgctccacttagatttgaatctccaagtggccagcttctgattcaaatactacaatcacaccctcatcttatccctgcaacagttgatcagcaacttgaaaatcttcaatcagagaaatctgcccaaagtgaagaagcctcaaaagttccccaggacctcctctacaagtaagttctctcaattccttagaactgtttccttcaaatcagcagcaagcactcatatatcatacctgctattttgttcacaatgttttatgttaagatgtgaaatctggaaggcaattatccatgaaaaattatgcgcatttagtctcacgacattgaacaaaatggtttctgtatgcaaaaggcacagttcagacaatatataatttggaagaacagaaacagtgttggcagtagagatagggggaacaaggtggagctaagtagattgactgatgagatgatagcctaccataacttgcttgggactagaaggctttgatgttgttgttg

SEQ ID NO: 101142 - DNA, 1322 bp, Zea Mays
acacggccgagtcgtctttcccgacgcaaaagtcgacgacgcgtgcgccttgctcgctcgctcgccgtctgccgtcgttctaggtttagagccaggtcaccagcgctaggagggcgcgaagtcgagtagacggccgggcctctcccgttctccacggacggctagcgctactggaggcgacgcctggacggcgaccccgcacactcacagccacaccctccacctgtgtgactattcaagggcttaggccgagccgcccggccaatcgccgtccgccggaccgctgaggaatttttctttctcgtcaaaagttactgcattcattttacagtaatggctatggggttgattaatgctaatcctataatccatgagaaaaaagagaggcgtgccagacaggcaccagagaccacagatgaaaatgcagcagagcccatagatcagctggaaatatttgatcacattagagatataaaggatccagagcacccgtactcactggaacagctgaatgtggtgactgaagattcaattgaactcaatgatgaaagtaattatgtcagggttacattcaccccaacagtggagcactgcagtatggcaactattattggcctttgcatacgcgtgaaacttgtacggagtctccctcctcgttacaaggtggacataagggttgcccctggatcacatgcaactgaagctgctgtgaataagcaactgaacgacaaagaacgtgttgcggctgcattggagaacccaaacctactggacatggtcgaagagtgcttatcaccaacatttgattgaggcctgaatatcaatatatcggtgtgacatggtgttgatgttcaggagccacacatgctcattgccaatggagttcactcctgtctttcgagaaccaaaatgccttgggtgttaagtgacgtgttgcatgatttttttcctccgccccgttcagttattatatatgctactatggcgctaccctttttggacgtttttggtgcttgtgacctcactgatcaatgcgagatgtaatcagctcttgtgctgtagctttcagagtgctgtcgctgtcactgtcagtgccacgccattttgtggctgtgtacccccacacgatcaacttggtaggagaatcctagaatcctctagcacgggttgtttctgttaccataccggaagtgttttattctgagtttctagcatgtttttttatcgtataacaggcccttagtttgcataagaaaatcgttatttctattaaagtttggcttcttggctcaactgatcatgctaattctgtggcttaattt

SEQ ID NO: 101143 - DNA, 1134 bp, Zea Mays
accagaaagacacggccgagtcgtctttcccgacgcaaaagtcgacgacgcgtgcgccttgctcgctcgctcgccgtctgccgtcgttctaggtttagagccaggtcaccagcgctaggagggcgcgaagtcgagtagacggccgggcctctcccgttctccacggacggctagcgctactggaggcgacgcctggacggcgaccccgcacactcacagccacaccctccacctgtgtgactattcaagggcttaggccgagccgcccggccaatcgccgtccgccggaccgctgagagatataaaggatccagagcacccgtactcactggaacagctgaatgtggtgactgaagattcaattgaactcaatgatgaaagtaattatgtcagggttacattcaccccaacagtggagcactgcagtatggcaactattattggcctttgcatacgcgtgaaacttgtacggagtctccctcctcgttacaaggtggacataagggttgcccctggatcacatgcaactgaagctgctgtgaataagcaactgaacgacaaagaacgtgttgcggctgcattggagaacccaaacctactggacatggtcgaagagtgcttatcaccaacatttgattgaggcctgaatatcaatatatcggtgtgacatggtgttgatgttcaggagccacacatgctcattgccaatggagttcactcctgtctttcgagaaccaaaatgccttgggtgttaagtgacgtgttgcatgatttttttcctccgccccgttcagttattatatatgctactatggcgctaccctttttggacgtttttggtgcttgtgacctcactgatcaatgcgagatgtaatcagctcttgtgctgtagctttcagagtgctgtcgctgtcactgtcagtgccacgccattttgtggctgtgtacccccacacgatcaacttggtaggagaatcctagaatcctctagcacgggttgtttctgttaccataccggaagtgttttattctgagtttctagcatgtttttttatcgtataacaggcccttagtttgcataagaaaatcgttatttctattaaagtttggcttcttggctcaactgatcatgct

SEQ ID NO: 101144 - DNA, 1426 bp, Zea Mays
accagaaagacacggccgagtcgtctttcccgacgcaaaagtcgacgacgcgtgcgccttgctcgctcgctcgccgtctgccgtcgttctaggtttagagccaggtcaccagcgctaggagggcgcgaagtcgagtagacggccgggcctctcccgttctccacggacggctagcgctactggaggcgacgcctggacggcgaccccgcacactcacagccacaccctccacctgtgtgactattcaagggcttaggccgagccgcccggccaatcgccgtccgccggaccgctgaggaatttttctttctcgtcaaaagttactgcattcattttacagtaatggctatggggttgattaatgctaatcctataatccatgagaaaaaagagaggcgtgccagacaggcaccagagaccacagatgaaaatgcagcagagcccatagatcagctggaaatatttgatatccttcttaatgatttcttcaaatgtagtgaagattgctgttctatttatctgagttctctatcctagccatttaattgtggtccttattgttcttacatcacattagagatataaaggatccagagcacccgtactcactggaacagctgaatgtggtgactgaagattcaattgaactcaatgatgaaagtaattatgtcagattcatatttgctttgcatcagggttacattcaccccaacagtggagcactgcagtatggcaactattattggcctttgcatacgcgtgaaacttgtacggagtctccctcctcgttacaaggtggacataagggttgcccctggatcacatgcaactgaagctgctgtgaataagcaactgaacgacaaagaacgtgttgcggctgcattggagaacccaaacctactggacatggtcgaagagtgcttatcaccaacatttgattgaggcctgaatatcaatatatcggtgtgacatggtgttgatgttcaggagccacacatgctcattgccaatggagttcactcctgtctttcgagaaccaaaatgccttgggtgttaagtgacgtgttgcatgatttttttcctccgccccgttcagttattatatatgctactatggcgctaccctttttggacgtttttggtgcttgtgacctcactgatcaatgcgagatgtaatcagctcttgtgctgtagctttcagagtgctgtcgctgtcactgtcagtgccacgccattttgtggctgtgtacccccacacgatcaacttggtaggagaatcctagaatcctctagcacgggttgtttctgttaccataccggaagtgttttattctgagtttctagcatgtttttttatcgtataacaggcccttagtttgcataagaaaatcgttatttctattaaagtttggcttcttggctcaac

SEQ ID NO: 101145 - DNA, 979 bp, Zea Mays
atggatcgatttcctcggtcgcgatccgggtcgcagctcgccaccaagcaatgtatgcgaggaggcccaacactgcctgaatttttctttctcgtcaaaagttactgcattcattttacagtaatggctatggggttgattaatgctaatcctataatccatgagaaaaaagagaggcgtgccagacaggcaccagagaccacagatgaaaatgcagcagagcccatagatcagctggaaatatttgatataaaggatccagagcacccgtactcactggaacagctgaatgtggtgactgaagattcaattgaactcaatgatgaaagtaattatgtcagggttacattcaccccaacagtggagcactgcagtatggcaactattattggcctttgcatacgcgtgaaacttgtacggagtctccctcctcgttacaaggtggacataagggttgcccctggatcacatgcaactgaagctgctgtgaataagcaactgaacgacaaagaacgtgttgcggctgcattggagaacccaaacctactggacatggtcgaagagtgcttatcaccaacatttgattgaggcctgaatatcaatatatcggtgtgacatggtgttgatgttcaggagccacacatgctcattgccaatggagttcactcctgtctttcgagaaccaaaatgccttgggtgttaagtgacgtgttgcatgatttttttcctccgccccgttcagttattatatatgctactatggcgctaccctttttggacgtttttggtgcttgtgacctcactgatcaatgcgagatgtaatcagctcttgtgctgtagctttcagagtgctgtcgctgtcactgtcagtgccacgccattttgtggctgtgtacccccacacgatcaacttggtaggagaatcctagaatcctctagcacgggttgtttctgttaccataccggaagtgttttattc

SEQ ID NO: 101146 - DNA, 791 bp, Zea Mays
accagaaagacacggccgagtcgtctttcccgacgcaaaagtcgacgacgcgtgcgccttgctcgctcgctcgccgtctgccgtcgttctaggtttagagccaggtcaccagcgctaggagggcgcgaagtcgagtagacggccgggcctctcccgttctccacggacggctagcgctactggaggcgacgcctggacggcgaccccgcacactcacagccacaccctccacctgtgtgactattcaagggcttaggccgagccgcccggccaatcgccgtccgccggaccgctgaggaatttttctttctcgtcaaaagttactgcattcattttacagtaatggctatggggttgattaatgctaatcctataatccatgagaaaaaagagaggcgtgccagacaggcaccagagaccacagatgaaaatgcagcagagcccatagatcagctggaaatatttgatatccttcttaatgatttcttcaaatgtagtgaagattgctgttctatttatctgagttctctatcctagccatttaattgtggtccttattgttcttacatcacattagagatataaaggatccagagcacccgtactcactggaacagctgaatgtggtgactgaagattcaattgaactcaatgatgaaagtaattatgtcagggttacattcaccccaacagtggagcactgcagtatggcaactattattggcctttgcatacgcgtgaaacttgtacggagtctccctcctcgttacaaggggcgaagccaactttaa

SEQ ID NO: 101147 - DNA, 2303 bp, Zea Mays
ttttgaggagtttctctgctagtacaatccaattgactgtacattgatctctaatatttgttgccaatatctttcatagaaacattgaaaaattcctcaagtacagtgtcggttcattggacatgttccatgtgcacattcagtaatcatgaaagcatggtgtactgtgagatgtgtggtgttttccgtgagacctttgtcaaatctgccaaggatggtctgttaaaagatacagccgttgcagtgtcaagtgagcctaggacatctgctgcgtcaaaaaacgattctgccaaggcgccagtgaagactcgtgctgtaaattctgatggtgattctatgagaaagcatgctagcatgtcttatgataaagccaattccacgcagttaccatctgctggtagctcactaggtgctgaaaaaaagaagaaaacccctgtactttctgaagaagtacctgtggagaggatagctctgttggcttccgatggttttcagtcaaagggtaaccagaatagcggggctagcagttcttcgcagaatgacaatgtgatccagaaactctcttctgacgtaggccagctaaatgtaaacaagaacaatgtgaatgttacgaaatcttgtttgcctgatgagtataagcctgagaagtggatgttagctgatctggagtcaagggcgttgagccaactgaaccttgcaatagtcggtcatgttgattccggcaagtcgacactatctgggagattactgcatctcttaggaaggatatcaaaaaaatatatgcacaagaatgaaaaggagtcgaaagaaaaggggaaggggtcatttgcttttgcatgggccatggatgagagcagtgaagaaagggaacggggtgtgacaatgactgtggctgtggcttatttggagaccaagaaattccgtgtggttttgcttgactcacctggtcacaaagattttgtgccaaatatgatatctggtgcaacacaagctgatgcagctattcttgtcgttgatgcttcaactggttcttttgaagctggcatggatggcgaaggaggaaaaagtgttggccagactaaagagcatgctcagcttgttagaagctttggtgttgaacagcttgttgtcgcagtcaacaagatggatgctgttgattatgcaaaagaaaggtttgatttcatcaagctacaacttggtagtttcctgcggtcatgcaacttcaaggactcagctattacctggattcctcttagtgctgtagaaaaccaaaatttgatcaaagctccttcagatgctcgtttgacctcctgtcaacaggacaattggcagcttatggaaaattggaaactggagccatccaaattggttctaaggtgttagttctaccttctgggcaagaggcgactgtgaaagccattgagcgggactctaattcatgcaccgtagcgagagctggtgataatgtggcaatttgtttacagggtattgatggaaaacaactaatacctggcggggttctttgtcaccctggtttccctgtgcctgtagctaaccacttggagctgaaggttctagtcctggacatcactactcctattcttgttggctctcaggtggagtttcacatacatcatgtgaaggaggctgcaagagtaacaaaaattgttgcattacttgacaagactggcaaaccaagtaaatcggcacctcgatttcttaaatccaagcagaattctgttatacaggtcacactagatggagctgtctgtgttcaggaattctccaagagccgagctcttgggagggcatacttgaggtcggctgggcgcaccattgctgttggcgttgttaatcggataattggccaagatcagaactagaagacctactacactcttctgaaatctgaaccaaatccttgtcgttgccttgtcgttgctacggttatactctacgtagtagacactggcaacatgatgttgggaaattttgtttagcagctgcttatagccattccattgtattgagttatatgtgtaagatagtagtcacagctgagttgtgttctaacccccggcttttgcaaaaatgctatggaatccttcgaagttatatatgctgactacttgtgattcgtgaccgctgattcgttatcgttcattactatatgtagtggacccaagtaaaacgatgttggcaaattttgtttagcatttgcatatcttcattctcattgtacttagatgtgtgtaagatggtcacagactcagctgagttttgatttctaatccttgactttt

SEQ ID NO: 101148 - DNA, 1521 bp, Zea Mays
cgtcgcagaatggaggagccggaggcggcaagcagcagtacggcttccggccgactgagcccgtcgggttcggcggcgctagcaggggcgacgccgtcgttgacgtcccgctcgagaccatgggggactctcggagcaaggtgaaggagctctcgtcgtgggaatcagatctgaagcggcgagaggcggatatcaagaggagggaagaggcgctgaagaatgctggcgtgccaatggaggagaagaactggccaccattcttccccatcatccaccatgatattgccaatgagataccagcaaatgtgcagaagttgcagtatcttgcatttgcaagctggcttggaattgtgctttgtttgtcctggaacttcgttgctgtcatagtctgctggatcaaggagggagattcaaagttgtttttccttgcaacaatctatgctttgcttggaattcctctgtcatatttgatatggtacaggccactctaccgtgcaatgaggtatgctgtgaccatttttgaactctttactgtggataatttcgcgtcatatacgttttatatgtgcccatcctagagccttttcatcagtgcatattgcaaagcatgttctagtgtaaattaatatgtgcacatcatagagccttttgcatcagtgcatattgcaaagcaagttcttatgtaaatataatatatgcggacttgggaagtgtagttactgttttcttgtaccaattattggggcatggtattgtcctattatatttaggcataaaacattggtgtggctgcgaattctagtataagattgttaagggaacttgactatagtaatgatatactcatatacatttctggagccaagatgtttacatctataaggctttgctttgctgcatgctgctttgtatttgacactcattaacttgataaacaggactaacagtgctttcagttttggatggtttttcctgtgttacctgatccacattggtttttgcataattgctgccattgctccaccaattgtatttcatgggaaatcattaactggtattctggctgcgattgacactttctctgaacatgtgataattgggatcttttactttgtggggtttgcactgttttgtctggagacactgctgagcattggggttcttcagaaagtgtacatgtacttcagagggaacaagtgaagccagtcatgatggagagttacgtttgttgagaaaatttggagttacttgtggctacttgtagcacatgttcattcgatggttttgtgcatacctgtcagtacaccttgaatctataatttcttatgtcagttattggtgccgagaattgtttttttaaggtggtatgggagtataggtttgcttacggatgggtgctgtggttcttcactagctattcttgaaacgcagaagatcatgcgcccaagtcatgtttcagaattaatttactgtactcatacatgctatcgttcccctttggtgcggcgccgtagctgccga

SEQ ID NO: 101149 - DNA, 1085 bp, Zea Mays
cgtcgcagaatggaggagccggaggcggcaagcagcagtacggcttccggccgactgagcccgtcgggttcggcggcgctagcaggggcgacgccgtcgttgacgtcccgctcgagaccatgggggactctcggagcaaggtgaaggagctctcgtcgtgggaatcagatctgaagcggcgagaggcggatatcaagaggagggaagaggcgctgaagaatgctggcgtgccaatggaggagaagaactggccaccattcttccccatcatccaccatgatattgccaatgagataccagcaaatgtgcagaagttgcagtatcttgcatttgcaagctggcttggaattgtgctttgtttgtcctggaacttcgttgctgtcatagtctgctggatcaaggagggagattcaaagttgtttttccttgcaacaatctatgctttgcttggaattcctctgtcatatttgatatggtacaggccactctaccgtgcaatgaggactaacagtgctttcagttttggatggtttttcctgtgttacctgatccacattggtttttgcataattgctgccattgctccaccaattgtatttcatgggaaatcattaactggtattctggctgcgattgacactttctctgaacatgtgataattgggatcttttactttgtggggtttgcactgttttgtctggagacactgctgagcattggggttcttcagaaagtgtacatgtacttcagagggaacaagtgaagccagtcatgatggagagttacgtttgttgagaaaatttggagttacttgtggctacttgtagcacatgttcattcgatggttttgtgcatacctgtcagtacaccttgaatctataatttcttatgtcagttattggtgccgagaattgtttttttaaggtggtatgggagtataggtttgcttacggatgggtgctgtggttcttcactagctattcttgaaacgcagaagatcatgcgcccaagtcatgtttcagaattaatttactgtactcatacatgctatcgttcccctttggtgcggcgccgtagctgccga

SEQ ID NO: 101150 - DNA, 616 bp, Zea Mays
ccgacccaaataggtaaacaaggacatggataacaaaagctagtcaatccttaggtataaatgtgtaatgcgggaggtgaattaaagaatgaataggacagagataggtcaaaggacacttgcctccaccaaccgactgctgctcaggggcttctcctgcgaattcctcgggctcttcgaccggatcgttctctatgcgagcgcaaacatacatacatacatccacatatttaatacaaaagaacagtacaccatacaagataacaaataaagtgaatatgcaccaagtatgacattcgataacgcatttgttatggttagaaagaaacgggaaaggtctcgcagggggttaaatcttatgcactaatgacacaattggtttttaacaaaataattctgttatatatatttatatatactaatggaaacctaatcacttttagttgatcaacattgcacagggtaaacaattaactacgtgaatcaataacataacggaattttaaattaaacttcctattttcccatagcatgaacagtgattagcctacttaaaatacagtaattatgatcacagaaagtaaataaaataaaataaaaaaaataaaaaaaaaca

SEQ ID NO: 101151 - DNA, 381 bp, Zea Mays
atgggctccgatgactgggccgtgacgcggcggccacgcggaagcggactctcctgcttctgctcctcattcaccggcttaaccgccgtttgcagcacggagaccggctgcagaaccttaacgtactcctcgatcccttcgaccttggggagcgcgcggagggcgtcggccatggcggcactggtcatgttggcgcggatgccgttgcgcttgcacagcgcctgcagatcgcggcggggaagcgtgaggaagtccatgctctcttcttgctgcgggcggcggcgattgtcctcctgtcctgtcagtttctcacctcggtctcacttcctctccgtttggccgcctcctctcgtgcgagctggttccgctcggctcagctga

SEQ ID NO: 101152 - DNA, 784 bp, Zea Mays
gactactatcatcatttcaacctctctccctcggcctcgccggcggcacagcgcagcgcttccactgttgggtgtggtggatttcctccgcccccgaacgatcgatcttttgcatggcagcagcggctagctccaaggggcgggcgatcgctgggagcttcgtcagccgcgtcctggccggcaaggccgcctccccgaggagggccgtgcacgcctcgtcgtacgacaagaacccggaggagcaggtgcgcccggcgttcgtgccggacgatgtgatcggcggcgcggggagccccgacaagtactggagcccccaccccaagaccggcgtgttcggcccggcggcggtggacaccaaccagctgggcgtcgccgctgacgctgccgccgcgaatgcggctgcagcaggaggcacggtgctggaccagaaggtgtggttccgcccgctcgaggacgtcgagaagccgccccccgtcgcctgaaccgcgccacgcccacgcgacgcgacgctgccagcccacactgctgatacaagggcggcggccgggagggagagtcctggcaacgtcatgctcgtgcctgtaataagaacaagcaggagatgtgtgtgcctgtgatgtaccggtgtcgttatcagcgttatacaagtacttgcggttcatatgatcgataaccactagaactagcttcctttattccgtgaccgcgactcaaatcaatccctatagcacaccactcaggcgcccacatgagtgtgcagtacgttcaaacaactactactatc

SEQ ID NO: 101153 - DNA, 141 bp, Zea Mays
atggagctggcgggtgccgcggcgcgtgacagcaagaggggccgcatcgtcccgcgctacctcctcctggccatccgcaaggacgaggagctcggcaatctgcttgtcgaggtcaccatcacgcacgatggtcaattgtag

SEQ ID NO: 101154 - DNA, 111 bp, Zea Mays
ccccgctccaacagtaaagctcgaaatctagattatatggcaaacccactacggtgtagtatatttgagacacttgagatggtgcttgtaacacccctgttgttaatggaa

SEQ ID NO: 101155 - DNA, 1922 bp, Zea Mays
ggatctgctgcgataaatatatttaatctaatttatttgtcaatgtgcagatttattttggtaatttagttcatatttggatggaaaaaggaaaagaagattgtccaaaaagtatctctttattatgcgtaaatgaaaatgattatgttaacactcattgttgtaataccttctaattatctaatacatattatgtgttttgtaaaatgacagatttgaagagttatttcggtcaaggttctagtggaagtggaccaaacactcgtgctagtggagtttgcaatgaacccgaaatacaagttcaagttcaagagaataatagtgaagaaattccaattgttcaagaagagaatgcacatattccagatgccaatggtgaagatgttgatggtataaatcatttaaacctggatcacattatttctaatctgggacttcatattccaattaattcctttgctcctaatattagagatgaagttagaagggctttcatagctaaaggtccgactcaacaattggtcataattttcttgtcacatgataaaaggagctttcaaaaacattggtttagacaacatagttgtttggaatatagtgtggagtagaataaggcttattgcttctattgttacctttttaagcatgatcgaatggatgataaattttgacaagatgcatttacaaaagttagcttctcacagtggagaaatgtttatacggtattttcaaaacatgtcggtgggcctaatagcatacacaatgttgcagcaacaacatttcatgatttttgtaaccaaaggtccagtgttagtcataaggtttcaaattatagcaaagatgcattggtcaaatatgagacacggttggaaacattcttaagtattgtctgtcttcttacattgcaaactatcatttcggggacatgatgagactagtacttccttgaacaaagggaatttcttagaatttcttgattggtacaaaaaaggaatgaagaggtgagaagagctttagatgagttgtgtcccaaaaatgccaagatgacttcggggacgattcaaaaagaacttgcaaactgttgtgcagaagaagtcacacatgcaattaaagaagaaatggaggattgatattccatgttcttgttgatgaatctcgtgatatatcaattaaagaacaaaataagaaaacttgatggtgtgctacattaaaagaggaatttttaaaagactcgatcttcagaaaattaagaaggcatttcaaaataaggaaactagacaaatacaattgcctaggttttctagaactcgactcaactagagattttattcgatatatgacatttggttgtaaatggattatgatcacgatgacttttaaataagcctttcctggatgacgcaattggacaggaagtagatgatcatggtgaggatgcccacgtccttggcctccgacgccatctctccttcaactccgcatagtcgccagatgcggttgcctgcgtcgtcgatggccagttctttgtactccctcgagaggttgcaccaaggcttcgtttgcgagcatgccgcacggacggacaacgacaagcgcgcgggcggcaatggcggaggaggactcaacaacccaggtctacgtccccgtccctgccccgacgctgtttcgtggggtcggctcactctgcgacgacgtgccgctcgcggagtaggatgcctaccacgcgccgcgcattggcgctgccaccactccagccacctgggctgagtacgacgacatagtcttcaccgcggacgcaggctgccgtatgttggttgtgatcgtgaaaaaagatatatgcggacctaatcaaacatacttcactaactccattaaatcttttgaagctgtagctgtccatgttgaataattagacaaattcc

SEQ ID NO: 101156 - DNA, 1300 bp, Zea Mays
actaaaaaaaagcctatcgtcttgccgatttgctcccactcggccgctggaacgcacctgcgccctacgcctccatccgccctccatcgcctccaccgcaggccatagagcccgtcgtccgccgcacctagcgccttcggctccggtcacaggccccgccggaccgcccgcaggctgcagcgccgcgccgccggccgccgcagcagtcccgcgcggtcgcgcagttctggtcgtctggtctggcctgatgcccgtagcgctgcgtgcccgcctgagaccctgagtaggactgtaggagactaggaggtagtagcaagcagcagcgtgctccgcggctccgcactccgctggtctgcttgagatttgaagagttatttcggtcaaggttctagtggaagtggaccaaacactcgtgctagtggagtttgcaatgaacccgaaatacaagttcaagttcaagagaataatagtgaagaaattccaattgttcaagaagagaatgcacatattccagatgccaatggtgaagatgttgatgattttattcgatatatgacatttggttgtaaatggattatgatcacgatgacttttaaataagaagcgagatcatgcattttttatggctgcaatcgagttctgcctctttactgtggcatgcttatgcatgcactcgttcatgcacacatacatgcatttcaaatctcaagtcgaggttgagacgagtaccaagtatgacatggagtacctcctggcttggcagcctttcctggatgacgcaattggacaggaagtagatgatcatggtgaggatgcccacgtccttggcctccgacgccatctctccttcaactccgcatagtcgccagatgcggttgcctgcgtcgtcgatggccagttctttgtactccctcgagaggttgcaccaaggcttcgtttgcgagcatgccgcacggacggacaacgacaagcgcgcgggcggcaatggcggaggaggactcaacaacccaggtctacgtccccgtccctgccccgacgctgtttcgtggggtcggctcactctgcgacgacgtgccgctcgcggagtaggatgcctaccacgcgccgcgcattggcgctgccaccactccagccacctgggctgagtacgacgacatagtcttcaccgcggacgcaggctgccgtatgttggttgtgatcgtgaaaaaagatatatgcggacctaatcaaacatacttcactaactccattaaatcttttgaagctgtagctgtccatgttgaataattagacaaattcc

SEQ ID NO: 101157 - DNA, 2223 bp, Zea Mays
atagcggacgcccccccccccccaagttcccacgagatcccgactcggacgaagctctcctcgccggccaccgtcgcggcagcttgctacgcacagggagtctgcggcgcgcgaggaatacagcgagggatggggtggggcacagtggtttacgagggcgcggtcgtcggctcgtcgctggtggggctcggctgggcggggctgtggttcctgaaccggcggctgtacaaggagtacgaggagcggcgggtgctggtgcagatcctcttcggcctcgtctttgccttctcctgcaacctcttcgagctcgttctcttcgagatcctgcccgtcctctccaagcacgcgcgcttcctcaactggcacctcgacctcttctgcctcatcctcctcctcgtcttcgtactcccctactaccactgctatcttctgctccgtaactcagggatgaggagggaccgggcgtggctcgtcgcggcgctctttctgctggtcttcctatacgggttctggcgcatggggattcacttccccatgccttcaccggagaagggtttctttacgatgccgcagttggtcagtaggattggggtgattggagttagtgtcatggctgttctttctggttttggtgccgtcaatctgccatacagttatctgtcgctattcatcagggaaattgatgaaacagacatcaaaaccttggaacgccagttgatgcaatccatcgagacatgtactgctaagaagaagaaaattattttgtcccagatggagatggagaggattcaaggatcagaggagaagttaaaggccagatcgtttctgaagcgtatagtgggaacagttgttagatctgtgcaggaagatcaaactgagcaggatataaaaaacttagaagcagaagtccaggcactggaagagctttccaaacagctgtttcttgagatatatgaacttcgtcaagctaagatagctgctgcgtattctcgaacttggagaggtcatcttcagaatctacttggatatgctttatcagtctattgtgtttataagatgctcaagtccttgcagagtgtagtctttaaggagtcaggctctgttgatcctgtaacaatgtcaataacgattttcctgagacattttgacattggcattgatgttgcactgttatctcagtacatatctttgatgttcatcgggatgttggttgtcatatctgttcgaggtttcctggcaaatgttatgaagttcttcttcgctgtttctagagttgggagtgggtcgacaaccaatgttgtccttttcctatcagagatcatgggaatgtacttcatatcttccattcttcttataagaaaaagcctggcaaatgaatatagggtgatcattactgatgtcttgggtggtgatatccaatttgacttctaccatcgctggtttgatgctatatttgtggctagtgcgttcctctccttgcttcttatatctgcccaatacaccaccaggcaaacagacaagcatccgattgattgatgcatcttgcccacaatgtgtgcatgttgtctttttaaccagtattcatccaaggttgacccattctttgtaccacagttttccagagcactgtttctccatacacttccatacacagttacaaaacataatacgtcagttaacttgaacaaagtctctattttgtaatatgtttcccgattgcattggtttatggtaaacagttcctccaacagcggctatctgagtcacgtctggtgatgcagtgacgggacacgggattcattgtaatgcagtctgcacgatactactttttgactaggacaattgtggaagcccatattaggaattgattatgactttgtaaaatagcttgaaactagtgtcgtagcaccgtagcacggtatgttggtgtatcttatatatttttttggctgtttcatgtataacacacttcgcgacaactctgaatggtagatagatctgtttcttcatgtgacttcaggatgacaactatatacctgaatccttataggtacgtactttgcaatccgtaagcatatgctcttatattgatgatgtttctttggtgacccatcccatgcatattactccctcggagttccaaaatatagttctttctagctcttttttttcgtccacattcattcgaatgataataaatatagacatacatataaactacaa

SEQ ID NO: 101158 - DNA, 1433 bp, Zea Mays
atagcggacgcccccccccccccaagttcccacgagatcccgactcggacgaagctctcctcgccggccaccgtcgcggcagcttgctacgcacagggagtctgcggcgcgcgaggaatacagcgagggatggggtggggcacagtggtttacgagggcgcggtcgtcggctcgtcgctggtggggctcggctgggcggggctgtggttcctgaaccggcggctgtacaaggagtacgaggagcggcgggtgctggtgcagatcctcttcggcctcgtctttgccttctcctgcaacctcttcgagctcgttctcttcgagatcctgcccgtcctctccaagcacgcgcgcttcctcaactggcacctcgacctcttctgcctcatcctcctcctcgtcttcgtactcccctactaccactgctatcttctgctccgtaactcagggatgaggagggaccgggcgtggctcgtcgcggcgctctttctgctggtcttcctatacgggttctggcgcatggggattcacttccccatgccttcaccggagaagggtttctttacgatgccgcagttggtcagtaggattggggtgattggagttagtgtcatggctgttctttctggttttggtgccgtcaatctgccatacagttatctgtcgctattcatcagggaaattgatgaaacagacatcaaaaccttggaacgccagttgatgcaatccatcgagacatgtactgctaagaagaagaaaattattttgtcccagatggagatggagaggattcaaggatcagaggagaagttaaaggccagatcgtttctgaagcgtatagtgggaacagttgttagatctgtgcaggaagatcaaactgagcaggatataaaaaacttagaagcagaagtccaggcactggaagagctttccaaacagctgtttcttgagatatatgaacttcgtcaagctaagatagctgctgcgtattctcgaacttggagaggtcatcttcagaatctacttggatatgctttatcagtctattgtgtttataagatgctcaagtccttgcagagtgtagtctttaaggagtcaggctctgttgatcctgtaacaatgtcaataacgattttcctgagacattttgacattggcattgatgttgcactgttatctcagtacatatctttgatgttcatcgggatgttggttgtcatatctgttcgaggtttcctggcaaatgttatgaagttcttcttcgctgtttctagagttgggagtgggtcgacaaccaatgttgtccttttcctatcagagatcatgggaatgtacttcatatcttccattcttcttataagaaaaagcctggcaaatgaatataggtattccataactgaacctgctgcattagtgtaacttgattttctctatgt

SEQ ID NO: 101159 - DNA, 957 bp, Zea Mays
atagcggacgcccccccccccccaagttcccacgagatcccgactcggacgaagctctcctcgccggccaccgtcgcggcagcttgctacgcacagggagtctgcggcgcgcgaggaatacagcgagggatggggtggggcacagtggtttacgagggcgcggtcgtcggctcgtcgctggtggggctcggctgggcggggctgtggttcctgaaccggcggctgtacaaggagtacgaggagcggcgggtgctggtgcagatcctcttcggcctcgtctttgccttctcctgcaacctcttcgagctcgttctcttcgagatcctgcccgtcctctccaagcacgcgcgcttcctcaactggcacctcgacctcttctgcctcatcctcctcctcgtcttcgtactcccctactaccactgctatcttctgctccgtaactcagggatgaggagggaccgggcgtggctcgtcgcggcgctctttctgctggtcttcctatacgggttctggcgcatggggattcacttccccatgccttcaccggagaagggtttctttacgatgccgcagttggtcagtaggattggggtgattggagttagtgtcatggctgttctttctggttttggtgccgtcaatctgccatacagttatctgtcgctattcatcagggaaattgatgaaacagacatcaaaaccttggaacgccagttgatgcaatccatcgagacatgtactgctaagaagaagaaaattattttgtcccagatggagatggagaggattcaaggatcagaggaggcacttactttactagccctgctttatgtttcatagaaaataatcctatattcacattggtttaacatgggaatatactctaggtgaaaaatggtaaaacttaaaatattttaatacatgatattgccatgtttttttatgtggtcatgtatt

SEQ ID NO: 101160 - DNA, 1772 bp, Zea Mays
catttgttaatcaatctcgtcctggattcggtcacgaaaagctaggagtagcggcttttttttaatccggagcgtgaggttggctctcggatgtagattagcatcgtgttccaatgtagtttcttattggtttgaatgtgattagataagttgctaggcttgggcccgaccaaaagcggtggttagtttaatgatgatgatctcccctttccttggggattattcctgtctggttgttggggggcctaaccacgcttccactgcttgctgctgcggtttagccatctcccatctgctgcactgcacttcacctaaataatggaccccgagatgccgttccaaccatttcccttccactgctgctgctgctttattgcgagtaagtaaaccgtaaaaaaatgactcggtactcggtagatctacctgttgtgaagattggacgcgtttcgtatttgatcctttggtcttattggagcaaaagatggggacgcggtcggttctttcgtctgattggaaaagcgcccattccggtatcgcttgctccccggcctccagatacgcaccgacaccaagcgtgttcgtacgcacgtacacgtgtatcttgccagccgtagccattgactctcactctctcactggggttcactcctcttgcgtgtgtgtggtttccttgcagttgggtacgggccctacttcggcaagaaggtggacccggagcccgggcggtgccggcgtacggacggcaagaagtggcggtgctccaaggaggccgccccggactccaagtactgcgagcgccacatgcaccgcggccgcaaccgttcaagaaagcctgtggaagcgcagctcgcgcccccgccgcacgcccagccgcagcagcagcagcaggcccccgcgcccgctgctggcttccagaaccactcgctgtacccgtcgatcctcaccggcaacggcggcggcggggtaggtgctggtgctggtggtggcacgttcggcctggggcccacctctcagctgcacatggacagtgccgctgcctacgcgactgctgccggtggagggagcaaatatctcaggtactctgcatacggggtgaaatctctgtcggacgagcacagcacgctcttgtcgggcggcatggatccgtcgatgatggacaactcgtggcgcctgctgccatcccaaaccaacacattccaagccacaagctaccctgtgttcggcacgctgagtgggctagacgagagcaccatcgcgtcgctgccgaagacccagagggagcccctctctttcttcggcagcgacttcgtaaccgccgccaagcaggagaaccagacgctgcgccctttcttcgacgagtggcccaagtcgagggactcgtggccggagctgggcgaggacagcagcctcggcttctcggccacccagctctccatctccattcccatggcgacctccgacttctccaacaccagctccagatcgccgggtggaataccgtcgagatgaacgagtaccgtgcatgtggatcccagcgtcttagggttgacgactcttcggtgctggcctcgtcgtatcatgctcctaaattttcgaacgatatatgccttatgtaacgctatttctctcattgttacaacaccctttacccgtttggaattgtgttgaagtggatggtctgcgttgctcggttgttcattcgaccttttttcaatttggaaactccgtttctttgtactcagtgatctgtgcaagtgcaatgattcggtcca

SEQ ID NO: 101161 - DNA, 1592 bp, Zea Mays
ccaccgcgcagccctgcacggccgcggtcgcctataaggctagcccagccagtggtagcacgcacagcacagcagccgccctgctcggcgtaggagcagcccagagcgagcgagacagagggaaagagacacggccagccaggtaaggcaaaagagagagggcggaagcagcggcagagcggagagggagagagaagagcatatatgggcatggcgatgccctttgcctccccgtctccggcagccgaccaccgcccctcctccctcctccccttctgccgcgccgcccctctctccgcggcgggggaggacgccgcgcagcagcacgcgatgagcggcaggtgggccgcgaggccggcgctcttcaccgcggcgcagtacgaggagctggagcaccaggcgctcatatacaagtacctcgtcgccggcgtgcccgtcccgccggacctcctcctccccctgcgccgaggcttcgtcttccaccagccacccgcccttgggtacgggccctacttcggcaagaaggtggacccggagcccgggcggtgccggcgtacggacggcaagaagtggcggtgctccaaggaggccgccccggactccaagtactgcgagcgccacatgcaccgcggccgcaaccgttcaagaaagcctgtggaagcgcagctcgcgcccccgccgcacgcccagccgcagcagcagcagcaggcccccgcgcccgctgctggcttccagaaccactcgctgtacccgtcgatcctcaccggcaacggcggcggcggggtaggtgctggtgctggtggtggcacgttcggcctggggcccacctctcagctgcacatggacagtgccgctgcctacgcgactgctgccggtggagggagcaaatatctcaggtactctgcatacggggtgaaatctctgtcggacgagcacagcacgctcttgtcgggcggcatggatccgtcgatgatggacaactcgtggcgcctgctgccatcccaaaccaacacattccaagccacaagctaccctgtgttcggcacgctgagtgggctagacgagagcaccatcgcgtcgctgccgaagacccagagggagcccctctctttcttcggcagcgacttcgtaaccgccgccaagcaggagaaccagacgctgcgccctttcttcgacgagtggcccaagtcgagggactcgtggccggagctgggcgaggacagcagcctcggcttctcggccacccagctctccatctccattcccatggcgacctccgacttctccaacaccagctccagatcgccgggtggaataccgtcgagatgaacgagtaccgtgcatgtggatcccagcgtcttagggttgacgactcttcggtgctggcctcgtcgtatcatgctcctaaattttcgaacgatatatgccttatgtaacgctatttctctcattgttacaacaccctttacccgtttggaattgtgttgaagtggatggtctgcgttgctcggttgttcattcgaccttttttcaatttggaaactccgtttctttgtactcagtgatctgtgcaagtgcaatgattcggtcca

SEQ ID NO: 101162 - DNA, 980 bp, Zea Mays
gccattagccagtcggcagccttctgattctgttctgcccttccctgcaagcaagcgaagcgacttcttcgtcagacacttgaaaaagctattccgccacattgataatgccaccggccgaccaccctcccttctccaactcgtcgtgtagttggctagttgccatcaatccagatctcgagggagccaacgatgtcctcgtccaagaagtctagcttcttcggccgcgcgtgggacagagcacgcggcaagtctgacgtcgagaggatctgcaaggaagtcttcgaggacatggcagacaagaacacggggctcctggacatcaactccctccacgtcgccaccctcatggtttacaattcaattaacaggcagttaatcggccctcacaaggaccctccctgcatgaacaccatcgccgagaaaatggaggagtaccgcgccaagaaagggatactgttcacggagttccaggagatgatcctcatgtgggtgcacaaggacctgcggctggtgctcgccaacaaggccgccgtcgcgatcctgggcgcgccgctgctcgccgtcacggccaagaacgccgccaggcaggtgccgaggataagcgacgccgtggagcaggtgcccactccgctgctcgccgccgtcttctccgtcgggctcatgctcctgcaggacgtccggctgggcaagcagagggggtgaatccattaccggaatcacctcaaggcgcacgcctggaggtttcgctttcactgcctcgccgcagtctcacggatgtcaggaactcaggagtcaggatatggtcccagcctccctagtgcacatgagcttttgatgtgtgtaagttcacaaaaaaatctgaaaaaaattatatatattattaccacgctactctgattatatatacaattctaaatttaaaatcgttatacttttgatgtaacaaaaaatatatgtgggttaaagtaactcttgat

SEQ ID NO: 101163 - DNA, 1869 bp, Zea Mays
cggcagcagaaggccactgcccggacggagcttccgaaagggaaccgggcagcggcaatggagggacagccgctccatctcctcatcgcccagttccaccacccttgcctacgcggtctcatccccaactaccctacccactacctgcccacctcccgcctccgactccgcgtacagcgtcgcaagccgaagcagctcgccgcagtgccttcgaggcgtccatcgggcagccaagccgacgcgcctggcctggtgccggtgcctaacacggtggcggcgctggtgctccagctgaccgtgtgctcgctcctttttctcttccccaaccgtgcccgagccctcgcgctcccgccccctccgggggccgctgcggtggttgaggcgacgcaggaggaggaggaggaggaccaggagtgggaggctgcgctgcagaagtggaagaccaagacctacgcgctctcggtgcccctccgggtcgtggcgctccgcggctccttccctccatcttggattaaggatttcgtcgaagctcaggggaagagactcaaattcagtcctgagctccgtgctaatcttgatgggatcttctctgagatgtcacaatgtatggacaagggtcaagttcagccgaagtctgcaatggcagctgatgttgtttcccttggggactcttggctcggctatgccatccgcaagggattgctagagcctatcaagaatgctgaagaacaggattggtttcatagcctgagtgacagatggaaggtccatttgtgcaggaaccagaacggagaagcagatcctaatggtacaatatggggagttccatacagatggggcaccatggtcattgcttacaagaaagacaagttcaaaagacataatttgaagccaatacaggattgggaggatttgtggaggcccgagcttgccgggaggatttcaatggtcgattctcctagagaggtgattggtgctgttctgaagcatctgggctcatcatataacacagttgatatggaaatggacgtcaatggtggtagagcagcagtcctaaacagctttacgcaactacagaagcaggtccaactattcgacagcatgaactatctgaagtcgtttagtgttggagatgtatgggtcgcagtgggttggagcagcgacgtgatccctgctgcaaagcgaatgtctaatgtcgcggtggttgttcccaagtcaggcagcagcctatgggctgatctatgggcaataccatgcgcgacgagatttcagactgaccaaatcgggagccgagccagaggcccgtctccactggttcaccagtggttcgacttctgcctgcagagcgcaaggagcctacccttccgccaagacgtcatccccggagcatctccgctccacctcgagagccctgtgccagaggtccctcaagacaagaacaagaggaagccgaagctggacacgaaccttgtcaggggagtgcctccgcccgagatcctggagaggtgcgagtttctggaacccctgtcaggtaaggcgctggaggactaccagtggctgatgtctcgggtgcagagacctcgtcttggtttgtttgggaacatgttgcagaagatgtcagctgtacttgacttcaaaagaagatcttagagccactgtactgtgattgaccaagttttttttttctttttacttcgtggtgcaactcttaacaacgtcctctatattcatcctctatatatgtcctttacagtttcctctaaaagatttcatcctctatatctcatttctctccaacaacgtcctctaaatcacgtcctctatactcaaataatcatattaaagacattttttaattttattttttgt

SEQ ID NO: 101164 - DNA, 1369 bp, Zea Mays
agctagtgtgaatgcggcaggccccgttctctgagaccgagctgtgtgaatgggcagaaaagtaatggcaggcagaggcaggcagaggcgagaagcaagaagaaaaacgaggggagcaaggaaatcgaggcaagaaagcaagggcagaggcgcagagcctgcaatctgctgtcccccgtcgccgccgctgcctcgccgttgcaatcgaggcaagaaagttagggagtgctggcgttgggcaagtcgctctgggcctctggggagacgggggctggaggggcggcgagatgatggaggccggcggcgcgggagcggggggaagggacgagagggtgccgcagtggggcgtgcaggagacacgggagctgatcgtggcgcgcagggagatggagcgggaggccgtcgcggcgcgccgcagcgccaagacgatgtgggaggccgtcgcggcgcggctccgggagcgaggctaccgacgaaccgccgagcagtgcaagtgcaagtggaagaacctcgtcaaccgctacaaggggaaagaaacttctgatccagaaaatggtaggcagtgtcccttctttgatgagctgcatgccgtcttcacagaccgtgcaagagatatgcaacgacaactccttgagtctgaatctggggcttctgtcaaaaggaaactgaagcaacctggtggtgaccggtcatctgggctgtctgatgacgagggcaatggtggtgaagaaagtgatgaggagaaaccgttgcccagcaggaagaggaaagctgacgacaagaaacagcaacatcaaagaatgtctgggaaatcaagagcaggattttcaagcatacatgaactgctgcaggatttccttgtgcaacaacagcacattgatgtctggtggcgggagatgatggagagacgcgcccaggagcggattgtttttgaacagcaatggcggcagacaatgcagaagctggagcaggagaggttgctgttggaacactcgtggatggaacgggaggagcaaagaaggatgagagaagaaacacgggcagagaaaagggatgcactcctgactgctctgttgaacaaactcctacaggaagatctatagccggataagcttgctcttcatttcgtcagggtatagttgcagtagtggacattgttttgtcaccttgttttagcaattctttgtagctgctacatatattaacatgtgtttgttcaaagaaaattgtttcttatagcatttgtattaggttcctaggcattcttttccagttatttggtggagtaaaagttaattttatgtttaattgtggttgtaagtatcatactgtcaggtaagtatacagatcaatgctaatacgctttagc

SEQ ID NO: 101165 - DNA, 2114 bp, Zea Mays
ctgtttctaggcttgccattgtttcctggagcaacagaatatgatgtgcttcagagaatggtgaaaattctcggaggccaaccaccagatgaactgctaagggaagctaaaaacactgtaaggttttttaaacatgttggaagtatatatgctggcaatgcggcacctattggtctttctagtgcatacagaattttaagtgaagaagaggttgaagcgagagattccaagaggcaaaagatgggaaagtggtacttcccacacctgaagcttgacagactcatatgtacctatccttggaacaattctgaactggcagagacagagaaaacagatcgtttgggattagttgatttcttgaagggactccttgaatttgatccaaataagcgatggtcaccattgcaggctctacaccatccattcataacaggagaatcgtttactggtccatatgagccaatacccgagactgcaagaattcctgttgctcgtgcagcagcaattgatcacaatcctggaggggggcactggctacattcaggtctttccccgcaggttggaagtgtaaacagatacctacctttgaataatgtctaccctccaaaggttcctttttcttatgggagtagttatggaagctttggtagccatggcagctatactggtaatgctggttttggtaacagctatggaagcattggtgatgctaatgctatcaatatgtattactcacccttaggttcttctggattaacgcaaattggccctagtccagatgttagactaaggatgcgtctctcacatgatagaggaattcgattgagccctggtagtcttgggcctatgtctgttggagccagtccatcacagtttaccccaccgaactaccatatgcaaatcccagctaattctactgggacacatggttctggttctcctgcaagtggagtcattcatggttctccgttaggaaaagctgcagcagtgggcccatacaacatgaggagaaacttgccaatgccaccacatgattatgtatctcagcatggacaagggcgttttagagatggtgtcagctttagtcattctgatgcctgtgctcaaggacatacaggccactctcataatgcagcggtacctagttcttatcattctggttggagaccaaaaataggttcaaggagtggtatttccttggaggcctcgtctagtcatgtgccttcgaaggctccgtcacaatcatttgacttttcagcttcatcgacacttgatcctgctaattgggaccctaattatagtgatgagtcactattgcaagaagacaattcactgtcagctgatctaagcagcaacctccactttggagatgcaactggccaagaccacatctttgctacatctaaccctgtaccgacaaaccaaagaggagatcaattatttcatgtgtcctctcaaggagtgagtgcccattccagtgttctcatcaactacggtggttacaaccctcaaaattatcctcagcaaaatgcccgtcctcgtcatggacagccaattctccatcagcgatataatcaggcaacttccagtccaatgcggccaatgggaagccatcacaatgggcagcctgcgtggcctagtagttttggcatgggcgatggagtgccctggggaggaacaagagggcactcatttacgacaaggaaggattatgggagcatcttttagggtggagttgtggaccggaggaacgtcattgattcattgcaggcgtaaattatttgtatcagcgaaattggagtgcgatgattctggttgattgttttcgatgttgttactccatccctccacttggtcctttgtgaacacactggatatatacactatatgatcggtgacattagcactcctttgtaaccttttttaggaatcagaagtttgggtgttcccctaattgctgactgcattgtggctgtactgaatactgtaccattgtcaccggtgtaatatgaaggcgtgatgtaggtagactaaagggctctttgattcgtggctaaatgtgtcatactttatctaaggttagttgttcgaattaaagaactaaccttagtcag

SEQ ID NO: 101166 - DNA, 699 bp, Zea Mays
tttgttgcaagattaacagcaggcatcattcagacatatctagaatgtgatcctgagtttaagtactcagaggttctaaatccaaaacgcttcctcaccaatccctctaccccagcccacaatgatgggcttgacaatgcaaattgggacctcatattgtacgtcaacttggagttggttaataagatgtcaaacagaaggtttattgtcaaggaaatgcttgggcagggaacttttggtcaagtagtcaagtgctgggacacagaaactaatgactatgttgctgtgaaggtgataaaaaaccagcctgcattttaccatcaagctatcatggaggtttcactattaagaacgttaaatcagaaatttgatcctgatgatcagcataacattgtccgtatgcttgattatttgtcatttcaaaatcatttgtgcatagcttttgagatgcttggtcaaaacctgtatgaactgctcaaaaggaatcacttaagaggtctgaaattgaaatatgttcaagccttctcaaaacagatattggatgccatggttgtgatgagagaagctggaataattcattgtgatctgaagccagaaaatatcctgttagctcccagcgtcgcaacagctgcagcagtgaaagttattgattttggatcagcgtgcctggagggtaaaacagtttactcgtacattcag

SEQ ID NO: 101167 - DNA, 609 bp, Zea Mays
acacgggcagcagccccattggcggaggccgacggggacggctccagcgaagcagccgccgccgcaaaacggccgaacgccgtggcctcgctcggcctccacggcggcgccgcgtcctcccgccttccgccggtgccgccactcccctccatacccaaccagctacaccccagctcttcaatctcttactgaagaaagccttcgcctccgcctcaacctccaatcgcgacggtcacagcatccacgggggcagccgagaagcggccggaggaatccagctccatcctatgcggcggcagccattccaatgctccgtgatccaactcctctcctgtcaatcagaattggggcaaggatacgtccaagccggcggggggtatatcgactataggttggactggactggacgccggatttgggatcccttccctcgcaagactagggacttgggattgggtctggactctggaggaggaccgcggcgtggaagggagaatcaaaccacagtcgcagtccaatccaatcccctcggcgatttcttcgattttttccctccgcctcgcctctctctccgcctctattttcttccctcctttccttgcgggcaag

SEQ ID NO: 101168 - DNA, 1054 bp, Zea Mays
gcaggaaattctgagcagcagcagcagcagcaggcagcagccgtcgcggccaggccaataacgaaccaacgcacgcagccctgcctctgcgcgcgcgcgcgctgtctccacaaacagcagcaggcagcagccacacctgacctgacctggtcaccggagaggagagcgcgctcgatcatcaatcacttcatcagatcaggggcagagggcggcacgtcggcgggcgtcgagctaggctggccgccgcgaggatcccggcgcccgtgcgcgctgtcatggcgtggtggcggaagaaggtggtgtccccggcgcgccgcgcgtgggccgccgtctccacccgcgtccgcgcgcgcaacgcaggcagcagcggcagcatactgaagctccacgaggacgtgcagacctgtggatacagggacgtgcaggtgatgttcgacatcctcacctcggagctggaggcgtcaacacagcgccccgccgtcaagcaccaacaccagcagcagcagcgcaagcggcggccgccgccgccgccgtggcccagccaccgctcatcctccgtgatcgcggccgcgcagtagacgacgcggacgtggagcgggaagctgcgcgcgttaattaataagcaagcagtaaagactggcactggacgcacacgttttggtgccatgcatgcagggtgtagtcgtccgtccccctgccctgcccgtctctccggcgacggagccaacaagtccagcagcgtcaaggtagatcgagtgtcatgagctggctgctcatctgaatgtgcgcctgtacatactccatagcagcacctgtgctggattttttttttctcgatactcggagaaatagatggacggagcaagaggggcttgttttttgttttcaggtgtcttatgtctggttctggtgccgttctgtgcggttcataaggcctttaccaatctctgaaggcatttctttttctcaagtgagacgatgttagttagtagtaacatgcggatgctggttcctcggttgacttttatacatagacggagacggccaagcaaag

SEQ ID NO: 101169 - DNA, 130 bp, Zea Mays
gggaaggatcttaataaattctcaagggtttttggaaattctagaaatactatcctagatattcttatttctttattttattatttatgatatataatttttttctactaattttaggccttacacgaag

SEQ ID NO: 101170 - DNA, 564 bp, Zea Mays
atgggcttctggccgtacttcctccacgagtactcgtccggcgggatgtccgcgatcttggcgctgatcgccggcactctgatggtcctcttcacgcggtttttccttctcttggagcagtggcagcggctgccgttggtggtggcctcggagtgcgcgccggcgcagggcttccgcttgtggccggacagcggcggcttgccggaggacaccaggctgcggcccttggacacgctgccctcgccggccgtgaccgaggagaagaaggacgtggaggtgacggacgtggcgccgcccgacacggccaggttcggcttcgtgaagtccagggtcaggctctggggctgcgccgcgccgacgggagccaccacgtgcgccacggggagagcgggagcggagacggccggaggaggcaccggtggcggcgcctcgaccacgggcccgcgccggaagcgggcgtggccggtgcggtccaggatggagatgaccttgcggaacctggagacggcctggtcggcgatctcgccgatcggcggctgcgaaggcggcttctgcagctggtga

SEQ ID NO: 101171 - DNA, 3776 bp, Zea Mays
atggagtccttgtcgtcgggcggcgagctggcgcggcgccagagtagcggcggcggcagcagcggatggggtagcttcagtggcgacgccgacccgttcgatatccccgcgaagggtgcccctctcgagcggctcaggaagtggcggcaagcagcacttgtgctgaatgcatcaaggcgctttaggtacactcttgatttgaaaaaggaggaacaaaaggaggagatcaggagaaaaatccgtgcacaggcacatgttataagggccgcttttcgtttcaaagaggctggccgaatccatgtacagtccgaagaaacaaaagtaccatgtgctgatggtgcacttggcttcggaatcaaagaagaccagattacagcactgacaagggatcacaactactctggtctgcagcaatatggaggggtttctggtgtagcacatatgctaaaaaccgatacacagaaggggattagtggagatgactcagatttgctggcaaggaaaaatgcatttggatcaaacacatatcctcgtaagaaaggaagaagctttttggctttcgtatgggatgcttgtaaagacttgacgctaatcatcctcatggttgctgctgctgtttcactggccttgggcataacaacagagggcataaaagaaggctggtatgatggagcgagcattgcctttgctgttcttctagttgtatttgttacagctatcagtgactacaagcaatcactgcaattccaaaatcttaatgaagaaaaacagaacattcgtttggaggttgttagaggcggaaggcgaatcacggtatcaatatatgatttggttgtcggtgatgttgtccctctcaaaattggtgaccaggtccccacagatggtatccttatcagtggtcactccctttccatagatgaatcaagcatgactggagaaagtaaaattgtacacaaagatcagaaatcaccatttctaatgtcaggttgcaaagttgccgatggatatggaacaatgctggtaactgctgttggaattaacactgaatgggggttgctaatggcaagcatatctgaagattcgggtgaagagacaccacttcaggttcgtttgaatggtgtcgctacttttattggaatggttggactttctgttgcccttgcagttcttgttgtacttttggccaggtacttcactgggcatacttataatcctgatggatctgtgcaatatgtgaaagggaatatgggtgtaggccagacgattcgtggaatagttaaaatattcacagtggctgtcaccattgtggtcgtggctgttccagaaggacttccattagctgtcacacttacgcttgctttctcaatgcgcaaaatgatgaaagacaaggctctggtgaggaggctttctgcatgcgaaacgatgggttctgccacaacaatctgcagtgacaagactggcaccttgacgttaaatcagatgactgttgttgaggcatattttggtggaaagaagatggactcacctgataatgctcagatgttatctgctgatgtcacatcgctgattgttgaaggaattgcacagaacacttctggaagcatatttgagcccgagcagggtggtcaagaaccagaggtgactggatcacctacagaaaaggctatcctgtcttggggactaaagctgggtatgaaattcagtgaaacaagatcgaagtcatctattcttcatgtatttcctttcaactcagagaaaaagcgaggcggggttgcggtgtacctggctggctctgaggtccatatacactggaaaggagcagctgaaattattttggattcatgcacaagctgggttgacactggtggttcgaagcattcaatgactcctgaaaaagttgccgaattcaagaaattcattgaagatatggctgctgctagcctccgctgtgttgcgtttgcctatagaactcatgagatggatgatgttccagacgaagatcggagagaagagtggcaacttcctgaagataacctgattatgcttggaattgtgggaataaaggatccctgccgtccaggagttcgagattctgttcgtttatgtcaggcagctggcattaaggtgcgcatggttactggtgataatcttcaaactgcaagagccattgccctggagtgcgggatacttgatgatcccaatgtgtcagagcctgtcatcattgaagggaaaacattccgggcgctgtcagacttggaaagggaggatgctgctgaaaaaatctcagtgatggggaggtcttcaccaaatgataaacttttacttgttaaggcactgagggcaagaggtcacgttgttgctgttactggagatggcacaaatgatgccccagcactgcatgaggcagatattggtctatcaatggggattcagggaactgaagttgctaaggagagttctgatattattatcttggatgacaattttgcctcggtcgtgagggttgtcaggtggggccgatcggtgtatgcaaacatacaaaagtttatacagttccaactaacagtcaacgtcgcagctctgataatcaatgtagttgctgccgtcagttccggaaacgtgccattgaatgctgttcagttgttgtgggttaacctaattatggacactttgggtgcccttgcattggcgacagaaccacctacaaaccatcttatggagagacccccagtagggagaagggagccattggtaacaaatatcatgtggagaaacttgattatcatggctacgtttcaagtttcagtcctccttagtctcaacttcaaggggataagcctcctgcagttgaaaaatgatgatccagcacatgcagataaagtgaaaaataccttcatattcaacacatttgttctctgccaggtgttcaacgaattcaattcacgtaaaccagatgagctgaatatattcaagggcatttcagggaaccatctttttattggcatcatagtaataacagttatactccaggcgcttatcgttgagttcctcggcaagtttgcctcaacagttaggctaagttggcagctgtggttggtatcgataggtcttgctttcttcagctggccactggcattcgtgggaaagcttattcctattcctaaacgtccattaggagaattctttgcgtgctgctgtaactgtaaggggagcaaacaaggccctgatgacgcaacctctaatggtaaggaagacaacaagcttgagccatgagatatcgcaaggtttggtggctggcaacgatggccttctgctgtttcttgccagggtttgacgtgttggatttgtaattgcccctgattgcgattgtatatatatatacacacacgggttgctcctaggatctgttatacgggcaacatcaatttcataatcatagagattttcctcttagtcttcatttaccgagttcattgcgaatatgattaaacttgtcttgtctgaatctgaatctataacgagagttgggctatggtacccttctggagctgaccatgagtaggatgtcctgagatcttggacatcctgtgatgaaagtctgggaagattttagggccggttttaggttggcttcaaagcttgagctgacctcaattgtctattaaggagagtagcatttacgagtctagtgatgaatttatttggtctataaactggttagaagacaatctgtaatttgtagtctcctgacatccaatagaattcaggagtggtgt

SEQ ID NO: 101172 - DNA, 369 bp, Zea Mays
atgagcttgatcgtgaacctaattcatccttttgatgagctcattgatgtagttctcgcggttaccggcatcaccgccctccacatagtggttcctcttcttcttcaggcctcccagcggcgccttcaacttgaatggccacaggaagttgttggcctccttgaagtgtgggccaacagtcatgatctcgtgaacaagatcctcaatgcagatgatgttgtgcttgcccaagccctgctcgatgacttggttgttggacagagggatcctctgcttgttcagctttccatagcccctcttgtagatcaactccctgacactcttcaagtttgggtacccatatgcaacatatggctcaaccctgcgtag

SEQ ID NO: 101173 - DNA, 1351 bp, Zea Mays
gcctctatatacatacggccaaccgggcgccggccaccggccaccaccagaatcccagttccaccgtatctatcactatcagtcgacgccgacgctcctccatcctctgccagtaccaggtcgcctttttttttgcagttcttcctcgctctgctccaaggccggcgcagcgcaggagatcgaaggggaaggatgatggcggcgatgggcggcgcggtgcgggtgctgtgcggcgcggagaaggagcgggtggtgggcacgcgcaaggcgcccggggcgtgcccgcgctgcggcggggccgtggtggccgtcgacgtggagagcgagcgccgcttcctcggcctgccgctgtgcctccagagcaagcgcaagtactcctgcacccgctgcctccgccggctcgtcaccctctacagctgagagctcaagaacgagctacactacgctacacatgcacccctcgatctcttcttgccaagcgcccgccggcccgcccgtcgccgatgacaaaagctccggtggctacagctcgatcggcctcttggaacttcgacaagaattaataatctgcttcgatttttattgactaaggataactgtgtaggatcgtcgatttcacaataacgaccgtcaacgagccggagccgcgcgcgatggccagtgtacgtgttacgttcttcgttcctagtgattagctaagctaataatcaagtgcttttaactagagttgtactggtcgcctataaatggtggtaattagcaggcctctctgcctctcgtcgtatggcgaccggcaccggcagtcagcagaggcggcgaacatgcgcgcgcgatagagggaagagcccgctagctagctcgccgttatgctgcgtccatctatcaccatctttgcttggaagtactagtaaattactagtgtactgtagtaaagagagagtgcaacttctcctcaccggccggagcgacgacttccgcctgctgctcactgtggagtgtggaccgatccgggactcctcagttgagaacttgagatgactggcgcaatggccatggactctggcgatttagcctccatgcatgctcatagctgacacgatctatgggcccggccggttggtatagttggtaccaactcagataggtcgataccgactgtcatgtatcgtcttttgattggtagtacatgatattttgatatccaaaaaactaaaagaatatgtttatgaactatgtatccctttagttttagatattatattttttatgtttataaatatgtcgattttatttatggtttgtaaactatgtaatgtgtatttatatttatgaactaaataattttttactt

SEQ ID NO: 101174 - DNA, 2253 bp, Zea Mays
cctcctgccgattactgcggccgaaacagaagcacacaaagacattcgacgcggggacgacagagcgcacgcgcgaaccgccgccggaccacggcgacgagctcggatcccggcgatctagtcgccggaggtggtcccgatggctcggcggtcgtcttcctcgtcgtcgggggcctggcggtacctgaacccggcgtactacctcaagcggcccaagcgcctcgcgctcctcttcttcatcttcgtcgcggccaccttcgccttctgggaccgccagtcgctcgtcagcgagtacgagtctgagatttctcgattagaagatgatataaatcggttgcatgaccagctaagaagggctggagttcatctggatgaaaatccagtaataagcaacaagaattccagaaaaaatcctgtagaaattgatcatgtcaataatgaaaggcgggaaaaagttaaagaggcaatgctccatgcttggaattcttatgtgaagtacgcctggggaatggatgagcttcagccacaatcgaaggatggcatcaatagttttggtggtcttggagcaacccttgttgactcacttgatacactgtatataatgggcctgaaagatgaatttcagaaagctagagactgggtggcagagtcattagactttgacaaggattatgatgcgagtgtttttgaaacgaccataagggttgttggaggtttgcttagtgcatatgatctatctggtgataaagtatttcttgataaggctaaagatattacagatcgtctattacctgcttgggatacaacatctggcatcccctataatagaataaacctagctcatggacgagcccataatcctggatggaccaacggtgacagtatccttgcagattctggtacggagcaacttgaattcatagctctgtcacagaggactggggatcccaaataccagcagaaggcagagaacgtcatcacacagcttcagaagatatatcccagtgatggtttgcttcctatttacataaatcctcattctgggacagcatcgtactccactatcacgtttggtgctatgggagatagcttctatgaatatttgctcaaggtctggatccaggggaataaaactgagcatgtaaaacactacagacaaatgtgggagacatcaatggaaggtctattaagtttaacaaagaaaactacaccatctaattactactacatttgtgaaaagaatggtggctcattgtctgacaagatggatgaacttgcttgctttgcccctggtatgctggcattaggagcctctggttatgggccagaaaaatcagagcaaattatgaatatggcaaaagagcttgctaggacctgctataatttctaccaaaccactcccacgaagttggctggcgaaaattattttttccatgctggacaggacatgagtgtgggcacatcgtggaacatcttgagaccggagactgttgaatcacttatgtacctatggcgcttgacggggaatacaacataccaagattgggggtgggacatattccaggcatttgagaagaactcccgtgtagaatctggatatgtgggactgagagatgtgaacactggtgaaaaggataacatgatgcagagcttcttcctggcagagacgctcaagtacctctacctacttttctcccctccatcagtcatatcctttgacgagtgggttttcaatactgaagctcacccattgagaattgctccagtaaattataacaaaagcattggaacaccggtccgtccattcgggagaaaacagggaaagcctgagtaaccttggatatagagcagtggattttttttttaatccgacgtctgactctggcctccctgatgaagatgtgttctgacacgagggaactttctgcctgaagcagcaagggttagaaatcacggcaatagattgtttagagagaaaaatcataggtagatcatgatgctatatgcgaggcagtgacctccatgggtggtatggtcggagctcaagagcccccatagaagcttttatctttggacttgcttacgccccctgatgtgcgttgttgatgtgtagcatacatctaactcactgttcatatgttgttgctttcctgggacctctgcggagctgtattgtcattatttggcccatagttattactttttttcagatatgatttatatatatataagttgtttatggctttcgttaag

SEQ ID NO: 101175 - DNA, 1567 bp, Zea Mays
cctcctgccgattactgcggccgaaacagaagcacacaaagacattcgacgcggggacgacagagcgcacgcgcgaaccgccgccggaccacggcgacgagctcggatcccggcgatctagtcgccggaggtggtcccgatggctcggcggtcgtcttcctcgtcgtcgggggcctggcggtacctgaacccggcgtactacctcaagcggcccaagcgcctcgcgctcctcttcttcatcttcgtcgcggccaccttcgccttctgggaccgccagtcgctcgtcagcgagtacgagtctgagatttctcgattagaagatgatataaatcggttgcatgaccagctaagaagggctggagttcatctggatgaaaatccagtaataagcaacaagaattccagaaaaaatcctgtagaaattgatcatgtcaataatgaaaggcgggaaaaagttaaagaggcaatgctccatgcttggaattcttatgtgaagtacgcctggggaatggatgagcttcagccacaatcgaaggatggcatcaatagttttggtggtcttggagcaacccttgttgactcacttgatacactgtatataatgggcctgaaagatgaatttcagaaagctagagactgggtggcagagtcattagactttgacaaggattatgatgcgagtgtttttgaaacgaccataagggttgttggaggtttgcttagtgcatatgatctatctggtgataaagtatttcttgataaggctaaagatattacagatcgtctattacctgcttgggatacaacatctggcatcccctataatagaataaacctagctcatggacgagcccataatcctggatggaccaacggtgacagtatccttgcagattctggtacggagcaacttgaattcatagctctgtcacagaggactggggatcccaaataccagcagaaggcagagaacgtcatcacacagcttcagaagatatatcccagtgatggtttgcttcctatttacataaatcctcattctgggacagcatcgtactccactatcacgtttggtgctatgggagatagcttctatgaatatttgctcaaggtctggatccaggggaataaaactgagcatgtaaaacactacagacaaatgtgggagacatcaatggaaggtctattaagtttaacaaagaaaactacaccatctaattactactacatttgtgaaaagaatggtggctcattgtctgacaagatggatgaacttgcttgctttgcccctggtatgctggcattaggagcctctggttatgggccagaaaaatcagagcaaattatgaatatggcaaaagagcttgctaggacctgctataatttctaccaaaccactcccacgaagttggctggcgaaaattattttttccatgctggacaggtagtatggcacccctttattttttcctcttccaataataaaaatcttgtaccaaaccatcaattctgaatgttattttcctactaagcataggacatgagtgtgggcacatcgtggaacatc

SEQ ID NO: 101176 - DNA, 1743 bp, Zea Mays
cctcctgccgattactgcggccgaaacagaagcacacaaagacattcgacgcggggacgacagagcgcacgcgcgaaccgccgccggaccacggcgacgagctcggatcccggcgatctagtcgccggaggtggtcccgatggctcggcggtcgtcttcctcgtcgtcgggggcctggcggtacctgaacccggcgtactacctcaagcggcccaagcgcctcgcgctcctcttcttcatcttcgtcgcggccaccttcgccttctgggaccgccagtcgctcgtcagcgagtacgagtctgagatttctcgattagaagatgatataaatcggttgcatgaccagctaagaagggctggagttcatctggatgaaaatccagtaataagcaacaagaattccagaaaaaatcctgtagaaattgatcatgtcaataatgaaaggcgggaaaaagttaaagaggcaatgctccatgcttggaattcttatgtgaagtacgcctggggaatggatgagcttcagccacaatcgaaggatggcatcaatagttttggtggtcttggagcaacccttgttgactcacttgatacactgtatataatgggcctgaaagatgaatttcagaaagctagagactgggtggcagagtcattagactttgacaaggattatgatgcgagtgtttttgaaacgaccataagggttgttggaggtttgcttagtgcatatgatctatctggtgataaagtatttcttgataaggctaaagatattacagatcgtctattacctgcttgggatacaacatctggcatcccctataatagaataaacctagctcatggacgagcccataatcctggatggaccaacggtgacagtatccttgcagattctggtacggagcaacttgaattcatagctctgtcacagaggactggggatcccaaataccagcagaaggcagagaacgtcatcacacagcttcagaagatatatcccagtgatggtttgcttcctatttacataaatcctcattctgggacagcatcgtactccactatcacgtttggtgctatgggagatagcttctatgaatatttgctcaaggtctggatccaggggaataaaactgagcatgtaaaacactacagacaaatgtgggagacatcaatggaaggtctattaagtttaacaaagaaaactacaccatctaattactactacatttgtgaaaagaatggtggctcattgtctgacaagatggatgaacttgcttgctttgcccctggtatgctggcattaggagcctctggttatgggccagaaaaatcagagcaaattatgaatatggcaaaagaggtaaatccttgtggcaatcctcctgtttatcgaagatttcaagtctttgcatgacacacttgatgggcaagtggtacccaagaaagacacttttcgttacttaggatcaatgcttcaaaaggagggagacatcgatgaggatgtcagtcatagaattaaagccggatggttgaagtggcgacaagctgcgggtgtcttatgcgaccaccgggtgccacgcaaactaaaaggcaaattctacaggacagcaatccggccggctatgttgtatggagcagaatgttggcccactaaaagacgacatgtccaacaactaagtgtggcagagatgcgtatgttgcgctggatatgtggccacacaaggagagatcgagtccgga

SEQ ID NO: 101177 - DNA, 131 bp, Zea Mays
tttttttacttttaaattttcaactgacatcagatacttgtgtattcagacgcctttttctttatctaaatcttagtggcatttagtttgatttgtttttgaaaaaaattacaagttgctcccttcgcaac

SEQ ID NO: 101178 - DNA, 802 bp, Zea Mays
aactgcagttgttgttgaactttagcagaccttgacatctgatgttccttctgcatctatggcagcgccatgcggttgatttctatatctcagattttcagtccgggcttcgagcattggtgaaaacaggatatggtgcacgtgtgaccccgtatgtcgatgaatctgttataattgacatcaatccagacaacaaggatatgtcccctgattttttgagatggctacgggagagaaacctttcaagcgatgatcgtacaatgcgcctaaaagaaggatacatcaaggaaggtagcactgtgagtgtgatgggggttgtccaaaggaatgacaatgttctgatgattgttcctccatcagagcccatctcaactggttgtcagtgggccaagtgcgttctcccaaccaaccttgatgggcttgttttaagatgcgaagatacttcaaatattgatgtgataccagtttaactggcggtggaagggtagttgccaaaaaaagtgcctgttaaatatttgagtctattgtttcatggaatgctagttgagaaaaatgtgcaaatgttgggtgggtgtgattatggtaggctgagggtggttggttaagctggcctttggatgtatagttttttcttcttcttttaattgtgttttgttgtttctttttaattttcagttctgagatctgaaacttgtgtaaccacatgccttttaatctaaatctgcgtggcatttagattgacttggctttgaaattagaaggacgctctcttttgtgctttgtgttaaaaaaaaactcggcc

SEQ ID NO: 101179 - DNA, 2194 bp, Zea Mays
accacccccactccaccctctctctccattgtctccattattttctctctcctccgtctccaccccctttattctctctctcccagctcctcctccctgtctgctcccctccacatccactgctgtggcgctctccctctcccgtctccccttaccttctccacctcccccattccgccaccgcacaagccgacctccctcaccaagaggagaaaagaaagggagagcgaaggaggcaaaccaggtgggacagcaacgcgacgtgcttgctattctctctaggagctcatgcaaggtgtaagtcttactgcaagaagggcagctgtgcatgttaagacccatacatagcttctcttgattacacagcacggggggtgaaaacttgagatacagttgatctcctggttcagagtatgggttcaaggtttgcatcgcatcagctgagcaatggcctgtatgtttctggtcgacctgaacaacctaaggagaaggccccaaccatttgttccactgcgatgccatatactgggggtgacatcaagaaatcaggagagctggggaagatgtttgatctccatgttgagaagtcaagaaaatctggtcctctaggaaatgctccttcaaggaatacttcatttggaggtgctgcttccaactctggacccgtatccaatgctggcggtcggtccaattactctggttctctttcatcttcagttcctggtgctggcggatcagccagagcaaaatcaaactctggaccgctcaataagcatggagagccaacaaagaggtcatctggtccccagtctggaggagtgaccccaatggcacgccagaattctggcccccttcctcctgtgcttccgacaactgggcttatcacatctgggcctatctcttcagggccacttaattcgtctggtgttccaaggaaagtatctgggccacttgattctgctgcgtcgatgaaaatgcgggctacttcctttgctcacaatcaagctgttactaatctcaacactgaagatggttactcaattcagggaagctttccgaagccaatactctgggctgtgattctgctctttgtgatgggtttcatagcaggtggtttcattctgggtgctgttcacaatgcaattttgctgatagttgttgtggtgatatttggttttgttgctgcacttcttatctggaatgcttgctggggtagtagaggtgcagttgggtttgttaatcgctatcctgatgctgatctcagaactgctaaagatggacaatatgtaaaggttacaggggttgttacctgtggaaatttcccccttgaatcctcgttccaaagggtcccgagatgtgtatacacttctactagcttgtatgagtacagaggttgggattccaaagctgccaatacagagcatcggcgttttacctggggcttacgctcaatggagcgccatgcggttgatttctatatctcagattttcagtccgggcttcgagcattggtgaaaacaggatatggtgcacgtgtgaccccgtatgtcgatgaatctgttataattgacatcaatccagacaacaaggatatgtcccctgattttttgagatggctacgggagagaaacctttcaagcgatgatcgtacaatgcgcctaaaagaaggatacatcaaggaaggtagcactgtgagtgtgatgggggttgtccaaaggaatgacaatgttctgatgattgttcctccatcagagcccatctcaactggttgtcagtgggccaagtgcgttctcccaaccaaccttgatgggcttgttttaagatgcgaagatacttcaaatattgatgtgataccagtttaactggcggtggaagggtagttgccaaaaaaagtgcctgttaaatatttgagtctattgtttcatggaatgctagttgagaaaaatgtgcaaatgttgggtgggtgtgattatggtaggctgagggtggttggttaagctggcctttggatgtatagttttttcttcttcttttaattgtgttttgttgtttctttttaattttcagttctgagatctgaaacttgtgtaaccacatgccttttaatctaaatctgcgtggcatttagattgacttggctttgaaattagaaggacgctctcttttgtgctttgtgttaaaaaaaaactcggcc

SEQ ID NO: 101180 - DNA, 2008 bp, Zea Mays
accacccccactccaccctctctctccattgtctccattattttctctctcctccgtctccaccccctttattctctctctcccagctcctcctccctgtctgctcccctccacatccactgctgtggcgctctccctctcccgtctccccttaccttctccacctcccccattccgccaccgcacaagccgacctccctcaccaagaggagaaaagaaagggagagcgaaggaggcaaaccaggtgggacagcaacgcgacgtgcttgctattctctctaggagctcatgcaaggtgtaagtcttactgcaagaagggcagctgtgcatgttaagacccatacatagcttctcttgattacacagcacggggggtgaaaacttgagatacagttgatctcctggttcagagtatgggttcaaggtttgcatcgcatcagctgagcaatggcctgtatgtttctggtcgacctgaacaacctaaggagaaggccccaaccatttgttccactgcgatgccatatactgggggtgacatcaagaaatcaggagagctggggaagatgtttgatctccatgttgagaagtcaagaaaatctggtcctctaggaaatgctccttcaaggaatacttcatttggaggtgctgcttccaactctggacccgtatccaatgctggcggtcggtccaattactctggttctctttcatcttcagttcctggtgctggcggatcagccagagcaaaatcaaactctggaccgctcaataagcatggagagccaacaaagaggtcatctggtccccagtctggaggagtgaccccaatggcacgccagaattctggcccccttcctcctgtgcttccgacaactgggcttatcacatctgggcctatctcttcagggccacttaattcgtctggtgttccaaggaaagtatctgggccacttgattctgctgcgtcgatgaaaatgcgggctacttcctttgctcacaatcaagctgttactaatctcaacactgaagatggttactcaattcagggaagctttccgaagccaatactctgggctgtgattctgctctttgtgatgggtttcatagcaggtggtttcattctgggtgctgttcacaatgcaattttgctgatagttgttgtggtgatatttggttttgttgctgcacttcttatctggaatgcttgctggggtagtagaggtgcagttgggtttgttaatcgctatcctgatgctgatctcagaactgctaaagatggacaatatgtaaaggttacaggggttgttacctgtggaaatttcccccttgaatcctcgttccaaagggtcccgagatgtgtatacacttctactagcttgtatgagtacagaggttgggattccaaagctgccaatacagagcatcggcgttttacctggggcttacgctcaatggagcgccatgcggttgatttctatatctcagattttcagtccgggcttcgagcattggtgaaaacaggatatggtgcacgtgtgaccccgtatgtcgatgaatctgttataattgacatcaatccagacaacaaggatatgtcccctgattttttgagatggctacgggagagaaacctttcatgcgaagatacttcaaatattgatgtgataccagtttaactggcggtggaagggtagttgccaaaaaaagtgcctgttaaatatttgagtctattgtttcatggaatgctagttgagaaaaatgtgcaaatgttgggtgggtgtgattatggtaggctgagggtggttggttaagctggcctttggatgtatagttttttcttcttcttttaattgtgttttgttgtttctttttaattttcagttctgagatctgaaacttgtgtaaccacatgccttttaatctaaatctgcgtggcatttagattgacttggctttgaaattagaaggacgctctcttttgtgctttgtgttaaaaaaaaactcggcc

SEQ ID NO: 101181 - DNA, 2315 bp, Zea Mays
accacccccactccaccctctctctccattgtctccattattttctctctcctccgtctccaccccctttattctctctctcccagctcctcctccctgtctgctcccctccacatccactgctgtggcgctctccctctcccgtctccccttaccttctccacctcccccattccgccaccgcacaagccgacctccctcaccaagaggagaaaagaaagggagagcgaaggaggcaaaccaggtgggacagcaacgcgacgtgcttgctattctctctagttggatgctgagtggcatgccggtcgatatttgggaaagcagatttttatgttggcaagtgtgagtgcgagttctttgctgaaactttaagcttcacctgagatctgatattgtcggtgccaaattgctgtacatttgactatttgaggacacgttcttaggagctcatgcaaggtgtaagtcttactgcaagaagggcagctgtgcatgttaagacccatacatagcttctcttgattacacagcacggggggtgaaaacttgagatacagttgatctcctggttcagagtatgggttcaaggtttgcatcgcatcagctgagcaatggcctgtatgtttctggtcgacctgaacaacctaaggagaaggccccaaccatttgttccactgcgatgccatatactgggggtgacatcaagaaatcaggagagctggggaagatgtttgatctccatgttgagaagtcaagaaaatctggtcctctaggaaatgctccttcaaggaatacttcatttggaggtgctgcttccaactctggacccgtatccaatgctggcggtcggtccaattactctggttctctttcatcttcagttcctggtgctggcggatcagccagagcaaaatcaaactctggaccgctcaataagcatggagagccaacaaagaggtcatctggtccccagtctggaggagtgaccccaatggcacgccagaattctggcccccttcctcctgtgcttccgacaactgggcttatcacatctgggcctatctcttcagggccacttaattcgtctggtgttccaaggaaagtatctgggccacttgattctgctgcgtcgatgaaaatgcgggctacttcctttgctcacaatcaagctgttactaatctcaacactgaagatggttactcaattcagggaagctttccgaagccaatactctgggctgtgattctgctctttgtgatgggtttcatagcaggtggtttcattctgggtgctgttcacaatgcaattttgctgatagttgttgtggtgatatttggttttgttgctgcacttcttatctggaatgcttgctggggtagtagaggtgcagttgggtttgttaatcgctatcctgatgctgatctcagaactgctaaagatggacaatatgtaaaggttacaggggttgttacctgtggaaatttcccccttgaatcctcgttccaaagggtcccgagatgtgtatacacttctactagcttgtatgagtacagaggttgggattccaaagctgccaatacagagcatcggcgttttacctggggcttacgctcaatggagcgccatgcggttgatttctatatctcagattttcagtccgggcttcgagcattggtgaaaacaggatatggtgcacgtgtgaccccgtatgtcgatgaatctgttataattgacatcaatccagacaacaaggatatgtcccctgattttttgagatggctacgggagagaaacctttcaagcgatgatcgtacaatgcgcctaaaagaaggatacatcaaggaaggtagcactgtgagtgtgatgggggttgtccaaaggaatgacaatgttctgatgattgttcctccatcagagcccatctcaactggttgtcagtgggccaagtgcgttctcccaaccaaccttgatgggcttgttttaagatgcgaagatacttcaaatattgatgtgataccagtttaactggcggtggaagggtagttgccaaaaaaagtgcctgttaaatatttgagtctattgtttcatggaatgctagttgagaaaaatgtgcaaatgttgggtgggtgtgattatggtaggctgagggtggttggttaagctggcctttggatgtatagttttttcttcttcttttaattgtgttttgttgtttctttttaattttcagttctgagatctgaaacttgtgtaaccacatgccttttaatctaaatctgcgtggcatttagattgacttggctttgaaattagaagg

SEQ ID NO: 101182 - DNA, 2214 bp, Zea Mays
accacccccactccaccctctctctccattgtctccattattttctctctcctccgtctccaccccctttattctctctctcccagctcctcctccctgtctgctcccctccacatccactgctgtggcgctctccctctcccgtctccccttaccttctccacctcccccattccgccaccgcacaagccgacctccctcaccaagaggagaaaagaaagggagagcgaaggaggcaaaccaggtgggacagcaacgcgacgtgcttgctattctctctagttggatgctgagtggcatgccggtcgatatttgggaaagcagatttttatgttggcaagtgagctcatgcaaggtgtaagtcttactgcaagaagggcagctgtgcatgttaagacccatacatagcttctcttgattacacagcacggggggtgaaaacttgagatacagttgatctcctggttcagagtatgggttcaaggtttgcatcgcatcagctgagcaatggcctgtatgtttctggtcgacctgaacaacctaaggagaaggccccaaccatttgttccactgcgatgccatatactgggggtgacatcaagaaatcaggagagctggggaagatgtttgatctccatgttgagaagtcaagaaaatctggtcctctaggaaatgctccttcaaggaatacttcatttggaggtgctgcttccaactctggacccgtatccaatgctggcggtcggtccaattactctggttctctttcatcttcagttcctggtgctggcggatcagccagagcaaaatcaaactctggaccgctcaataagcatggagagccaacaaagaggtcatctggtccccagtctggaggagtgaccccaatggcacgccagaattctggcccccttcctcctgtgcttccgacaactgggcttatcacatctgggcctatctcttcagggccacttaattcgtctggtgttccaaggaaagtatctgggccacttgattctgctgcgtcgatgaaaatgcgggctacttcctttgctcacaatcaagctgttactaatctcaacactgaagatggttactcaattcagggaagctttccgaagccaatactctgggctgtgattctgctctttgtgatgggtttcatagcaggtggtttcattctgggtgctgttcacaatgcaattttgctgatagttgttgtggtgatatttggttttgttgctgcacttcttatctggaatgcttgctggggtagtagaggtgcagttgggtttgttaatcgctatcctgatgctgatctcagaactgctaaagatggacaatatgtaaaggttacaggggttgttacctgtggaaatttcccccttgaatcctcgttccaaagggtcccgagatgtgtatacacttctactagcttgtatgagtacagaggttgggattccaaagctgccaatacagagcatcggcgttttacctggggcttacgctcaatggagcgccatgcggttgatttctatatctcagattttcagtccgggcttcgagcattggtgaaaacaggatatggtgcacgtgtgaccccgtatgtcgatgaatctgttataattgacatcaatccagacaacaaggatatgtcccctgattttttgagatggctacgggagagaaacctttcaagcgatgatcgtacaatgcgcctaaaagaaggatacatcaaggaaggtagcactgtgagtgtgatgggggttgtccaaaggaatgacaatgttctgatgattgttcctccatcagagcccatctcaactggttgtcagtgggccaagtgcgttctcccaaccaaccttgatgggcttgttttaagatgcgaagatacttcaaatattgatgtgataccagtttaactggcggtggaagggtagttgccaaaaaaagtgcctgttaaatatttgagtctattgtttcatggaatgctagttgagaaaaatgtgcaaatgttgggtgggtgtgattatggtaggctgagggtggttggttaagctggcctttggatgtatagttttttcttcttcttttaattgtgttttgttgtttctttttaattttcagttctgagatctgaaacttgtgtaaccacatgccttttaatctaaatctgcgtggcatttagattgacttggctttgaaattagaagg

SEQ ID NO: 101183 - DNA, 972 bp, Zea Mays
aactttatccgttccaagtatctcccctcttgcgcctcctctcgactcttccgtttagtgcccaccgaaatctttctaccacccacgttccggcatccatggctcgtctgttcgcggcgcgagcccttacgctggcccgcccctcggcggcgccatccgccctccgcttctgcccctcccgcgcgctgtcggacaaggtggacttcatcgagatcgacctctccgaggagtccccttcctcttcatccggaggaggaggcgcgggcgaccccgccacggttcaggcgcagatggggtcgcggcgcctggaggacgccatccatggggtgctcgtgcggcgggcggcgcctgaatggctccccttcgtgccgggggcatcctactgggtcccgccgttgccgcgggcgctcggggtggcggagcttctcagctcggctatgcacatcacgaggggcgccgaggcgatgacggaggaggaggcattgagcttcactaccgtgcgggggtggccatccgcggcgtactttgtggcaggctcctactgaagaggcagctggggacagtgaaggtcttctgatgggttgtagttataacttatagtaatagacagctagggagcccctgcaacaatggatcccctcaagctgtcaagcatcttcggatggtgtgctcacagctggtaaaatgacactggttcaatcttatgtatttgcagaacccggtgcgctagcacctggacatggtgggtgtatggtccacggaacccagccgtggcgcataatgtaatagagtttgtagtttgtactttgtaccatattttccctcttgaataaaggcatgtgttacgctgaacacctgtggcacatgacaactcttcttggtgtgtaaccaccgtttggcttggggccttccgagttccaactgagacgtgtgctgtggccgccgtgcctatatcaccgatcttgaagtgtt

SEQ ID NO: 101184 - DNA, 1053 bp, Zea Mays
gtatcgagccttgtatctggttgtctgtaaaccatatatacatgttttggttggaaaaaagaagaattatgttcttttgtttgtggagtgtagacttcttagctggataaaacaaaaaccttcattctttcagtttggctatcaggattcaggagtcagacctttggttctgcactgagagccatgttttttcttattctagaatttgattggttgacatttcgcttctcttgctctgctgttgtcattgtctgttacttgttagtttaaatagttagtgttgttcaaaggaaaaattctgcgtccagtggagaaatcaaggaaagatcctactgaaactgacaatgataaaagttaatcctatgctgattcactcctggcgtaagttgattcactttcatcaagggagcattttacgcccgctttattttgtatcctagggctgcatttcaagccaagccattgctaccaagcttaaatctgtcccaaaaccattggtcctcagttcagtatatgcctgcagtgtcaagcattggagatcttttatctaacgttctgaagtggcttcctgttataaaagggacattctgaaacggtagttgagatgcaccaataaccatatatgaatattatctcttatctgaagcctcactgtgttcgttgtgtaggctcctactgaagaggcagctggggacagtgaaggtcttctgatgggttgtagttataacttatagtaatagacagctagggagcccctgcaacaatggatcccctcaagctgtcaagcatcttcggatggtgtgctcacagctggtaaaatgacactggttcaatcttatgtatttgcagaacccggtgcgctagcacctggacatggtgggtgtatggtccacggaacccagccgtggcgcataatgtaatagagtttgtagtttgtactttgtaccatattttccctcttgaataaaggcatgtgttacgctgaacacctgtggcacatgacaactcttcttggtgtgtaaccaccgtttggcttggggccttccgagttcc

SEQ ID NO: 101185 - DNA, 991 bp, Zea Mays
aactttatccgttccaagtatctcccctcttgcgcctcctctcgactcttccgtttagtgcccaccgaaatctttctaccacccacgttccggcatccatggctcgtctgttcgcggcgcgagcccttacgctggcccgcccctcggcggcgccatccgccctccgcttctgcccctcccgcgcgctgtcggacaaggtggacttcatcgagatcgacctctccgaggagtccccttcctcttcatccggaggaggaggcgcgggcgaccccgccacggttcaggcgcagatggggtcgcggcgcctggaggacgccatccatggggtgctcgtgcggcgggcggcgcctgaatggctccccttcgtgccgggggcatcctactgggtcccgccgttgccgcgggcgctcggggtggcggagcttctcagctcggctatgcacatcacgaggggcgccgaggcgatgacggaggaggaggcattgagcttcactaccgtgcgggggtggccatccgcggcgtactttgtggcagtgtcaagcattggagatcttttatctaacgttctgaagtggcttcctgttataaaagggacattctgaaacggctcctactgaagaggcagctggggacagtgaaggtcttctgatgggttgtagttataacttatagtaatagacagctagggagcccctgcaacaatggatcccctcaagctgtcaagcatcttcggatggtgtgctcacagctggtaaaatgacactggttcaatcttatgtatttgcagaacccggtgcgctagcacctggacatggtgggtgtatggtccacggaacccagccgtggcgcataatgtaatagagtttgtagtttgtactttgtaccatattttccctcttgaataaaggcatgtgttacgctgaacacctgtggcacatgacaactcttcttggtgtgtaaccaccgtttggcttggggccttccgagttcc

SEQ ID NO: 101186 - DNA, 1809 bp, Zea Mays
cgcctctctttccgttttccttcctcgtcgcggtcgtgggtcacttgccgccgcgccggcaacgtccccttcccatccccagccacgcataaatcaatcgatgcattggtccttggcacgacttgattcctgattccctctgctgttctccacccgctctctctctttcgcgtggcatttcttcctgccagcgacgaattggcgcgcgccgccgccgccgtctgcccaggcccttcgcccacccaccagacagacgtgtataagcgagaggaaattatctgccggccattttcactgacagctggtggagtccgagagtaatgagagctgtgaagtttaatggacctaaatagatgaagctgcatcaagtttggcagttaggcgttaaggatatgaaggccgttccacttccacgtccgagatcagctccaaaaagacgtgcgtggatccctgccgttgcagcttttatctccatcgcgctagtctgggcttatctgtatcctcccccgcattacacttcttctgtgagggattggcttcctgcggaaccagccagggaattgaccgatgaggagagggcctcgcgtgttgtttttaggcagatcctaacaacacctcctgttctatccaagaattcaaaaatagctttcatgttcttgactccggggacattgccatttgaaagattatgggaaaagttctttgagggccatgaaggaaggtataccatatatattcatgcctcaagggagaagcctgaacatgtcagtcccatatttgttggtcgagagatacacagtgaaaaggtaacttggggtaaaatttctatggttgatgctgagaggaggttgatggcaaatgctctacaagatattgacaatcagcattttgttttgctatctgatagctgtgtacctttgcacagttttgattatgtatatgactacctgatgggtgcaaatctcagttttattgactgcttttatgatcctggaccacatggaaattttagatattcacaaaatatgttgcctgaggtcacagagactgattttagaaagggttcacagtggttctcagtcaaacgccaacatgcgttgatgattattgcagatagtctttactatactaagttcaagcttcattgcaggcctgggatggaagatggtcgcaactgctacgctgacgaacattatttgccaacagtattccgtatgatggacccagatggaattgctaattggtctgtaacccatgttgactggtctgaagggaagtggcatccaaaagcttaccgggcaaagcacgttaatttggagcttctgaagaatatagcatcaatcgacgtgagccaccatgtcactagtgatggcaagaaagtggtcacagagaacccctgcctatggaatggagcaaagaggccatgctacctgtttgcgaggaagttctaccctgaatccataaacaatctcttgaccttgttcgcgaattacacacttatttgagcttctaggtgacgcttagaggctacagggaatattttgttatagaaatccttgtacattggttaggaacataataggagattaattaacaggatagcagttggtgaggagaaggctttcggctttcgctgcagcaacacagtggcttcggatataccacaactggtcattgctactcctttagcctcgtgttgctttcatagtttcttctacccacatttttagctgcggcgttttaccatgtacatcaagctttgtttttacaaggaatggtcattcaataggaaaatctgagatcatggtc

SEQ ID NO: 101187 - DNA, 1752 bp, Zea Mays
cgcctctctttccgttttccttcctcgtcgcggtcgtgggtcacttgccgccgcgccggcaacgtccccttcccatccccagccacgcataaatcaatcgatgcattggtccttggcacgacttgattcctgattccctctgctgttctccacccgctctctctctttcgcgtggcatttcttcctgccagcgacgaattggcgcgcgccgccgccgccgtctgcccaggcccttcgcccacccaccagacagacgtgtataagcgagaggaaattatctgccggccattttcactgacagctggtggagtccgagagacctaaatagatgaagctgcatcaagtttggcagttaggcgttaaggatatgaaggccgttccacttccacgtccgagatcagctccaaaaagacccagggaattgaccgatgaggagagggcctcgcgtgttgtttttaggcagatcctaacaacacctcctgttctatccaagaattcaaaaatagctttcatgttcttgactccggggacattgccatttgaaagattatgggaaaagttctttgagggccatgaaggaaggtataccatatatattcatgcctcaagggagaagcctgaacatgtcagtcccatatttgttggtcgagagatacacagtgaaaaggtaacttggggtaaaatttctatggttgatgctgagaggaggttgatggcaaatgctctacaagatattgacaatcagcattttgttttgctatctgatagctgtgtacctttgcacagttttgattatgtatatgactacctgatgggtgcaaatctcagttttattgactgcttttatgatcctggaccacatggaaattttagatattcacaaaatatgttgcctgaggtcacagagactgattttagaaagggttcacaggtaatcttgcaatcatcttgcttaattattttaaatctgcgatcattctgatgggagtttgttttgacttcaactatttcagtggttctcagtcaaacgccaacatgcgttgatgattattgcagatagtctttactatactaagttcaagcttcattgcaggcctgggatggaagatggtcgcaactgctacgctgacgaacattatttgccaacagtattccgtatgatggacccagatggaattgctaattggtctgtaacccatgttgactggtctgaagggaagtggcatccaaaagcttaccgggcaaagcacgttaatttggagcttctgaagaatatagcatcaatcgacgtgagccaccatgtcactagtgatggcaagaaagtggtcacagagaacccctgcctatggaatggagcaaagaggccatgctacctgtttgcgaggaagttctaccctgaatccataaacaatctcttgaccttgttcgcgaattacacacttatttgagcttctaggtgacgcttagaggctacagggaatattttgttatagaaatccttgtacattggttaggaacataataggagattaattaacaggatagcagttggtgaggagaaggctttcggctttcgctgcagcaacacagtggcttcggatataccacaactggtcattgctactcctttagcctcgtgttgctttcatagtttcttctacccacatttttagctgcggcgttttaccatgtacatcaagctttgtttttacaaggaatggtcattcaataggaaaatctgagatcatggtc

SEQ ID NO: 101188 - DNA, 1351 bp, Zea Mays
cgcctctctttccgttttccttcctcgtcgcggtcgtgggtcacttgccgccgcgccggcaacgtccccttcccatccccagccacgcataaatcaatcgatgcattggtccttggcacgacttgattcctgattccctctgctgttctccacccgctctctctctttcgcgtggcatttcttcctgccagcgacgaattggcgcgcgccgccgccgccgtctgcccaggcccttcgcccacccaccagggccatgaaggaaggtataccatatatattcatgcctcaagggagaagcctgaacatgtcagtcccatatttgttggtcgagagatacacagtgaaaaggtaacttggggtaaaatttctatggttgatgctgagaggaggttgatggcaaatgctctacaagatattgacaatcagcattttgttttgctatctgatagctgtgtacctttgcacagttttgattatgtatatgactacctgatgggtgcaaatctcagttttattgactgcttttatgatcctggaccacatggaaattttagatattcacaaaatatgttgcctgaggtcacagagactgattttagaaagggttcacagtggttctcagtcaaacgccaacatgcgttgatgattattgcagatagtctttactatactaagttcaagcttcattgcaggcctgggatggaagatggtcgcaactgctacgctgacgaacattatttgccaacagtattccgtatgatggacccagatggaattgctaattggtctgtaacccatgttgactggtctgaagggaagtggcatccaaaagcttaccgggcaaagcacgttaatttggagcttctgaagaatatagcatcaatcgacgtgagccaccatgtcactagtgatggcaagaaagtggtcacagagaacccctgcctatggaatggagcaaagaggccatgctacctgtttgcgaggaagttctaccctgaatccataaacaatctcttgaccttgttcgcgaattacacacttatttgagcttctaggtgacgcttagaggctacagggaatattttgttatagaaatccttgtacattggttaggaacataataggagattaattaacaggatagcagttggtgaggagaaggctttcggctttcgctgcagcaacacagtggcttcggatataccacaactggtcattgctactcctttagcctcgtgttgctttcatagtttcttctacccacatttttagctgcggcgttttaccatgtacatcaagctttgtttttacaaggaatggtcattcaataggaaaatctgagatcatggtc

SEQ ID NO: 101189 - DNA, 1692 bp, Zea Mays
cgcctctctttccgttttccttcctcgtcgcggtcgtgggtcacttgccgccgcgccggcaacgtccccttcccatccccagccacgcataaatcaatcgatgcattggtccttggcacgacttgattcctgattccctctgctgttctccacccgctctctctctttcgcgtggcatttcttcctgccagcgacgaattggcgcgcgccgccgccgccgtctgcccaggcccttcgcccacccaccagacagacgtgtataagcgagaggaaattatctgccggccattttcactgacagctggtggagtccgagagtaatgagagctgtgaagtttaatggcatgtttggaagcaccagtttttaagaaactggtttatgaaaattgatgtggtttcaaacataccggtttatgtctcagtttataggaattatattttcagatttttaagaaaccggtttatgaaaattgatgtggttctaaatataccggtctatgtctacgtttatagaaattaaattttcagtttattaaaaaccaagaagctagtctcatttagctaaaaaataaaaactggtttcttaaaaaacaatgttgctttcaaacaggacctaaatagatgaagctgcatcaagtttggcagttaggcgttaaggatatgaaggccgttccacttccacgtccgagatcagctccaaaaagacgtgcgtggatccctgccgttgcagcttttatctccatcgcgctagtctgggcttatctgtatcctcccccgcattacacttcttctgtgagggattggcttcctgcggaaccagccagggaattgaccgatgaggagagggcctcgcgtgttgtttttaggcagatcctaacaacacctcctgttctatccaagaattcaaaaatagctttcatgttcttgactccggggacattgccatttgaaagattatgggaaaagttctttgagggccatgaaggaaggtataccatatatattcatgcctcaagggagaagcctgaacatgtcagtcccatatttgttggtcgagagatacacagtgaaaaggtaacttggggtaaaatttctatggttgatgctgagaggaggttgatggcaaatgctctacaagatattgacaatcagcattttgttttgctatctgatagctgtgtacctttgcacagttttgattatgtatatgactacctgatgggtgcaaatctcagttttattgactgcttttatgatcctggaccacatggaaattttagatattcacaaaatatgttgcctgaggtcacagagactgattttagaaagggttcacagcctgggatggaagatggtcgcaactgctacgctgacgaacattatttgccaacagtattccgtatgatggacccagatggaattgctaattggtctgtaacccatgttgactggtctgaagggaagtggcatccaaaagcttaccgggcaaagcacgttaatttggagcttctgaagaatatagcatcaatcgacgtgagccaccatgtcactagtgatggcaagaaagtggtcacagagaacccctgcctatggaatggagcaaagaggccatgctacctgtttgcgaggaagttctaccctgaatccataaacaatctcttgaccttgttcgcgaattacacacttatttga

SEQ ID NO: 101190 - DNA, 114 bp, Zea Mays
agcccctttttctattagaactttagttttatatcttaacaaagttgttactctatactattttatagtaattttagcatagtcatgggaagaaagctccataattgctgatgc

SEQ ID NO: 101191 - DNA, 561 bp, Zea Mays
aggggctatctggcctagcctcacgaggtcgggctggaaaccctcgcctctcgcggtctcgcctctccaagacacccaggccgccgccttcgcctacaggcaccttgccgcctccgtccgctgcccgtggcttccgtccacctccacctcactcacccactacatcgccgaccaagcgcagcaccgcgcgtggaccagacaccgcccgtggcttccgtggaccagacgccgcccgtggcttccgtggacgcagcaccgtgcgtggaccagccgctgctacatcgccgaccaggtgatacacaagggattttcatcaacaagtggtcgccagaagaactgaaacatcaagatggcgtttgcttttaggtcgtgtatgttgaaactatatgttttattattatgcactgagactatgtttgacattggtcgtgtacactgagactatgttttattatgagactatgttttattatgatgcactgagactatgtttgtgcacacatgttttattatgactatgtttttttatgagactatgttttattatgatgtactgagact

SEQ ID NO: 101192 - DNA, 238 bp, Zea Mays
attacagatgtgctgatccaattcagttttcagagtgatacacaagggattttcatcaacaagtggtcgccagaagaactgaaacatcaagatggcgtttgcttttaggtcgtgtatgttgaaactatatgttttattattatgcactgagactatgtttgacattggtcgtgtacactgagactatgttttattatgagactatgttttattatgatgcactgagactatgtttgtg

SEQ ID NO: 101193 - DNA, 827 bp, Zea Mays
aaaaaattagagaaatttctacaagcaggtagctgcgaggactgctatttagttaccaacaatgtgtccgattgttgtggcttagggacgagattcacaagcaggtagttatataaatcactcaatttctacaacattttttacttgcttaaatctgctatttcagtttttttgctagtaaaatctgctatttagttacctctattgtttaattgcttaaatctgctatttcaattttgtttctagtaaaatatgccgctatttgagttcagctatttatgtttacataagcaagtgcttcataaacatctaaatccacacctttgttccagttcagcaatgtcttctctttattacagatgtgctgatccaattcagttttcagagtatgttgacaatctgaatttagttcaagcaataccttctctttattacagatgtttaaccaggtgcttcataaacatctgaattcagttcagcaatgtcttctctttattactgaatattgaactaaatataaaggctttcatgtccccaaatacagagggtctccaaattggatattgaactgaatatagaggaattgaatatatatacatttgtctaagttttctcatcaacaggtgatacacaagggattttcatcaacaagtggtcgccagaagaactgaaacatcaagatggcgtttgcttttaggtcgtgtatgttgaaactatatgttttattattatgcactgagactatgtttgacattggtcgtgtacactgagactatgttttattatgagactatgttttattatgatgcactgagactatgtttgtg

SEQ ID NO: 101194 - DNA, 1446 bp, Zea Mays
aagaaccaatgaaaggtcaccgttgtagttttgattagacataaaagcatgaaaataaccaatgtgtctagatagtttaggaattgctaacatctttttggttattacataccagttccatgatactacccacatgcatgctgcaagaatactgaagaggccaagaccaatccaacaatccgtggagacctgaaacaaaaatccaacaatccgtgcaatgttttaaaatattggatcatctgtaaacaacaataacaaagatccaaatgtaacaaataaggaagcaggaaggacaaacacaaaggttgtggcatggcgtgtggcaccaatcatcatgtaggtcatcagtgcttcgagcggagcctgagctgagcctgacaaatttcggataaacgaaccaagcaccctccgtgctatagaattgactggagaatggcatacaacagtacttatatttccttgaattgaattattaatctgtgccacatggttgttgcttgactgacaaacaagacgaggccgccatagaaataggagcaggaaaccatgaaaaagactgccaaagttcaatggatttcgggtagctttctacatctgaagaacaaaccaaccaccaagaaggcatgggcgcatggcatgtccaggtctgcatcctacgtagcaaaaggagtagggggcctgtatatcttattttgtaagtaagcaactaaagtaaacaaaacaacatcgcttggaattcaagcaaggctgtcaggaagctactaaccatagagtttatttagttaatagtactggtcacctgaacagcctagtagaacataaaaaaggtagaaaatgtacagtgtagaagtagaacacatcacatagaaacctgatgagtgacgataatgtcataaacaatagacctaacaactagcagagaggaacaaaatagcaagagatggaacatgttcactacctggggatcagatcgtacacccgcctggcctcctgcgtccggcgcgtggctatcttccttcgtgtggcgaccatgggcgagacggccggcacccgtagaaccgctgacgccgccgccttccccttttcccgctagccccaacacggaggccgcaacatcggacgccccggccacgcgcgccaatgaaagggcggagcagggccagcggctagagcatggcgaggagctggcgcaatgcgagcaacgcgcttatccggcccgctgggtccaccgcctgcatgctcccggccattttttgcaacctccgcctccgcctcctatcccttcgtctccctcgacgtgggccgtgaggactggtgcaagccgacagcagacgaagcttggtctggaaggagttttcgacatcgacgacacaaaagcaaagcagagagaaggaaagcgagagcatggcgaacgcagagagaaagaaagtgagatgcagccgatgg

SEQ ID NO: 101195 - DNA, 1154 bp, Zea Mays
acgatagggtaactgattaaagatgtattcctgatggtaaaataaacaaaagcgtggccactaaaccctagtacacgcaaaagaaaaagcaaaacaatgaaataagagcagtcagtcccctaaataattcgaagcaggttcgatcactctattctcatttcccaggcacatgccatctcgcctgtatggctgtaccacttgctgggactactcgttaccctccaatggtagtctgcactctgcagcttcagaccatgcagtacaaaacacagagcactaaaggcgtgtttggtaccttgcctacgccaccgccatccgccgcacttttcgtgccgcagttgtggcggccaattcggccgccgcaacttaggcgtggcgtggcgccatacgccacacaccaaacacgccttaaaccttccctaccggtcccgatctgcaggaggaaaaggtgtagcggtttgcacttggttctgtattgctagttacaacttacaacacgctgacatgcaaatgcagttcgcgagccccccacagaaagtgacagcaaacaggctcctatggatcctgtacttagtgtccgaacaacaaaataccaatatggcaataagtcgcacatggacctgccaacctatcgttcctggttcttgagttcatgatcaataagccggagcttcagactgttctcttcgttgaggagggagagcttctcaagcgaagatttcagaagtgacatctgggattctgagatatggctccgtccagccctttgtgcctgccatggcaccattcctgtgctagccgcactgcccgtggattgctgagcaaaacgtttcatcctagcactcagggcggcaatggaggaacgcaaagcatccagctccacatctgcgaaccgatctgcaaaaggttttagcaggaagcatcttgaagctatctattcgcttctccaacagttcatacaccttgaaggcccgatctatcctcttgttgatgtctccatctttggcttctacggatataagtgatttcttcactgcttccaagcgtttctgtttatcttccatttctgtcttcaaatagtccgcatgctccttgagttcaatgaacacctaataatcattaaattgacctcttggtcagcgtgtttcctttca

SEQ ID NO: 101196 - DNA, 1157 bp, Zea Mays
acgatagggtaactgattaaagatgtattcctgatggtaaaataaacaaaagcgtggccactaaaccctagtacacgcaaaagaaaaagcaaaacaatgaaataagagcagtcagtcccctaaataattcgaagcaggttcgatcactctattctcatttcccaggcacatgccatctcgcctgtatggctgtaccacttgctgggactactcgttaccctccaatggtagtctgcactctgcagcttcagaccatgcagtacaaaacacagagcactaaaggcgtgtttggtaccttgcctacgccaccgccatccgccgcacttttcgtgccgcagttgtggcggccaattcggccgccgcaacttaggcgtggcgtggcgccatacgccacacaccaaacacgccttaaaccttccctaccggtcccgatctgcaggaggaaaaggtgtagcggtttgcacttggttctgtattgctagttacaacttacaacacgctgacatgcaaatgcagttcgcgagccccccacagaaagtgacagcaaacaggctcctatggatcctgtacttagtgtccgaacaacaaaataccaatatggcaataagtcgcacatggacctgccaacctatcgttcctggttcttgagttcatgatcaataagccggagcttcagactgttctcttcgttgaggagggagagcttctcaagcgaagatttcagaagtgacatctgggattctgagatatggctccgtccagccctttgtgcctgccatggcaccattcctgtgctagccgcactgcccgtggattgctgagcaaaacgtttcatcctagcactcagggcggcaatggaggaacgcaaagcatccagctccacatctgcgaaccgatctgcaaaaggttttagcagcaggaagcatcttgaagctatctattcgcttctccaacagttcatacaccttgaaggcccgatctatcctcttgttgatgtctccatctttggcttctacggatataagtgatttcttcactgcttccaagcgtttctgtttatcttccatttctgtcttcaaatagtccgcatgctccttgagttcaatgaacacctaataatcattaaattgacctcttggtcagcgtgtttcctttca

SEQ ID NO: 101197 - DNA, 3812 bp, Zea Mays
tcgtcagttgttgtcgactcatccaagcagacccgagatacccaaaccctcgcaccttctcggcggtggcggcggcggcgtacgggacggcagagatggccatggaggcggtggccacggtgagctccgccagtgggctccttgctatgctgcaggagcctgcgccggagctgaagctgcacgcgctcgcccgcctcaactccgtcgtccacctcttctggcccgagatctccaccagcgttcccaccattgagagcttgtacgaagatgaggagtttgagcagaggcagcttgcagcacttgttgtttctaaggtattttactacctgggcgagctaaatgattcactgtcatatgcacttggtgctggacccctatttgatgtttccgacgattctgattatgcccatgctcttttggccaaagcattagacgaatatgccagtatcaaaaccagagccttgaaagctacagaggaggaagagaacattgatcctcgattagaggccatagtggagaggatgcttgaaaagtgtatttttgatgggaaatatcaacaggccatgggtatggctgttgaatgcagaaggctggataagctggaggaagcgattgttgggtgtgataacattcagggggctctatcatattgcatcaatctttctcatcaatacgttaatcaccgtgaatatcgtttcgaggttctccgctgtcttgttaaaatataccaaactttgccaaatccagactatctgagcatttgccagtgtcttatgtttttgggtgagccagaaactgttgcatgcatattggacaagctgctttctggaaacaaggatgatgctctccttgcatatcaaattgcctttgatcttgttgagaatgaaaaccaggctttccttttgaatgtgagaaatcgtttgtcctcaccgactcctgtgccatctaaccctgacagtgggccagccgtacaagatgaccaaactgccagtactgtgggtacagacacagaagcagctggagatgttcagatgagagatgatacaagtacaccaaatggaactgctcacagtgtggatccaaatgaggtagcgcatgctgacaggcttgaaaaaattaaagggatactgtcaggggaaacttccattcagctggcattgcaatttctatacagccacaacaggtctgatcttttaattctgaagacaataaaacaggctgtggaaatgaggaatagcgtttgtcacagtgcaacaatatgtgccaatgcaatcatgcatgcgggaactactgtagatacctttctaagagagaacctggagtggttaagcagggcaaccaattgggcaaaattcagtgcaactgctggactaggtgtcattcatagaggtcatcttcaacaagggcgggctttgatggccccctacctacctcaaagtggtgcagttggtggtgggagtccatattcagaaggtggtgccctctacgcactaggtttgattcatgccaatcatggtgaaggaatcaaacaattcctccgtgaaagtcttcgcaactccagtgcagaggtcatccagcatggtgcatgtttggggcttgggcttgcagctttgggaaccgcagatgaggaaatatatgaggacataaagaatgtcctttacacagacagtgctgttgctggtgaggcagctggtattggcatgggcttgctcatggttgggaccgccagtgagaaggctagtgagatgcttgcttatgcacatgatacacagcatgaaaagattataaggggtttgtcactgggaattgcattgacagtatatggcagggaagaggaagcagacaccttgattgaacaaatgactagagatcaagatcccatattacgttatggtggtatgtatgcattggctctagcctataggggaactgcaaacaacaaagccatccaccagctgctgcattttgctgtatcagacgtcagtgatgatgttcggaggactgcagttatggctcttggatttgttctatacaacgagcctgagcagactccaagaattgtgtccctgctctctgaatcatacaacccacatgttcgttatggtgcagccttggctgttgggatatcatgtgcaggatctggattaagtgatgcgatttccttgttggagcctcttacatcagatgttgttgacttcgtgcgtcagggagctctcattgccatggcaatggtaatgatccaaactaatgaatcctttgattctcgtgttggagcatttaggcgtcagttggagaagatcattcttgacaaacatgaggacaccatgagcaagatgggtgccatattagcatctggtatcctcgatgctggtggtaggaatgttacaatcaagctcctctcaagaaacaagcatgacaaactcacggctgtgattggtcttgccgttttcagtcagttctggtactggtatcctctcttgtatttcatcagcctggccttctcgccaacagccttcattgggctcaactctgatttgaaagtgccaaagtttgaattcctgtcgcatgctaaaccgtctctctttgagtatcccaaaccgacaactcagcagactacaacttcaacagtgaagctgccagcagccattctgtcaacttatgcgaaggcaaaatctagggcaaagaaggacgcagaaagcaaagctaaccaggagaaggccacagaagaggcttctggttctacctcaagcaagacggctaaagctcaggagaaggatgctgatgcaatgcaggttgacaatgccagtgagaagaaagctcctgaaccagaagcgacttatcagctccttacgaatccagctcgcgtgatccctgcccaggagaagttcatcaagctccttgaaaacagccgatatgtacctgtgaaaccagcgccttctggattcatcctcctccgagacctgcagccgactgaggctgaggatcttgcgctgaccgatgcccccacaacagtcgcaggaagcaccggcaacactgcccctgctgcaggccaacaggggtcaggatcatcagccatggccgtggacgatgagccacagccgccacaaccctttgagtacacctcgtgagcgaccgagcgtcaccttttcttattcgttttttttttgactttttgagtatgtagtgtgcggaaatttgttgttggctggaagaccttttgtagaaacatgagtagagaattttacttgaattgaagctataggatcaacgttgggaatctgggatatagcccaggtcaaaacccgcgctcccgcctgtgatcttttttttcgtgcaatgcaaagtcgagttgacatgagctgaacacggcggtaaaaatacgaaaatgttcggggcaaaccttctcggtgaaattgtaaaaaccctttcgagaaccataactcgaagttctaaatgtctttaaaactatgtagtacattcgtagtgcgtttctagaaaaaagtatatgaaaaatatcaatttcaggcaaatatgcattagaggacgagaaattttgggatttgtcctcacttgatatgtcgtttcaacattaaatttacaaaacgagattttttaaattttgcgctaatgcatatctatagatgcactattggtgtgcagagttccatttttaaaaaaacgcctaaacgttttttttctaaagagtttttaccatttcacagagtaaagggcccgccgagaattcgacgtggcgcagacatcggtcagggagattttacactagtctccaaatggtgcaccgtagggtgaag

SEQ ID NO: 101198 - DNA, 426 bp, Zea Mays
ctgtcttttattttgttattcatttcatgcatattatgctaactccaacccccaatgtcatacaggtcatccagcatggtgcatgtttggggcttgggcttgcagctttgggaaccgcagatgaggaaatatatgaggacataaagaatgtcctttacacagacagtgctgttgctggtgaggcagctggtattggcatgggcttgctcatggttgggaccgccagtgagaaggctagtgagatgcttgcttatgcacattgggctcaactctgatttgaaagtgccaaagtttgaattcctgtcgcatgctaaaccgtctctctttgagtatcccaaaccgacaactcagcagactacaacttcaacagtgaagctgccagcagccattctgtcaacttatgcgaaggcaaaatctagggcaaag

SEQ ID NO: 101199 - DNA, 1299 bp, Zea Mays
atggcaatccttaaaacccgaagcacatcgatgtttacgacgaaaccgcagaacatcgacaggttttcttgttccatcgtcagcgccacacgtctatacgggagacgagagatggaaggaggggaagaggtggagaaagagggcaacatgtcgcagttggctggcgttcagtttcttctctcgaacgaaggaaaggaagtacctctgtcatccatcgaagacaggacggcctgcctctgcctcttcttctcggctcactggtgcaggccatgcaggagcttcaccccgactctactccaggcctacacggcgctccggagcgccggcaagagcgtcgagataatcttcgtgtcgctggaccgcgacgaggccagcttccgggaccacttccagggcatgccgtggctcgcggtaccgttcgacgctgctggcctactacggcagaagctgtgcgcgcgcttcgccgtcgagcgtatccctgcactgatccctctgtcagcgtcagcgacgccgtccagcgggctgggatctggagaggacgcggtgaggctggttggcgagtatggagtagatgcgtacccgttcagtgcgcagaggagaagggagctggagagcatggacgatgccaggagagaaggaggccggcttcaggagcttcttggctgcgaggagagagactatgtcatcagtgcagatgacataaagattcctatagctgaccttgatggcaagacagtcggcctgtactttggagcacactggtgcccaccttgccatgtcttcaccaaacagctcaaggaggtgtataacgagctgaaaatcttgagaccgggaagcttcgaggtaatcttcgtttcgatagaccgcagcaagggggaattccaagcaagcatgagttcaatgccatggcttgccatcccttattctgacgctgcaaggaaaaagcttacaagaatcttcgctgtcaagggtatcccaggactcctgatacttggtctggacggtaaagttctaaaaacagatggcaggacagcgatatcaacctacggtgcagcagcattcccgttcacggaatctagagtttctgaagtgggtgaagcgctcaaaagggaaggagacaagctgcctcgccgagtgaatgatccaaggcacagacacatgcttgagttggacatggctaaggcctatgtttgtgatgaatgccaacagaaggggaggtattgggtgttctcttgtaagcagtgcaactttgatcttcatccctcttgtgtaggagataataaagtagacaacatttaa

SEQ ID NO: 101200 - DNA, 2015 bp, Zea Mays
agcccaccggccgtgctaacccccgcacttaccaagagagagaaaaagcgagaggcgactccacgcgtctcgtctcgtctcgtctcgtctccctctctctcgtccggtcctccctccccttcctgaggcgttccctctctctcctcccctttcctctgctggtctctactctcttgtcatcgcacccgtctccccgctctgactccgtcccgagcggccgactccgcccgcgccgccgccgccgccgcctcgtcccgatcgacccccgaatcgccggaaaccgtggacttcgcgaggttgtgtctttacctccgagcggtgtagggaatataacagggtgacagctgaattgcagaaaaaaggaggacatttggttgttgcatgatggtggaaggccccaatttcgctggcctgattggtggtcatgacaatggtgggaatttttgcgacatggcatactaccggaaactcggtgagggctcaaacatgtcgatagatagccttaacagcatgcagaccagcacgcatggcggctccattgcaatgtctgtggacaatagcagtgtagggtcctgcagctcccatactaggatgctcaatcatcctggcctcaagggacctgttgttggcaattactccgtcggtgggcacagtattttccgtcatggacgggtgtctcatgccttgagcgatgatgcgctagcacaggcgttgatggacccaaggtacccgactgagacactcaaagattatgaggagtggacaattgatttagccaagctccacatgggaatgccctttgcacagggcgcctttggaaagctctacaggggtacctacaatggggaagatgttgccattaagcttttggagaggccagaggctgatccagagagagctgggttaatggagcagcagtttgttcaagaagttatgatgcttgcaaccttgaggcaccagaatattgttaaatttattggagcatgcaggaagccagtggtttggtgcattgtgacggagtatgccaagggtggatcagttagacagtttctagcgaagaggcagaataggtcggttccactaaaactggcggttaagcaagcattggatgttgcaagggggatggcctatgttcatggtcttgggttcatccatagggatcttaagtcagataacctcttgatatctggtgataaatctatcaagatagctgactttggagtagctcgcattgaagtaaaaactgaggggatgacacctgaaacgggaacctaccgttggatggcaccagagatgattcagcataggccatatgaccagaaagttgatgtctacagctttggcattgtgctgtgggagctcataactggcatgctcccttttgctaacatgacagcagtgcaagctgcttttgctgtggtgaacaagggtgtccgcccagctataccccaggactgcctgcccaccctcggtgagatcatgaccaggtgctgggatccaaatcctgatgtccgtccgccgttcactgaagttgtgaggatgctggagcatgctgaggtggagatcctgagcactgtccgcaaggcccgatttcggtgttgcatctcccaaccgatgaccaccgactgaatcaaacagaagagagtcgaaaagaactccatgcaagcataattgagtaaatttatcttgtgtccagacttcgctcagctgaagtagaaagcacacctgagtggctgagtgtatggccgtgtgtgtgtatactcaggtgtaagcatattgtctttgaaatattcctgccattagaaatatacctagttcgcggtttcagactcttgagatgttttagggctagcctatgccctgacgaaacatcatgcaggcttcctattcttgtaatgtcgttgtggccctgctgctttgttcatgttataaccctcctactggattatgcaaacactttgttttgttgcttctgagtatatagcatgtataatttccttgcaaccatttgttcc

SEQ ID NO: 101201 - DNA, 1924 bp, Zea Mays
agcccaccggccgtgctaacccccgcacttaccaagagagagaaaaagcgagaggcgactccacgcgtctcgtctcgtctcgtctcgtctccctctctctcgtccggtcctccctccccttcctgaggcgttccctctctctcctcccctttcctctgctggtctctactctcttgtcatcgcacccgtctccccgctctgactccgtcccgagcggccgactccgcccgcgccgccgccgccgccgcctcgtcccgatcgacccccgaatcgccggaaaccgtggacttcgcgagaaaaaaggaggacatttggttgttgcatgatggtggaaggccccaatttcgctggcctgattggtggtcatgacaatggtgggaatttttgcgacatggcatactaccggaaactcggtgagggctcaaacatgtcgatagatagccttaacagcatgcagaccagcacgcatggcggctccattgcaatgtctgtggacaatagcagtgtagggtcctgcagctcccatactaggatgctcaatcatcctggcctcaagggacctgttgttggcaattactccgtcggtgggcacagtattttccgtcatggacgggtgtctcatgccttgagcgatgatgcgctagcacaggcgttgatggacccaaggtacccgactgagacactcaaagattatgaggagtggacaattgatttagccaagctccacatgggaatgccctttgcacagggcgcctttggaaagctctacaggggtacctacaatggggaagatgttgccattaagcttttggagaggccagaggctgatccagagagagctgggttaatggagcagcagtttgttcaagaagttatgatgcttgcaaccttgaggcaccagaatattgttaaatttattggagcatgcaggaagccagtggtttggtgcattgtgacggagtatgccaagggtggatcagttagacagtttctagcgaagaggcagaataggtcggttccactaaaactggcggttaagcaagcattggatgttgcaagggggatggcctatgttcatggtcttgggttcatccatagggatcttaagtcagataacctcttgatatctggtgataaatctatcaagatagctgactttggagtagctcgcattgaagtaaaaactgaggggatgacacctgaaacgggaacctaccgttggatggcaccagagatgattcagcataggccatatgaccagaaagttgatgtctacagctttggcattgtgctgtgggagctcataactggcatgctcccttttgctaacatgacagcagtgcaagctgcttttgctgtggtgaacaagggtgtccgcccagctataccccaggactgcctgcccaccctcggtgagatcatgaccaggtgctgggatccaaatcctgatgtccgtccgccgttcactgaagttgtgaggatgctggagcatgctgaggtggagatcctgagcactgtccgcaaggcccgatttcggtgttgcatctcccaaccgatgaccaccgactgaatcaaacagaagagagtcgaaaagaactccatgcaagcataattgagtaaatttatcttgtgtccagacttcgctcagctgaagtagaaagcacacctgagtggctgagtgtatggccgtgtgtgtgtatactcaggtgtaagcatattgtctttgaaatattcctgccattagaaatatacctagttcgcggtttcagactcttgagatgttttagggctagcctatgccctgacgaaacatcatgcaggcttcctattcttgtaatgtcgttgtggccctgctgctttgttcatgttataaccctcctactggattatgcaaacactttgttttgttgcttctgagtatata

SEQ ID NO: 101202 - DNA, 2359 bp, Zea Mays
ctctctcccccctcttcacgccacaggccacaccacgccacaggtgtccggatcaacgagcaagcaaccggggccgagagagacgagatgaggcctgcctcttctccctccgtcacacgcgagacggagacgcgtctgaagctgaggcctgtataaaagcgctaaagatccctcgctctcttcccccccgtgcgctgtgtcccgtctctgcgagcaagttctgtcttcgtccatccatccgtccccgtctcactgcctgtggcccgtgggtagcggttgtcgatcagcttacccacgccggcgtgttctccctgacatggtcggccggatggagcggcagaccgcgtcgtcgtcagcgtcatgctcccccgccgccgccgccaccacctcctcctcgtcctgcggcggcaagaagcggcctgatatcctcaacatgatccggaatgcatcctgtcttaattcgtcgtctgctgataccggcaagggaaggagtaaattgtcgaccaacaaagttacacatggattccacctggtggaaggcaagtccggccatgacatggaagactaccatgtggcagagtacaagtatgtgaagaatcatgagcttggtctctttgccatttttgatggccatttaggagataaggtgccaagttacttgaaagctaacctttttagcaacataatgaaagaggtaagtgttactattgtctttgtattctgtgttggagaccaaggaatcctttttagctttaccattcgcataccttccttatcgtttccctattctggttactgcagcctctcttctggtctagccctcaagaagcaataaagaatgcatactgctctacaaacaagtatattctagaaaataccaaacaacttggaccaggtggttcgacagcagttactgctattgtagttgatggtaaggacatgtggatagcaaatgtaggcgactctagagctgttgtgtgtgaaagaggctctgctaagcagctcactgttgaccatgagccccatgaaactaatgaaagacagaggattgaaaagcacggtggctttgtgacgacatttcctggtacaattttttcctgtgttactcgtttcatcattgttgtaaataataagatgcaattaccttattatgttctatggtttgtttgcaggtgatgttcctcgggtgaatggtcagctcgctgttgctagggcatttggtgaccaaagcctcaaggcccacttgagctctgaacctgatattagtcatgtaccaataaactcaagtatagagtttgtcatacttgccagtgatggattgtggaaggtttgtgccaactgtttccctcattaatcttgttcgttatcatgcttttgaaaaaaaagggtttgtactttggtttctatttaatcctgtacttccctagacctagattgaaatgcacttacttaggtttcgtttgaataatttctgcattatctgcgacctgttttctccctgcaataagcaggcaggaaaaggttgcacactatcaaatcaccagtctcccaaaaaaatatgtctaatgagaaattaaaatctggtcttgggtatttcgtctctgtttgagacactgttattaaaaatacgttagtaaaccagcttctaaaatctactttgcatttcctttctgatgaatacaggtaatgaagaaccaggaagccgtcgatctcgtgaagtcaatcaaggatccacaggcagcagcgaaacgattgaccactgaagcgttggcaaggaagagcaaggatgatatctcttgcattgtcatccgtttccgctgctgagttaccctctctccacggcactgatatccagtcttcacctcatgatttagattgagacaatttgtctttgccgaattttctgatagaatatgctgtacctatcatagctgtcgacaggcctggaactaattagggtagtgaagacttgagagctggttggtgagtgtgtgcagggtgcctattcgcctgtgcatatgttgactctgcatccgttgatccggacttgggcgactgtcaggaccttagtgcttgtgtgcttgtgatggtaatggacctaatggctaatggtggtaagggaacttgttgataccaaatttggttaatttagttttttttcatggctcgcatttcgtagggtagatgcatctgatttcaaggaaacatattattagttcaaagtgttatcgatgtttcttacgttggtattctattattgatgccttacttgtccgcttaactgtcagttcaattgacatcagttgtggcagttcaattgacatcaatttcatgttcagttgatcttttgaaaaactgc

SEQ ID NO: 101203 - DNA, 1697 bp, Zea Mays
ctctctcccccctcttcacgccacaggccacaccacgccacaggtgtccggatcaacgagcaagcaaccggggccgagagagacgagatgaggcctgcctcttctccctccgtcacacgcgagacggagacgcgtctgaagctgaggcctgtataaaagcgctaaagatccctcgctctcttcccccccgtgcgctgtgtcccgtctctgcgagcaagttctgtcttcgtccatccatccgtccccgtctcactgcctgtggcccgtgggtagcggttgtcgatcagcttacccacgccggcgtgttctccctgacatggtcggccggatggagcggcagaccgcgtcgtcgtcagcgtcatgctcccccgccgccgccgccaccacctcctcctcgtcctgcggcggcaagaagcggcctgatatcctcaacatgatccggaatgcatcctgtcttaattcgtcgtctgctgataccggcaagggaaggagtaaattgtcgaccaacaaagttacacatggattccacctggtggaaggcaagtccggccatgacatggaagactaccatgtggcagagtacaagtatgtgaagaatcatgagcttggtctctttgccatttttgatggccatttaggagataaggtgccaagttacttgaaagctaacctttttagcaacataatgaaagagcctctcttctggtctagccctcaagaagcaataaagaatgcatactgctctacaaacaagtatattctagaaaataccaaacaacttggaccaggtggttcgacagcagttactgctattgtagttgatggtaaggacatgtggatagcaaatgtaggcgactctagagctgttgtgtgtgaaagaggctctgctaagcagctcactgttgaccatgagccccatgaaactaatgaaagacagaggattgaaaagcacggtggctttgtgacgacatttcctggtgatgttcctcgggtgaatggtcagctcgctgttgctagggcatttggtgaccaaagcctcaaggcccacttgagctctgaacctgatattagtcatgtaccaataaactcaagtatagagtttgtcatacttgccagtgatggattgtggaaggtaatgaagaaccaggaagccgtcgatctcgtgaagtcaatcaaggatccacaggcagcagcgaaacgattgaccactgaagcgttggcaaggaagagcaaggatgatatctcttgcattgtcatccgtttccgctgctgagttaccctctctccacggcactgatatccagtcttcacctcatgatttagattgagacaatttgtctttgccgaattttctgatagaatatgctgtacctatcatagctgtcgacaggcctggaactaattagggtagtgaagacttgagagctggttggtgagtgtgtgcagggtgcctattcgcctgtgcatatgttgactctgcatccgttgatccggacttgggcgactgtcaggaccttagtgcttgtgtgcttgtgatggtaatggacctaatggctaatggtggtaagggaacttgttgataccaaatttggttaatttagttttttttcatggctcgcatttcgtagggtagatgcatctgatttcaaggaaacatattattagttcaaagtgttatcgatgtttcttacgttggt

SEQ ID NO: 101204 - DNA, 1753 bp, Zea Mays
tgctagtaagagctttggatgggaaaggcgtggtttatcaggcgcggaacgcgaaagaagtctcgatggagatgattaatatgcacgaaaagcagcagtttatggatgacaaaaaactaattgcaattatatctgaagcagggtcagctggtgtttctctccatgctgatagaagggcaaaaaaccagagaagaagagtacacataacacttgaactcccttggagtgcagatcgtgcaatacagcagtttgggaggacccatcgttctaatcaaacttctgcccctcaatataggcttctttttacaaatcttggtggtgaaaagcgatttgcatcaattgtggcaaaaaggctagagtctcttggtgctttaacacaaggagatcgcagggctgggccttctttgagtgcttttaactatgatagcaactatgggaaaaaggcattaaccatgatgtataggggaataatggaacaggattcttttccagttgttcctccggggtgttctgatgatgaaactagcatccaagaattcatcaatgaagcaaaagctgctctagtatcagttggaattattagggatgctttcatatgcaatggaaaagatccagggaagctttctggtcggattgtagattcagatatgcatgatgttgctcgttttctcaaccgccttttggggttgtctccaaacatccaaaacaggttgtttgatctttttacaagtatacttgatattgtccttcacaatgcaaggatagaagggcagctagattctggaattgttgatatcaaagctaagaatgttgaaatgacagaatcacctaggactgttcacactgatagcttgtctggtgctttgacggtactatttactttcaccattgaccggggagttacttgggagtcggcaaaaacgatgcttgaggaaagggagaaatttggtgctggtacttccattgatggcttttacgagtccagaagggaatggatggggagaaggcacttcattctatctttggaaggctcaactgaaggaatgtacaaaataatccggcctgctattggtgaagcattgagggagatgccttcaagtgaactgaaaagcaagtacaggaaggtgtcatcaatagacaaagttagtaaaggatggcaggaagagtacgatgcttcatcgaagcagtgtatgcatggatctaaatgtaaaattgggagctactgtactgtaggaagaaggttgcaagagcttaatatattgggtggcctcatacttccagtttggggtacaatagaaaaggccctggccaagcaggtttgcaatgggtgggacattgatgactgacatggaaaggcttgaattttgtttctcagctgcattcagtttgctgggctttttttaacttcgtggcactgttctgatattagatgcagcagcatctagggcacacttgattttgtttgtagggagatagcaaggtaacttacccgaagcgatgaaattcttagcttacaggtcaggcaggtatatgctgacaacttttgtatgtaaaatacgcggtgcggtgtggtgcggctgtaagacatgtaatgtaaagctactaaaaaagctcaggttaatctcaaaagaaagtcgcacctcacaatctggtgctgccacaatgataatgtttcatgtggagttactgcttatgtcggactgaactgcacaagaaaaactaaggcttatttatattatagccaaattatcta

SEQ ID NO: 101205 - DNA, 1865 bp, Zea Mays
tgctagtaagagctttggatgggaaaggcgtggtttatcaggcgcggaacgcgaaagaagtctcgatggagatgattaatatgcacgaaaagcagcagtttatggatgacaaaaaactaattgcaattatatctgaagcagggtcagctggtgtttctctccatgctgatagaagggcaaaaaaccagagaagaagagtacacataacacttgaactcccttggagtgcagatcgtgcaatacagcagtttgggaggacccatcgttctaatcaaacttctgcccctcaatataggcttctttttacaaatcttggtggtgaaaagcgatttgcatcaattgtggcaaaaaggctagagtctcttggtgctttaacacaaggagatcgcagggctgggccttctttgagtgcttttaactatgatagcaactatgggaaaaaggcattaaccatgatgtataggggaataatggaacaggattcttttccagttgttcctccggggtgttctgatgatgaaactagcatccaagaattcatcaatgaagcaaaagctgctctagtatcagttggaattattagggatgctttcatatgcaatggaaaagatccagggaagctttctggtcggattgtagattcagatatgcatgatgttgctcgttttctcaaccgccttttggggttgtctccaaacatccaaaacaggttgtttgatctttttacaagtatacttgatattgtccttcacaatgcaaggatagaagggcagctagattctggaattgttgatatcaaagctaagaatgttgaaatgacagaatcacctaggactgttcacactgatagcttgtctggtgctttgacggtactatttactttcaccattgaccggggagttacttgggagtcggcaaaaacgatgcttgaggaaagggagaaatttggtgctggtacttccattgatggcttttacgagtccagaagggaatggatggggagaaggcacttcattctatctttggaaggctcaactgaaggaatgtacaaaataatccggcctgctattggtgaagcattgagggagatgccttcaagtgaactgaaaagcaagtacaggaaggtgtcatcaatagacaaagttagtaaaggatggcaggaagagtacgatgcttcatcgaagcagtgtatgcatggatctaaatgtaaaattgggagctactgtactgtaggaagaaggttgcaagagcttaatatattgggtggcctcatacttccagtttggggtacaatagaaaaggccctggccaagcaggaacgcctcattcacaagagaatacgggttgtccgtttagtcacaacaaatgacagtcagcgaatcgttgggctgctgattccgaattcagcggtagagtcagtactaacaggtttgcaatgggtgggacattgatgactgacatggaaaggcttgaattttgtttctcagctgcattcagtttgctgggctttttttaacttcgtggcactgttctgatattagatgcagcagcatctagggcacacttgattttgtttgtagggagatagcaaggtaacttacccgaagcgatgaaattcttagcttacaggtcaggcaggtatatgctgacaacttttgtatgtaaaatacgcggtgcggtgtggtgcggctgtaagacatgtaatgtaaagctactaaaaaagctcaggttaatctcaaaagaaagtcgcacctcacaatctggtgctgccacaatgataatgtttcatgtggagttactgcttatgtcggactgaactgcacaagaaaaactaaggcttatttatattatagccaaattatcta

SEQ ID NO: 101206 - DNA, 91 bp, Zea Mays
atgtcgtttcacttcttcatatgttggtgtagaacatgaacatgaacatgaaagcaatgataagcaacatgatttgcgtataagatcttaa

SEQ ID NO: 101207 - DNA, 2536 bp, Zea Mays
atggccggggactcgtccccttccccggcctccgcacctgtccaggtgcgctgcgctggttgccgtagcatcctcgctgtcggcctcggtgtaactgaattcatctgccccaagtgccgcatggcgcagcgcctcccgccacagctcatggccaagtccacctcgccctcgtcgcctctgcccaaagccccctcgaagccttctctgcctcctacgcagccccggatgggtgcgccgtcggctcagggggtggaccccacgaagatccagctcccctgtgcgggctgccaggccgtcctcaacgtgccccacggtctcgcccgcttccgctgtccgcagtgtggcgtcgaccttgccgtggaccacgccaagctacaaaacttcctcgccgcctccaacagcgccacgtcatcaggccatgccccgacctcggtgaggacgcagccgcctctggcgacattcctctccgtgttgccgctgcagctagtgcctggtgcaacaatttccatggtgctgcctgccgctgaaccacatgaggagatcaatgaggttgccattgatgttgagcgtgatgaagatgaaggtggcactgttggagaaacttttactgactataggccttccaagctatcacttggtctatctcatccagatccagttgtagaaacttcttctctgtcagctgtacaacctcctgaaccaacttactgcttgaatatcatggacgaattagatgagacaaatgcattgtcttgtttgcaaattgaaacaatagtttatgcttgtcagaggcatcttcatcatctccctactggccatagagcaggttttttcattggtgatggggctggcgttggtaagggccgaacaattgctgggttaatctgggaaaattggcagcagggaaggcataaagcagtgtgggtatctgttggttctgacttaaagtatgatgctcgaagagatttggatgatgttggtgctaagtgtgtccaagtgcaccctttaaataagttaccttattctaagctagattcgaaggccattggaattaagaatggagtaatttttgtaacttatagtagcctaatagcatcgtctgagagaggccgctcccgtttgcagcaattggttcaatggtgtgggcaagagtttgatggtcttcttgtatttgatgagtgccacaaggccaaaaatctgattcctgatgccggaagccagcccactcgcactggtaaaacagttcttgagatccaggaaaagttgcacgaggctcgggttgtttactgttcagcaactggtgcatcagaaccacgaaatttgggctatatggttcgtcttggactttggggtgaaggaacatcatttcaaacttttccacaatttttaggtgctcttgagaaaggtggtgtgggagcacttgaacttgttgccatggacatgaaagctaggggtatgtatgtatgccgtacattaagttacaaaggggctgatttttatatagtggaggctccacttgaggaaagaatgatgaacatgtacagaagagcagctgaattctgggctgaactgcgccttgaacttttatcagcaagtgaattatttgctgatggcaattcaaatcaaatatggcgattgtattgggccagccatcagcgtttcttcaggcacatgtgcatgtctgcaaaggtacctgctgttgtgaggttagctaaagaggccttggcagagaacaaatgtgtggtgattggccttcagagcactggagaagctagaactgaagaagctgtcacaaaatatggagttgaaatggaagactttgtttctggccctcgggagcttcttcttaagttggtagaagaaaactaccctttacctccaaaacctgattcttttcagcaaggtgaagaaacagtcacagagattcagcgtaaacgtgcactggatgtatcatttaaagggcgagttaggaaagtagcgaaagtggtagatgtgagcgatgacgacaccgatgattattctccatctgagtcagatcatgaatcaacagaatctgatgaggagttccacatgtgtcaaatttgcaacacagaggaggagcagagcctgttgcttcattgttctggttgttctcggcatgttcaccctcattgtctaacaccaccatggactgggacgattacggatgattgggcatgctacacgtgcaagatagtagaagacgaggaaaagaagcaagatgcccatgtagctgattgtttaaagagaatttcactcctcatgtctatgaagagaataccatgctctggtggaaaagatgtagtgatcagttgcatggaattgccagaaaaggactaaactcgcttatcagtctcagcctctggatattgtggaaacactgaaacgtctgtgtttttgacggccttgctccctgccttaatgaagccatcaagagaactgacgaggaaagggacctgtgggtgttaggaggggctacaaacttagatctcttaacagccccatcccaggtcttagg

SEQ ID NO: 101208 - DNA, 1727 bp, Zea Mays
gttgctataagcacaagacagtcgatctctggttaattagcggttaatatgttacatattacaacgaactacaaaacgtttcgctcttttttttttgtaacatcggcaaataggtattagctgccgatgcaaaaaggtctatgtacacctggctagcagtaacccatcgcggcaaattgaacccaacctcgtactaatacagcttgtttctaatcatctacgcgacctctcggagccgtctcgtctcgtgtcaccgggcgctgcggcggtcggtccacctacgccacctcggccggcggcggcatgttgaggtcgaaccccacgccgaccgctggggaggcgtccaccacggatgacgacgacccggtgtcgctctgctcctcttcacggcaggatgccgcagcatgcttgttggcaccggcggcgaccgcggtcggccggtagggcacgggcgccggcacggccacggtcaccgcgagcctcgggtccaggaagaggaacggctgggcggccaccatggccggtgtgccgcctaggctgaggtcgagcgacggggcctgctgggacggagacgcgggcctgggcggcgtggcgggcgagtcccgggaggaggaggaggaggactccacggtgctgctgctgctggggctcacggtcacggcggccggcttcttgggcggcggcggcggcggaagcgcggcgaacgcgacggggaagttggtcttggccttgggcccgcggaagtggagcgcggcggcgtcgtaggcgcgcgccgcggcctcggcggtgtcgaaggtgccgagccacacgcgcgccttcctggccgggtcccggatctccgccgcgaacctgccccacgggcgcttccggacgccgcggaacctcggctccatcaccatgccgttggccacggcgctggcggcggggagagcgttcctgggcgccatggaaggaggcgagcgtgtgacgttacggccaggcggtggtggtggtggttgtgctgatgggcagggcttgagtgcggggaggaaagggaggtgggtgcgcggtattaataggggaggcgggaggtgaggaggaggcagtagggatgaaaacggtcggtaaacaccaaaaccattaccgttttcattttttttttatcggaaacaaaatcgaaaacggtaattccggaaacggaaacgatatcggtatttcggaaacatcggaaacgaaagttcggtgcggaaaatacaccggtaacggtcgaaatctaaaatacgatcggtaaacatatcaaacttcacaataaagcaaaattgataaaacatcacaaataccacaagttcacaattcatgatataacaagttcacaatataacaagttcacaaggatcacaaatttataatataaaaagtttacaaagatcacaagttcataatataacaagttgacattataacaagttcataaagatcacaagttcacatactcaaagttcacaattcacaatatccactcgatttagttgacatgacatgcttactcatgaaatatttttttctcacataaagggttttttgacagcctaacaggaaaaccctaaaatctagtgtgtggaaaagacagacggtcggctctctatcattatatattactaatacataacatgtgcatagaaaatggtggattcgttcgagagacaaaatcgttaatctcaactgccttccaacaccatctaaccccc

SEQ ID NO: 101209 - DNA, 1035 bp, Zea Mays
cttatgattcgcaccctgagcatagccaagcagtgcacccattgaccatccaattaaaccatactgcatttggaattgatatccacagctttctggcagcttgagcttatggcagttgaaccaagaatcatcggtctcagccatcacgacactattaactgtcatcatcttctggatgtatttgaagagcacattgactcgcagtggctcattcggctcgctctccagcgcctgcccttcaggtacaaagttcctcttgtagttctcatacgtagtggtgttctttttaaccttcttagcaatttcagtccagtactccttcatcatcaaacatctgaatgacaacccatttcccactcccacacgctcaggctggacaatgatggccttggccttcttgaggaggaatgagtaaccgacggagctgtagtccttgaaaatggagcctgcaaagatataggcatctgcagactcaacaatctcagtacagaaggcggtgctgacgacgcccctgtaggtgccgatgaagtggaggtgcgtctctgccacaagacccttagcagatggcatcactgcataggacctgacacaaacttgtaccggatgcatatgaattttccctgctgccgagctggcagctgagctcactgccacaatggcgggcggtggtgagggtgtccaggtcgggcgcgctccccgccagaccgatccgctccagttgcaggcccttgataatggagtgcacagctgggacatcgttgacagcgtgggtcctgatgcacttggaggtggcgcgctcgaggtcgatgacgagcagggactgggggatctcctccgacgcctcggtgaagatccagctccgtgagctgtccatcaggctgtgtgcgtcaggtccgccgctcgtctaggcgattccgatgacgccccgcaaggacggcgtctgcacggagcgatggacgcgtgtgtgcagccacgacatggaggtggtcggctggtgggtgtcacaggcggagatcctggcgcaccgcgcgatgg

SEQ ID NO: 101210 - DNA, 207 bp, Zea Mays
agcatcgactgcgacaagtgggacgagacggctggactgccgtgacggcggacggcagctcggcggcgcagttcgagcacacggtagtacttactggtcacccggaccggagccgagatacgagatcctcacgaaacgaaaccctaggagaagtcgtctgaccgttgccacggaccggatggttgaggtggtcgattgtgtcgcttg

SEQ ID NO: 101211 - DNA, 1868 bp, Zea Mays
ctcgaaactagccgttgtacctgtctctcccgaaaatccatcccgcttcccctcgtgacgggggtaggccccttctccgctcccacttctccactccgacccgatctctccggcatggccgccgccgcagcagcagccccgccgtcggagtgcgcggacctgatgcctccaccgcctactgcgccccgtccccgccgccgcgcaagggaagtcagctcccgatacctctcgacgcccgtccccccgaccccgcgcctctccaccgtgtccgcggcctcctccacgcggtcgcgctccccgacaccttcccctcgtggtcggcagcggatggccacgccctttgccaacgagaaccacccgcctcctcctcccaagggcaccgtcgcgcgccggcgggccgtgcagaagcttttcgacgagacgggcgccggcaacccgcgcgcctcggtgggctccaactccgccgatgtcctcgaagctactccgcggcctctcctgcgctccaccagagggccggtcgcgcccaccgcgcggagggggtacccgcgccttccgacgcccgcgcgtgccggctcctgccctacttccgccgcggtggaatccgacgcctcctcgtgctgcttttcgtctgatacgtcgtccacgtccactgacttctctgaggccgatggggcgctcgggatggccccagccgcgccgtgcgagagcccgacgctgctgggcccagcgtcctgccgcgggggacgcctctcgtcagagctccgctcgtcggtgccggagtcgggcgggtcctcgcgggcgtccaacccactatgctaccgctcgctcaactcggcactgtcgatctcgatggcgatggccgggaaaccgactccggcagggaggccaccacaaccgcaagggccgaaggcaactgatctgaagaaggcggcgaccgtagggggcaggaaggccgtggggaagcaagaagacgtgcaccagctgcggctgatggacaattcgtacctccagtacaggttgctcaacgcccgggctgaggctgcaggcaaggccaaggcagctgctgctgagaaatccctctacgggctagaggagaagattgccagcctcagtgtgtctgttgctgagaagagggtagaggtgcaatggatgcgaagggagaatagattgagttcagtagtaaatgcgcagatatcatgtttgaaccaatggagcgatgttgaggggagttacgcaagctgccttagaggagcaacaagggcactgtataacggctcgctaaggctaccaatcattgggagtgtagatgtcaactgcgaggaacttacagaggtcctaaaatcagctacacaactgcttgaaccgcttacatcttgcatcgacaatttcctgccaaaggtcgaacaaatcgacgatgtggcatgtaatcttgcccaagttattgctacggaaaagaccttgatagaggagtgtggtaatcttctataccatgcgcagaacctgcagatgagggagagcagtttgtggagtcaagcgatgcaactgaaacaaaatgaagcgaagtaacagaaggcagaggggcaaacacgctgccatggtcgtttgttcaactgagggagctaactgagctccaccgttgtctgcccaagtggacagaggctgcctgatgccctgatcgatgatacatcaccgaaggcagaagtgggtcctgtgaatcaagagttgcggattcttttcccagtacatatgtatatgttcggtaatttgccgtgtaagcatttttgctgtttagctattgaaaaaaacagacacgagcatcgttcttacgaatgcaaatttgttgattctttgcagtacgtgtgttgccc

SEQ ID NO: 101212 - DNA, 152 bp, Zea Mays
ttttttctttcgaggttgttttcaaaattcaaattttaaattttttaaattcaggcataattttcgttgacaatatgacttcaaatgaaaaagttgtcaactacaaacttttataacttttcaagatctacaaagtttattttggttgtttg

SEQ ID NO: 101213 - DNA, 3203 bp, Zea Mays
ccaacagagccgtggctccttctcgctcgctctctttctctcgcgactcccaccgccgcctggcgccgccacactcggccgcactgctcgcctgcccgttcggttgcgccgctcacccgcccgctcagctgcgtcgtcgctgaccgccccgctcggacactccacgtccatcccccgtcggtccgtcgcggcgccgccacaactgctttgcgaatcggcgacctgttgccggcgacaggacgcgggaaggcagccagccatccagcctcttcctacgtctgaatctgagagacgttggctgagatccatctatcttgccgtttcctggcggtgagcaacgctagcgcgcatgtcgtcgcggctgtgcgtgaagaacctgcccaagggcgccgacgagaggcggctgcgggatgtgttctcgcggaagggcgaggtcaccgacgccaaggtcatccgaacaaaggatggcaagagtcggcagtttgcattcattggttacagaaccaatgaagaggcagatgaggcactcaagtatttcaacaatacatacatcgacacttgtaagatcacctgcgaggttgcccgaaaaattggtgaccctgatgctcctcgcccttggagccgccattctttaaagaagtctgaatatggtagtaaagacaagaataatgctggagctgttgatgcaccacctaaaggttccaacgcacaaggaacatcggctcatgctagtggttctaaaggcagtgtagctaatgatcccaagtttctagagttccttgaagctatgcagccccgttctaaagccaagatgtgggcaaatgatacagctgctactcttgacactgctgcaaaagatagtgtagtagccgctaaagaatctaagggacctctaaaaaatgttctgacctctgagaacgattcatcttctgaagacacttctgatgagaaagtggcaaatgatttgtcttccgaaaatgcttcggagcagctaaagacagagaataaacaagacaagaatatgactgatgcagatttcttcaagagtaaagtcaagaaaaattggtcagattctgaatctgatgacgaaggttctgctcaccagtcaaataccaccactgatgatgaagactcgtcagatgaatcacaagattcagataaccagttggcagatactaagggcgatcctgacaagagaaacattgtggacaaggacactcttgtggagaatactgacttgcaagagccggaggatcttgacaacaaagagagtgaagatcttgatggcagaccaagaggaactgaaattcatgaagatcaagaaagggcagatgaaaacggtgctccaattactgatgaaaagaagttggccctggagactggtcgtctatatatctgcaaccttccatatgcaaccagcgaagatgatttagtggagctgtgccgccaatatggtgatgtggaacaggcacatattgttgtcaataaagccacaaagatctcaactggtagaggctatgtgctttttagccttccggactcagcagtcagggcacttgatgaactagataactcaagctttcagggacgagtgttacgtgttaaggctgctaaaccgctaaataagttggagtcttttcatgaaactgctgtggagaaagtaagtctcaagcagaaaaggttggaacaaaagaaagcttctgagatcagtggggatacaagagcatggaacagcttttatatgcgtcaagatactgttgttgaaaacattgcaaggaagaatggtatcagtaagagtgagttactcgatagagaagcagatgatcttgctgttcgtattgctcttggtgagacacacgtcattgcagagactaagaaatttctatcaaggtctggagttaatgttgctgcattggaagaacatgcttctaaacgaaatgagaagttcaaaagaagcaattatgtgatattagtaaagaacttgccatttaattctactgaggaagaactcgcgacactgtttcagaaacatggtagtttggataaaatcattctacctccaacgagagtgtttgccttggtagtctttgttgaagcaactgaagcccaatacgcattcaaaaaactactatatacacgatataaggatactcctctgtatttggagtgggcacctgaaaacatattgtctcctacctcagcaccggtggatgaggaagtaaaaaacgaagttggcgagcgtattcttactaaagctaatatagatcaaactgtagaaggagtaagcgctgaagagattgatccagatagagtggagtcacgatctgtgtttgtcaagaacttaaatttcaagacaacagatgaatcattgaagcagcatttcagtacaaagctaaagagtggcagtcttaaaagtgcaacggtgaagaagcatgttaagaagggcaagaatgtttcaatgggatttggttttgttgagtttgactctgttgaaactgctaccggtgtgtgcaaggatctacagggaacggttctggatggacatgctttgatcttgcaactgtgtcatgtgaagaaagatggtcaagcggcaaagaagaatggcaaggataaaagttcaacaaaactgctcgtgcgaaatgtagcatttgaagcaactgagaaggacttgaggcagttatttagtccgtttggccagatcaaaagcctcaggttgcctatgaagtttggtagccacagaggttttgcgtttgtggaatacgtcacaaaacaagaggcccagaacgctctacaagccctcgcaagcactcatctctatggtcgacacctggtgattgagcgagcaaaggaaggagagactctcgaagaactgcgggagagaactgccgcacagtttgtggacgaaagcagcggtttccagagcttgtccagtaagaggaaacggagcattctcgtggacgaaggctccgttaaagtttcaagaatagcagagtgattatcttgagcgagcacctgaaatttttgaccaatgttatgcaatagtaccagttcgttagggggggaaatgggttatcttaggttgtttaatgtttgtgtgctgttttagagctgaggaaaagaaatgctgaaaagaatctcacatcttaatgcaagagctgtctaaatgcaagcatatttctacagcctaagacaccaaaaagaaa

SEQ ID NO: 101214 - DNA, 1727 bp, Zea Mays
caccaccgcggccgatccatcccttttgcctctttccgctgcgtccgcccggctttccgtagtttccccggcgcgtgctttggagatccatggcatgcatggccgatccacaccgctgttccagcagctgcgctcctttaacctcgcgaaagctagccatgcatataatggcccgccccactgctagctgcctgcttctgcagtgcacagccgcacagggaggacgacagccgggggcagccatggcgcccaaggacagagtgcctctcgtcagtgccgggctcgcggtggcgtcgctgctgctgctcctgctttgcgccactcggtgcgaagcgagggccatggcggcgacggcgaggcgactgagcagcagcagcagcagcccgctgctcaacgcgctgttcaagctcaacttcatccggacggtggagccagcgcgccgcattccgaccgccggcgacgaggaagccgcgagcgacatcaactcgccgttctgcgtcaacccaccggacgcgccgtcggccacgacgccgccgttcaagcccttcacgccttcgttcccgggccaggcgccacagctgccgccgatcacccccgtgccgccgtccttcgagcccagcccgccggcgccggagaatggcgcctcgggtggaggccagggtggcggtcaaggccagggtggagatcaaggacagggaggcggtggagatcaaggccagggcggaggtcaaagccagggtggagatcaaggacagggcggagggggtggagatcaaggccagggcggaggtcaaagccagggtggagatcaaggccagggcggaggtcaaggccagggaggtagtcaaggccagggtggaggtggtggagatcaaggccaggaaggcccaccggcatccacgacgccgaactcgccgccacaggtcggtccggggggcataccattcggatcggtgccgccgagccccatcgtcgtggtgccgagcccaccaggatccggccctgatcccggctccggcttaggaggcggcggctcgggttccgacggcggtccgttccagccgccgatcatatacccacctccgctggcgccgccgctgccgccgggcgcggggcagacgttgtggtgcgtggccaagcccacggtgccggaccccatcatccaggaggccatggactacgcgtgcggcgccggcgccgggtgcgactccatcctgcccagcggctcgtgctaccgccccaacaccgtgctcgcgcacgcctccttcgcgttcaacagctactggcagcaggccaaggcgaccggcggcacctgcgactttggcggcaccgccaccatcgtcaccagagacccaagatgttgcaactgggggtatcgatacaaatgcagtaatctttgatcggtcatctggtcaaatcttgtgcacgcttactggtcactcaaagaagataaccactttgaagtttgttccacgggatcaactctttgtaactggatcagcagataaggcaatttccatttaccataggtttaagtaaccactggaataatatggggatgcgagggattgctcgtggttttgctcgtgcatctctagcgtagtccgcatctcgtgctactacctacctgtttctgttgatgcatctctatgtgattgtaacaaccaagaagcatatgtggcctctatttaatccaccataaaagaagtatttggcgcgttggccct

SEQ ID NO: 101215 - DNA, 1574 bp, Zea Mays
caccaccgcggccgatccatcccttttgcctctttccgctgcgtccgcccggctttccgtagtttccccggcgcgtgctttggagatccatggcatgcatggccgatccacaccgctgttccagcagctgcgctcctttaacctcgcgaaagctagccatgcatataatggcccgccccactgctagctgcctgcttctgcagtgcacagccgcacagggaggacgacagccgggggcagccatggcgcccaaggacagagtgcctctcgtcagtgccgggctcgcggtggcgtcgctgctgctgctcctgctttgcgccactcggtgcgaagcgagggccatggcggcgacggcgaggcgactgagcagcagcagcagcagcccgctgctcaacgcgctgttcaagctcaacttcatccggacggtggagccagcgcgccgcattccgaccgccggcgacgaggaagccgcgagcgacatcaactcgccgttctgcgtcaacccaccggacgcgccgtcggccacgacgccgccgttcaagcccttcacgccttcgttcccgggccaggcgccacagctgccgccgatcacccccgtgccgccgtccttcgagcccagcccgccggcgccggagaatggcgcctcgggtggaggccagggtggcggtcaaggccagggtggagatcaaggacagggaggcggtggagatcaaggccagggcggaggtcaaagccagggtggagatcaaggacagggcggagggggtggagatcaaggccagggcggaggtcaaagccagggtggagatcaaggccagggcggaggtcaaggccagggaggtagtcaaggccagggtggaggtggtggagatcaaggccaggaaggcccaccggcatccacgacgccgaactcgccgccacaggtcggtccggggggcataccattcggatcggtgccgccgagccccatcgtcgtggtgccgagcccaccaggatccggccctgatcccggctccggcttaggaggcggcggctcgggttccgacggcggtccgttccagccgccgatcatatacccacctccgctggcgccgccgctgccgccgggcgcggggcagacgttgtggtgcgtggccaagcccacggtgccggaccccatcatccaggaggccatggactacgcgtgcggcgccggcgccgggtgcgactccatcctgcccagcggctcgtgctaccgccccaacaccgtgctcgcgcacgcctccttcgcgttcaacagctactggcagcaggccaaggcgaccggcggcacctgcgactttggcggcaccgccaccatcgtcaccagagacccaagctacgaggagtgcaagtttgatcttatgtgaggatggaagatacgtagatatgcagaacagactgtagaccccgtcccagttcatttgggggggtatcattcctcttgcttctaggccacgtcactccagattttgtaactagctcttcttcactagtattgttttgaattttgtaagaccaatcaggttccttaaaacctgaagccatttcgagct

SEQ ID NO: 101216 - DNA, 612 bp, Zea Mays
ggtgatgcataatggtgtacctctattttcctattattgcaggacgcaaaagatcctgaaactcttgcgaatctaattgtatgtaatctccacttaggcaaaccatcatcacgatacctcagctgaagctatcgcatcctgaccatgtgctagttaagaatgcggcagcatcagaagcgaccttcgagagggccctccaagccgttgcttgagctcgacacaccccacccagccagattgcaggaatcagcacattctggtctcttctccaattacgagtgtattaacccagagtatggtggttttggttgcctgtatcgtcgctgttaatgcgactccgccagtcttgtactacaaactgctgtataaacggatatgtcgaatattgaatccttacatctgttgccaataccagtattttgttatgtgatactgtggcatatcgatgcaatactgacaagtagcaacccttgtgggcgaccttcgtagaaccatacgtataagcagcgtgaccgtgtctttctggacctcacaatggtttcctcgtgtgtgctttcggaaacggaattctgacgtttttcgtggtggcacactggcactgtgctcttgctg

SEQ ID NO: 101217 - DNA, 1525 bp, Zea Mays
cccaactagaacccaattacaagtataactccattcccctccgtcctcccgcatcaactcgaaccgaagggacgaccgagcggagtctagactcgagagcaacctcgacctcccggatctctctcccacccacgcctcgtcggcgccgtcgtctgctgcagcgatggcctcccccgacctgctcttcaatctgcggaacctcttctacctgggcgcctaccaggcagccatcaacaacagcgacgtcccgggcctcgacgccgacgccgccgctgagcgcgacgccatcgtcttccgctcctacatcgccctcggctcctaccagctggtgatcagcgagatcgactcgtcagccgctacctcgctgcaggccgtgaagctgctcgcgctgtacctcactggagacaaggaaggtgctatctccagtctcaaggaatggttgagtgattcagcaattggaagcaatcctgttctgcggttgattgctggaattgtatttatgcatgagcaggactacaatgaggctctcaagcacacacactctggaggaactctggatttgcatgcattgaatgtccagatcttcatcaagatgcatcgttcagactatgctgagaagcaattgaagatcatgcaacaaattgatgaagaccatacacttacacaacttgcaaacgcatggctgggcattgctgttgtgagtaatttcacagtccaatgttgtgacatactgaagtttcatctctgcattggtccagaaacatgtgctttgacatcatatttaatgggttgcagggtggctctaagatccgtgaagcttatctcatattccaagactttgctgaaaagtacccaatgacagggatggttttaaacgggaaggcagtctgctgtatgcacatgggaagctttgaggaggctgagactctgttgcttgaagcgttgaacaaggacgcaaaagatcctgaaactcttgcgaatctaattgtatgtaatctccacttaggcaaaccatcatcacgatacctcagccagctgaagctatcgcatcctgaccatgtgctagttaagaatgcggcagcatcagaagcgaccttcgagagggccctccaagccgttgcttgagctcgacacaccccacccagccagattgcaggaatcagcacattctggtctcttctccaattacgagtgtattaacccagagtatggtggttttggttgcctgtatcgtcgctgttaatgcgactccgccagtcttgtactacaaactgctgtataaacggatatgtcgaatattgaatccttacatctgttgccaataccagtattttgttatgtgatactgtggcatatcgatgcaatactgacaagtagcaacccttgtgggcgaccttcgtagaaccatacgtataagcagcgtgaccgtgtctttctggacctcacaatggtttcctcgtgtgtgctttcggaaacggaattctgacgtttttcgtggtggcacactggcactgtgctcttgctg

SEQ ID NO: 101218 - DNA, 1427 bp, Zea Mays
cccaactagaacccaattacaagtataactccattcccctccgtcctcccgcatcaactcgaaccgaagggacgaccgagcggagtctagactcgagagcaacctcgacctcccggatctctctcccacccacgcctcgtcggcgccgtcgtctgctgcagcgatggcctcccccgacctgctcttcaatctgcggaacctcttctacctgggcgcctaccaggcagccatcaacaacagcgacgtcccgggcctcgacgccgacgccgccgctgagcgcgacgccatcgtcttccgctcctacatcgccctcggctcctaccagctggtgatcagcgagatcgactcgtcagccgctacctcgctgcaggccgtgaagctgctcgcgctgtacctcactggagacaaggttagtgctatctccagtctcaaggaatggttgagtgattcagcaattggaagcaatcctgttctgcggttgattgctggaattgtatttatgcatgagcaggactacaatgaggctctcaagcacacacactctggaggaactctggatttgcatgcattgaatgtccagatcttcatcaagatgcatcgttcagactatgctgagaagcaattgaagatcatgcaacaaattgatgaagaccatacacttacacaacttgcaaacgcatggctgggcattgctgttggtggctctaagatccgtgaagcttatctcatattccaagactttgctgaaaagtacccaatgacagggatggttttaaacgggaaggcagtctgctgtatgcacatgggaagctttgaggaggctgagactctgttgcttgaagcgttgaacaaggacgcaaaagatcctgaaactcttgcgaatctaattgtatgtaatctccacttaggcaaaccatcatcacgatacctcagccagctgaagctatcgcatcctgaccatgtgctagttaagaatgcggcagcatcagaagcgaccttcgagagggccctccaagccgttgcttgagctcgacacaccccacccagccagattgcaggaatcagcacattctggtctcttctccaattacgagtgtattaacccagagtatggtggttttggttgcctgtatcgtcgctgttaatgcgactccgccagtcttgtactacaaactgctgtataaacggatatgtcgaatattgaatccttacatctgttgccaataccagtattttgttatgtgatactgtggcatatcgatgcaatactgacaagtagcaacccttgtgggcgaccttcgtagaaccatacgtataagcagcgtgaccgtgtctttctggacctcacaatggtttcctcgtgtgtgctttcggaaacggaattctgacgtttttcgtggtggcacactggcactgtgctcttgctg

SEQ ID NO: 101219 - DNA, 1506 bp, Zea Mays
tgagaggaagcacgtagcacgatatcaagctttggacccacataggacgcactcaaggctcaattatgcccatcgaaggcccaactagaacccaattacaagtataactccattcccctccgtcctcccgcatcaactcgaaccgaagggacgaccgagcggagtctagactcgagagcaacctcgacctcccggatctctctcccacccacgcctcgtcggcgccgtcgtctgctgcagcgatggcctcccccgacctgctcttcaatctgcggaacctcttctacctgggcgcctaccaggcagccatcaacaacagcgacgtcccgggcctcgacgccgacgccgccgctgagcgcgacgccatcgtcttccgctcctacatcgccctcggctcctaccagctggtgatcagcgagatcgactcgtcagccgctacctcgctgcaggccgtgaagctgctcgcgctgtacctcactggagacaaggaaggtgctatctccagtctcaaggaatggttgagtgattcagcaattggaagcaatcctgttctgcggttgattgctggaattgtatttatgcatgagcaggactacaatgaggctctcaagcacacacactctggaggaactctggatttgcatgcattgaatgtccagatcttcatcaagatgcatcgttcagactatgctgagaagcaattgaagatcatgcaacaaattgatgaagaccatacacttacacaacttgcaaacgcatggctgggcattgctgttggtggctctaagatccgtgaagcttatctcatattccaagactttgctgaaaagtacccaatgacagggatggttttaaacgggaaggcagtctgctgtatgcacatgggaagctttgaggaggctgagactctgttgcttgaagcgttgaacaaggacgcaaaagatcctgaaactcttgcgaatctaattgtatgtaatctccacttaggcaaaccatcatcacgatacctcagccagctgaagctatcgcatcctgaccatgtgctagttaagaatgcggcagcatcagaagcgaccttcgagagggccctccaagccgttgcttgagctcgacacaccccacccagccagattgcaggaatcagcacattctggtctcttctccaattacgagtgtattaacccagagtatggtggttttggttgcctgtatcgtcgctgttaatgcgactccgccagtcttgtactacaaactgctgtataaacggatatgtcgaatattgaatccttacatctgttgccaataccagtattttgttatgtgatactgtggcatatcgatgcaatactgacaagtagcaacccttgtgggcgaccttcgtagaaccatacgtataagcagcgtgaccgtgtctttctggacctcacaatggtttcctcgtgtgtgctttcggaaacggaattctgacgtttttcgtggtggcacactggcactgtgctcttgctg

SEQ ID NO: 101220 - DNA, 1571 bp, Zea Mays
cattcgcgcgtggttgagaggaagcacgtagcacgatatcaagctttggacccacataggacgcactcaaggctcaattatgcccatcgaaggcccaactagaacccaattacaagtataactccattcccctccgtcctcccgcatcaactcgaaccgaagggacgaccgagcggagtctagactcgagagcaacctcgacctcccggatctctctcccacccacgcctcgtcggcgccgtcgtctgctgcagcgatggcctcccccgacctgctcttcaatctgcggaacctcttctacctgggcgcctaccaggcagccatcaacaacagcgacgtcccgggcctcgacgccgacgccgccgctgagcgcgacgccatcgtcttccgctcctacatcgccctcggctcctaccagctggtgatcagcgagatcgactcgtcagccgctacctcgctgcaggccgtgaagctgctcgcgctgtacctcactggagacaaggaaggtgctatctccagtctcaaggaatggttgagtgattcagcaattggaagcaatcctgttctgcggttgattgctggaattgtatttatgcatgagcaggactacaatgaggctctcaagcacacacactctggaggaactctggatttgcatgcattgaatgtccagatcttcatcaagatgcatcgttcagactatgctgagaagcaattgaagatcatgcaacaaattgatgaagaccatacacttacacaacttgcaaacgcatggctgggcattgctgttggtggctctaagatccgtgaagcttatctcatattccaagactttgctgaaaagtacccaatgacagggatggttttaaacgggaaggcagtctgctgtatgcacatgggaagctttgaggaggctgagactctgttgcttgaagcgttgaacaaggacgcaaaagatcctgaaactcttgcgaatctaattgtatgtaatctccacttaggcaaaccatcatcacgatacctcaggtggtgcgacgtgctgggagtaggaggaccacagtgagattgttgtgactaccagctgaagctatcgcatcctgaccatgtgctagttaagaatgcggcagcatcagaagcgaccttcgagagggccctccaagccgttgcttgagctcgacacaccccacccagccagattgcaggaatcagcacattctggtctcttctccaattacgagtgtattaacccagagtatggtggttttggttgcctgtatcgtcgctgttaatgcgactccgccagtcttgtactacaaactgctgtataaacggatatgtcgaatattgaatccttacatctgttgccaataccagtattttgttatgtgatactgtggcatatcgatgcaatactgacaagtagcaacccttgtgggcgaccttcgtagaaccatacgtataagcagcgtgaccgtgtctttctggacctcacaatggtttcctcgtgtgtgctttcggaaacggaattctgacgtttttcgtggtggcacactggcactgtgctcttgctg

SEQ ID NO: 101221 - DNA, 1415 bp, Zea Mays
ccacgtcggaccagtgtgactcagagcaacgatctttcctccacaggcttcgctgcagctttcagagccactcaaatcctcttcctcttctctacacacacgaacccacgaacgcaggctcccgagaacgcagcccccattggatttggaagcttctccatgggacaccgagcctcgtagacgaagcagaggggaccagagaaaccgaggagcaagaagcagggagccatggcgttcctcctgcccaagctcacaacgccgtcctgcaagttgcccccgagccccctcctcaagccccagctcgtcccgccgggccacggcggcggcaagatccaaggctcctccgtctccggctctggcgcggcgcaggtcgcggccccgggccacctcagcctcctgctcctgctcagcgcctcgcagcaggcggccggccccgcggccaagtcgacggcgaccaagaaccggggcaagggcggcggggatccgcaaaggtcggatttttacctcaacctcggcaccgcggtgcgcacgctgcgggacgacctgcccgacgtcttcgtccgggaatccaactacgatatctaccgtgaagacatcacatttgtcgacccactaaacactttccacggcattgacaactacaagaccatcttctgggcactcagatttcacgggcgcctgctgttcagagaaatcgggctcgatgtatcacgcatctggcagctgacagagaactcgatcgttgtccggtgggagctgtggggcactccccgtgtcccatgggagtcatacggctgcttcagcgggacgtcgaggtacaaggtcgacaggaacgggaaaatctacgagcacagagtcgacaacttggcgctggacttcccacgatcagtagccagagtgggcagcatcgctgacatggtagtcgccacgccgagccccaatttgacgttttggaatgcggttgtgacaggcgatggttgctcgtggacaaagctttatgaagccgtggtggaagctgtggaacgggaagagcatagttccactggcattggccctgttggctgcagcttcggttgcggctgtggctgcagtttttgaaatgcaaactgctgtagcttgagctgcttgttcataggatggaacgagctccagggctagttgtttggttgttcctaggggaaatgtatagatcaatatatatgggcacacgaatcacggtatactgatatctctttgtatactgtagctataggacagcaaatttagataaaacacgtactagatggctatatttgattacccttgtgaccttgtgttatacagggccacaggggtagtgctttcactgctttctttcatatgcgatacacagatcttttgggtgtggtttgcccaatattagacacagtttagga

SEQ ID NO: 101222 - DNA, 2256 bp, Zea Mays
acaacacaagccttgtggtgcgtgcctgaacctcaagtctgcagatttgaccactgcagccgtggagcagagcggcctgaattcttcttctgaagttccaccgcaaattaatccaggagagtgtgagactgactgacacacatgcacagggatcacgccaggtatataaacgcgcaggcggccggccggcccacccaccggcgacggcgatccgagaacaaaccgtcgtccgagttggcatctttggccaaacccagtatcattgcccaatcacagatctcctccccccgagaccccccctctctttctaatccctctttcttcccctctctctctctctctctctctctctctctctctctctctctctctctctctctctctctcccgcattacccactacctgcttctgctgcttgcttgtgcggtggacgctgcggtgcgggcggtgcggagcggagaggtgaaagaaggggatgaaggaggagatggtggtcggcctgtcggcgccggggccggtggggaggtggggcgccgcgccgccgcaggcgatgctggagaggatgaaggactacggccaggagggcgccttcgcgctctgggacgatctctcgcccgaggaccgagagctcctcgtccgggacatcgagagtctagacctttcaaggatcgatcggatcatccggcgctcccttggatcgcaaggcatcccgttgcctgccgtcgagcccgtgccggaatctagtgtatccaaggtggaggacaggtctcctgaggacaaggaaagatggtggaagaaggggctcaaagccatctctgaggggaagctggctgttgtccttttggctggtggtcagggtactcgtctgggaagctcagatcctaagggatgtttcaatattggacttccatctggaaagtcacttttccaactccaagctgaacggatcttgtgcgttcagaagctggctgctcaatccagtgaaagcccgagtaacactgtgctgatccactggtatataatgacaagccccttcacagatgcttccactcgcaaattcttcgaaacccgtagatactttggcctagaccctgaccaagtgacatttttccaacaaggcacacttccatgcgtctctgccgatggtagatttattatggagacaccatatagggtagcgaaggctcctgacggcaacggtggagtttatgctgcgctgaagtccaagaagctgatggaagacatggctgcgcggggagtgaaatacgtagactgctacggagtcgacaacgcgctggttcgagttgcggatcctacgttcttagggtacttcatcgacaagggtgtgtcttctgccgccaaggtggtgaggaaggcttacccgcaagagaatgtcggggtgtttgttcaacgaggccgcggtggacctctctccgtggttgagtacagcgaaatggacgcagctatgactactgagatcaatcagtcgacagggcgactccgttactgctggagcaacatctgcctgcacatgttcactctggacttcttgaaccaagtggcgaacagcctcgagaaggacagtgtataccatctagctgagaagaagatcccttccatccatgggttcacaacgggcctgaagctggaacagtttatattcgacgccttcacttactccccatccacagagcttttcgaggtcatgcgggaggaggaattcgcgccggtaaagaacgccaacggcgcgacatacgacacccccgatagcgcgaagctcatgctgctccgcctccacagcagatgggtggtcgccgccggtggcttcttgacgcactccgtgcccttgtatatgacaggcgtcgaagtttccccgctttcctcctacgccggagagaacctggaagcgatctgccgcgggcgaacgttccatgcacccagcgagatatcgttttaggatatcgttttgtgtaactgtggactgaacggaaagggttgcaagattgtgcatgtttacttcgaggcgtgagatgggtgtcgggttgatgtgttgcttgtattctctgagtgttgtgatgtagcatctccaactccaaattcatctcgagttttctcccccatctccttggactactgccatttttaatgacaatgggtcaggttcggatcaggctccgtgtactcgcggatacattttttacatgtgcaattgtttatcttttaagaagcacaactttttttcaatcaaacacgaa

SEQ ID NO: 101223 - DNA, 1272 bp, Zea Mays
aaacactctagctaatagtttagctattagctatttttagtaaattagttaatagttagctagctaatttcactatcaatttttagctaactagcacctctaaagtttggctaccatgacatctcacagcgctgaagtccaagaagctgatggaagacatggctgcgcggggagtgaaatacgtagactgctacggagtcgacaacgcgctggttcgagttgcggatcctacgttcttagggtacttcatcgacaagggtgtgtcttctgccgccaaggtggtgaggaaggcttacccgcaagagaatgtcggggtgtttgttcaacgaggccgcggtggacctctctccgtggttgagtacagcgaaatggacgcagctatgactactgagatcaatcagtcgacagggcgactccgttactgctggagcaacgtatggtttctgtcctccacttgtcgttcccttccgccctacctccctccctccaaactgtaacagctgcatattttctcctctctctctctcgttttccccctcccctagatctgcctgcacatgttcactctggacttcttgaaccaagtggcgaacagcctcgagaaggacagtgtataccatctagctgagaagaagatcccttccatccatgggttcacaacgggcctgaagctggaacagtttatattcgacgccttcacttactccccatccacagagcttttcgaggtcatgcgggaggaggaattcgcgccggtaaagaacgccaacggcgcgacatacgacacccccgatagcgcgaagctcatgctgctccgcctccacagcagatgggtggtcgccgccggtggcttcttgacgcactccgtgcccttgtatatgacaggcgtcgaagtttccccgctttcctcctacgccggagagaacctggaagcgatctgccgcgggcgaacgttccatgcacccagcgagatatcgttttaggatatcgttttgtgtaactgtggactgaacggaaagggttgcaagattgtgcatgtttacttcgaggcgtgagatgggtgtcgggttgatgtgttgcttgtattctctgagtgttgtgatgtagcatctccaactccaaattcatctcgagttttctcccccatctccttggactactgccatttttaatgacaatgggtcaggttcggatcaggctccgtgtactcgcggatacattttttacatgtgcaattgtttatcttttaagaagcacaactttttttcaatc

SEQ ID NO: 101224 - DNA, 1161 bp, Zea Mays
aaacactctagctaatagtttagctattagctatttttagtaaattagttaatagttagctagctaatttcactatcaatttttagctaactagcacctctaaagtttggctaccatgacatctcacagcgctgaagtccaagaagctgatggaagacatggctgcgcggggagtgaaatacgtagactgctacggagtcgacaacgcgctggttcgagttgcggatcctacgttcttagggtacttcatcgacaagggtgtgtcttctgccgccaaggtggtgaggaaggcttacccgcaagagaatgtcggggtgtttgttcaacgaggccgcggtggacctctctccgtggttgagtacagcgaaatggacgcagctatgactactgagatcaatcagtcgacagggcgactccgttactgctggagcaacatctgcctgcacatgttcactctggacttcttgaaccaagtggcgaacagcctcgagaaggacagtgtataccatctagctgagaagaagatcccttccatccatgggttcacaacgggcctgaagctggaacagtttatattcgacgccttcacttactccccatccacagagcttttcgaggtcatgcgggaggaggaattcgcgccggtaaagaacgccaacggcgcgacatacgacacccccgatagcgcgaagctcatgctgctccgcctccacagcagatgggtggtcgccgccggtggcttcttgacgcactccgtgcccttgtatatgacaggcgtcgaagtttccccgctttcctcctacgccggagagaacctggaagcgatctgccgcgggcgaacgttccatgcacccagcgagatatcgttttaggatatcgttttgtgtaactgtggactgaacggaaagggttgcaagattgtgcatgtttacttcgaggcgtgagatgggtgtcgggttgatgtgttgcttgtattctctgagtgttgtgatgtagcatctccaactccaaattcatctcgagttttctcccccatctccttggactactgccatttttaatgacaatgggtcaggttcggatcaggctccgtgtactcgcggatacattttttacatgtgcaattgtttatcttttaagaagcacaactttttttcaatc

SEQ ID NO: 101225 - DNA, 1874 bp, Zea Mays
ctctctctctctctctctctctctctctctctctctctctctctctctcccgcattacccactacctgcttctgctgcttgcttgtgcggtggacgctgcggtgcgggcggtgcggagcggagaggtgaaagaaggggatgaaggaggagatggtggtcggcctgtcggcgccggggccggtggggaggtggggcgccgcgccgccgcaggcgatgctggagaggatgaaggactacggccaggagggcgccttcgcgctctgggacgatctctcgcccgaggaccgagagctcctcgtccgggacatcgagagtctagacctttcaaggatcgatcggatcatccggcgctcccttggatcgcaaggcatcccgttgcctgccgtcgagcccgtgccggaatctagtgtatccaaggtggaggacaggtctcctgaggacaaggaaagatggtggaagaaggggctcaaagccatctctgaggggaagctggctgttgtccttttggctggtggtcaggtactctgaattttgggaagtttctgctgcaatatatacatgggtactcgtctgggaagctcagatcctaagggatgtttcaatattggacttccatctggaaagtcacttttccaactccaagctgaacggatcttgtgcgttcagaagctggctgctcaatccagtgaaagcccgagtaacactgtgctgatccactggtatataatgacaagccccttcacagatgcttccactcgcaaattcttcgaaacccgtagatactttggcctagaccctgaccaagtgacatttttccaacaaggcacacttccatgcgtctctgccgatggtagatttattatggagacaccatatagggtagcgaaggctcctgacggcaacggtggagtttatgctgcgctgaagtccaagaagctgatggaagacatggctgcgcggggagtgaaatacgtagactgctacggagtcgacaacgcgctggttcgagttgcggatcctacgttcttagggtacttcatcgacaagggtgtgtcttctgccgccaaggtggtgaggaaggcttacccgcaagagaatgtcggggtgtttgttcaacgaggccgcggtggacctctctccgtggttgagtacagcgaaatggacgcagctatgactactgagatcaatcagtcgacagggcgactccgttactgctggagcaacatctgcctgcacatgttcactctggacttcttgaaccaagtggcgaacagcctcgagaaggacagtgtataccatctagctgagaagaagatcccttccatccatgggttcacaacgggcctgaagctggaacagtttatattcgacgccttcacttactccccatccacagagcttttcgaggtcatgcgggaggaggaattcgcgccggtaaagaacgccaacggcgcgacatacgacacccccgatagcgcgaagctcatgctgctccgcctccacagcagatgggtggtcgccgccggtggcttcttgacgcactccgtgcccttgtatatgacaggcgtcgaagtttccccgctttcctcctacgccggagagaacctggaagcgatctgccgcgggcgaacgttccatgcacccagcgagatatcgttttaggatatcgttttgtgtaactgtggactgaacggaaagggttgcaagattgtgcatgtttacttcgaggcgtgagatgggtgtcgggttgatgtgttgcttgtattctctgagtgttgtgatgtagcatctccaactccaaattcatctcgagttttctcccccatctccttggactactgccatttttaatgacaatgggtcaggttcggatc

SEQ ID NO: 101226 - DNA, 3056 bp, Zea Mays
cgcacgcagagagagagataggacagtgtcacagtcggcatatgacaccacgcccacgcagcacctcatcgtatgattgatgattctgaggagagcggacaaaagtcgcgggctcgcggcggcatcagcaccagggcgctggccacaggtaaaagaaagctgcggccttttctgctactcctgcctgccagcggcctgcctgcctgcctactagtgcggcgtggaggtggagcagtgggcgctacagcctccatcagctagctgccttgccgtgtcctcctcttcctcctgtcggtggcgatctctgcggaaacccgagcttcgtccaagccgggcagtagtgcgcgccgcctgggcgtaattatggattcttttgagggctctgatcatataactcaaagaaaggttgttcctgcaaaacatattgcattggtatgtagatttgaaggttgatggaaagaatgagcctgctgtagaggggttgcctaatggttggctgaaagaatgcaggcctagaaagaaccgatatggatccagagtcaagagtgacacgttctatattgatccaatcaatggatacgaatttcactctctcaaggatgtacaccgctatcttgaatctggagacatcagtaaatgtattagattgccaaacaagagaaaaattgaggacctgcatactaaagaggaccaatctcatcatgtaagtttcatcttcaagttttggcccacatctgaatttgccctcgatcttgtgttagctgctacattggattgacaattggattcaaatcaacaaggagttaattcttaaggtagtatgattctttttaaggcaaaggtttatgaatttcatttgaactattttaccatccccccgagaagtactaagaggttacacaaattgtaatttgggagataccaaatccctagttgtaattttggtctttccccaaggactgtaaaaagcctcatttctggtctcatttcttctttaaatgaactgcggcgattctcttgtcgccctttcggaaaaaaatatctactattataaagcaccaatttttctggtttccacactcgtcacttttgtaaaaaaaacccttatatttcatagcacgggcaaaccatcctttcccatccttatgtgcaaaaaaaaacctatatgcacctgaacacaagcactgttcttgatagacacttgttcggagtctatccaatgcgtatttgcaatgcacctccgttatagttgacgtaagatgcatcttgtattgatgtaggctgtcatgctgaattatgatgcatttttatattctaactgagtgaactggaaggaattcttttcttgttgttattgctctttcagaaatacccaaactgttgatttgttttgtaaaatccagacaggaaaactatcagatcatacccagctggatactgctgatgagtctaatcgatatgatctaccggaaggtaccaatgcactgggatatgctctgcaaaatccagaaagcggagagaataatgaaaacattgcactgtccaagcctgacaatataagctcaatccaaattgaagctggtcaggttgaagctacagaagataagagcatccaatcaggctctatagaatacactccaggggaagctaaatctgtcactaggaaaggaatagatgtgaaggagaaaccgaaggggaaaaagtacaaaactaaacatgccaaagggattgctatacctcttagatcgtcacctcgtttagctgcactgaagattagccaggaagcaaataatgcaaccagagatggacatattggcacacagacagacaccaataacgtgccagaaccaaagcaagtcgaaaaacccaggcgaaagacgaattcttctgtaattcctgagaggaaagatggggaacctaccaggagttgtgcagaaacccttccttcacttcccaatcagatacagggagcatcattcccacagtcttcaggagatgctggatgccaggatgcaccagccgaggcacctgttctgcgacaacaagcaggagcaggacaaggcgaaacatctgatggtttgcctggatctgccctgacgtcgctgtttcaacatgtctggtcagacccgtgccttgtgttcgcgttcaggactctcctgggtgatatccctgttcttgatgacgctcgagcatatcggtcttcggcttatgatggtaacagagactactaccttccaccacagaacatgaataaaaatgctgcagccaactggtccgctctggcttatgatagtaacagaaaccacgcgcaagtcgaccatgttatgccgaggacatcagatacgttctacagcagtggttggttccctccccagtgaattcaatctaggaaatatgaaagcaatttcttacctggcaaaggacaaatcagaagcaaggatgcatgttgcaagcaagactgcagctcgttgtaattgtgtagacgatccataactaatagtctaatgtagctatcacatgctaccgtgcgccatcagcatcagtctaattcacaggaagctgtctggtggtagacttggcaatactttctgttgtttgtgtttttgtagtaccaacttgatcatgcattcacttgttgcattgttacgtgttagagcagcctcaatagtcaatatcccaggaagtgatctgggctgtactttgtctatgagcatccacttgtgtattactacttgtaacttggtagactttcaacgtgcatcgtggcatcggactaagttgtaccaatgtgtttgtttcgaaataaggtagtccatcatctttctactcctcacttttttatttggtttataaaataaaataagtcgatcatgttagagccccgtttagggttttagtgctagccctttgtaattaccgttatacccttgtgtaatggtgcatccccagtcagtcgcagatcccctttctgagattaattagtgtaagttatcctatagatactgtattcatgcctgttcgaaatgtgaattatagtattttttgtgagaatggaa

SEQ ID NO: 101227 - DNA, 2110 bp, Zea Mays
cgcacgcagagagagagataggacagtgtcacagtcggcatatgacaccacgcccacgcagcacctcatcgtatgattgatgattctgaggagagcggacaaaagtcgcgggctcgcggcggcatcagcaccagggcgctggccacaggtaaaagaaagctgcggccttttctgctactcctgcctgccagcggcctgcctgcctgcctactagtgcggcgtggaggtggagcagtgggcgctacagcctccatcagctagctgccttgccgtgtcctcctcttcctcctgtcggtggcgatctctgcggaaacccgagcttcgtccaagccgggcagtagtgcgcgccgcctgggcgtaattatggattcttttgagggctctgatcatataactcaaagaaaggttgttcctgcaaaacatattgcattggttgatggaaagaatgagcctgctgtagaggggttgcctaatggttggctgaaagaatgcaggcctagaaagaaccgatatggatccagagtcaagagtgacacgttctatattgatccaatcaatggatacgaatttcactctctcaaggatgtacaccgctatcttgaatctggagacatcagtaaatgtattagattgccaaacaagagaaaaattgaggacctgcatactaaagaggaccaatctcatcatacaggaaaactatcagatcatacccagctggatactgctgatgagtctaatcgatatgatctaccggaaggtaccaatgcactgggatatgctctgcaaaatccagaaagcggagagaataatgaaaacattgcactgtccaagcctgacaatataagctcaatccaaattgaagctggtcaggttgaagctacagaagataagagcatccaatcaggctctatagaatacactccaggggaagctaaatctgtcactaggaaaggaatagatgtgaaggagaaaccgaaggggaaaaagtacaaaactaaacatgccaaagggattgctatacctcttagatcgtcacctcgtttagctgcactgaagattagccaggaagcaaataatgcaaccagagatggacatattggcacacagacagacaccaataacgtgccagaaccaaagcaagtcgaaaaacccaggcgaaagacgaattcttctgtaattcctgagaggaaagatggggaacctaccaggagttgtgcagaaacccttccttcacttcccaatcagatacagggagcatcattcccacagtcttcaggagatgctggatgccaggatgcaccagccgaggcacctgttctgcgacaacaagcaggagcaggacaaggcgaaacatctgatggtttgcctggatctgccctgacgtcgctgtttcaacatgtctggtcagacccgtgccttgtgttcgcgttcaggactctcctgggtgatatccctgttcttgatgacgctcgagcatatcggtcttcggcttatgatggtaacagagactactaccttccaccacagaacatgaataaaaatgctgcagccaactggtccgctctggcttatgatagtaacagaaaccacgcgcaagtcgaccatgttatgccgaggacatcagatacgttctacagcagtggttggttccctccccagtgaattcaatctaggaaatatgaaagcaatttcttacctggcaaaggacaaatcagaagcaaggatgcatgttgcaagcaagactgcagctcgttgtaattgtgtagacgatccataactaatagtctaatgtagctatcacatgctaccgtgcgccatcagcatcagtctaattcacaggaagctgtctggtggtagacttggcaatactttctgttgtttgtgtttttgtagtaccaacttgatcatgcattcacttgttgcattgttacgtgttagagcagcctcaatagtcaatatcccaggaagtgatctgggctgtactttgtctatgagcatccacttgtgtattactacttgtaacttggtagactttcaacgtgcatcgtggcatcggactaagttgtaccaatgtgtttgtttcgaaataaggtagtccatcatctttcta

SEQ ID NO: 101228 - DNA, 1062 bp, Zea Mays
cgcacgcagagagagagataggacagtgtcacagtcggcatatgacaccacgcccacgcagcacctcatcgtatgattgatgattctgaggagagcggacaaaagtcgcgggctcgcggcggcatcagcaccagggcgctggccacaggtaaaagaaagctgcggccttttctgctactcctgcctgccagcggcctgcctgcctgcctactagtgcggcgtggaggtggagcagtgggcgctacagcctccatcagctagctgccttgccgtgtcctcctcttcctcctgtcggtggcgatctctgcggaaacccgagcttcgtccaagccgggcagtagtgcgcgccgcctgggcgtaattatggattcttttgagggctctgatcatataactcaaagaaaggttgttcctgcaaaacatattgcattggtatgtagatttgaaggttgatggaaagaatgagcctgctgtagaggggttgcctaatggttggctgaaagaatgcaggcctagaaagaaccgatatggatccagagtcaagagtgacacgttctatattgatccaatcaatggatacgaatttcactctctcaaggatgtacaccgctatcttgaatctggagacatcagtaaatgtattagattgccaaacaagagaaaaattgaggacctgcatactaaagaggaccaatctcatcatgtaagtttcatcttcaagttttggcccacatctgaatttgccctcgatcttgtgttagctgctacattggattgacaattggattcaaatcaacaaggagttaattcttaaggtagtatgattctttttaaggcaaaggtttatgaatttcatttgaactattttaccatccccccgagaagtactaagaggttacacaaattgtaatttgggagataccaaatccctagttgtaattttggtctttccccaaggactgtaaaaagcctcatttctggtctcatttcttctttaaatgaactgcggcgattctcttgtcgccctttcggaaaaaaatatctactattataaagcaccaa

SEQ ID NO: 101229 - DNA, 2137 bp, Zea Mays
gccctcgtcctcccctattgtctgtaagtagtggcaaacctggctgcaatcattcataaccgaattcttcgtgggggcgccccacctgcctgcctgcctgcctccgctcctcgcagtgcctagacatctgctgcttctgctcctggcactagttcctgccttcttttgctccgctcggttggttattgctgctctgctgctgcgtcctcctgcagtctccacctcaacttctccgccttcctccttttcctcctccccctcctcgcgcagctctcgtgcttcgcctgttcgttcggggacggtcgtgcgtggcgccagcggcgtcggagttcgatttccggtgagcgcttttcgcaggaaaggttgggtcttgtcggttgggattactcgaccgtcgctacgggaaaccgtgccccatctctgcagcggattgatttctgtccgtgctgcgaggttggtgtggtggtttgtctgtgcttccactgtcggaccgaagattccgtcatcgtttcgtgcagtaaccggagcggtgtttagtggggagaagatttggctggaaggcttggtgcttgcaaataaacaccacacaagaatcgaatgcgccgcaccagtgccgattgacgagattcgagtctggatttcgagcgtgatatggtttcatcaggcacctttggactctaaataccggttccaaggacaaggttttccattcgaagaactgtcgctgagggaagaagaaggaaaagaagaagaggtcaatggcatcgctgtcagaaagtgagctgacaaaccggggaaccatgtgggagctagatcagaaccttgatcaacccatggatgaggaggcgggcaggctgaagaatatgtacagagaaaagaagttctcatcagctttgttactacggctggcatttcagagccttggggtggtctttggtgacttgggcacgtcacctttgtatgtgttctataatatatttcctcgcggaataggtgagggcgaggatgaggatgttattggagctctttccttgattatttacaccctcactctcataccgcttctcaagtatgtttttgttgtcttgagggcaaatgacaatggtcaaggtggtacatttgctctttattccctattatgccgtcacgcaaagatcaacaccatacctaatcaacacaggaccgacgaggaattgacgacgtatagtcggcaaacctatgaagagaattcagttgcagcgaaaataaagagatggatagagtcacatgcatataagagaaacattcttcttattcttgttttaattggtacttgtacagcaattggagatggaatccttacgcccgctatatctgttctttctgcatcaggtggcattaaggtccagaaccagaacatgagtactgatgtcgttgtgctcgtcgctgtggtcatcttaatcggattgtttagcatgcagcactacggaacagacaaagtgggatggctcttcgcgccaatagtcctcctctggttcatcctgattggaagcgtcggggctataaacatacacaagtatgatagctctgtgctaaaagcatacaacccgatgtatatataccgttttttccgacggagaaagaattctgacgtctggacgtctctgggaggaatcatgcttagcatcacgggaactgaagcattgtttgctgatctctgtcactttcctgtgctggcaattcagatcgctttcaccttgattgtgtttccatgccttctactggcgtacacagggcaggccgcctacataatttccaacaaaacacatgtggctgacgccttctaccgatcaattccagctgccatatactggccggcctttatcatagcaactgctgcagcgattgttgccagtcaagccaccatatccgcaacctactcgatcataaagcaggctcttgcgctgggttgcttcccccgcgtgaagatcgtccacacctcgaagaaattccttggacagatctacatccctgacatcaactggatccttctggttctctgcattgctgtgactgctggattcaagaaccaaagccagataggaaacgcatacggtaaggtttcctctgagaactaaaatacatagttttctctctc

SEQ ID NO: 101230 - DNA, 560 bp, Zea Mays
atccgccatcgggcctcgtcgatcgccgcctcctgctcggcttcttcccacctgcggttgcaccgatcacccagggagggacagggcagctcgccggtccaactccgacgaccggccggccatgagctaccaggctcctcctcccggcaccgcagcctacccgccgccaggccagcaggcgtacccgccgcctgcctacggtgcgccgccacccatggccgccggcgggtacccgcccccgccgcctccgcagccgcaggactccaagcgcagcaacgacggcttcttgaaaggatgcttggccgcgctctgctgctgctgcatgctcgacatgtgcttctgagactgagttgccgtcagggatggggtggcgctggcgccgcgtccagatccatcctgcagtcgcggcgaatgcatgaggatgttttcggagtcatcactagtcatgaactcacgatgatacatctgtttttttttctcccattccgtgtatgttctccagttctatgaatttcactagttaggccagaacagaaccagcagggattatttttctggca

SEQ ID NO: 101231 - DNA, 1493 bp, Zea Mays
ttcacggctcacatgacgctgcacccgaccgtgttgtcgtcgttgaagaagtcctcgtcgaagcgggacggctgcggccggacctgcgggtggtgccgctgggccacccccacccccatcgccatcgccacgggcaccggcggcggcatgccgtagtagccgtagtacggcaccgccgcggccggcggcgcgtagtacgccggcacgtgcaccggcaccaccgtcggcggctccgcgcggtggtagtgctgctgcacctgcgcctgcgcgtggcggtgatcggcggccaccgccacgggcggcttggtgtcgaactcgtcggcgtcgccgccttcctcgcctgtccagccggcggtgccgtccttgggcgacggcgccttcttcccgctgccgcggtcgccatcgacaccgccaccgccctcggcgcgcgaggccgcctcgccggcgcacttcttgcatccctcctgctcgctcggcgccgccgccgccgccgccttgtcaccggcgtcgcccttgcccttgcgcttctcctccacctgcgcctgcgccgccctgtcgccgtcgtcccgcttcttgcattgttcgaaagccgccggcgccggaggcagcggctcggcgatcttgccgaccctggccagcttcttcacgaggaccttgacgtccacgtcgccaacgacggtcacccggtcgtgcgacggctggatctccgtccgcagcacgcctgcacgcccattgacgcgcgcacacgtacgtatgtcagcaccaggcttgtctcactcagcgaaagagcaaagcagagcagagcagagcaccaggcttgtaatcctgggccggtagagagcgaagaagaaggatggtgacctttgaggctcatcgccttcatcaccttcctcctgcagccgtcgcagcagctcacgttcaccttcaggtcaatcctctgcacggaacggcacgatgtcagtactcagtagtagtccatcaatacttcaatagcaggcaatacgagcatgcccccgccggccgagcaaggtaagctttggtacgaaccttgagctcttcttccctagccatggcgatgatggctacggcgctggagctcgccggagagactggctctgcgtgggagctggctgctggctgctgaccagctgactgctgctgctgagtgtgtgtgtgatgcctatcgcccgttgctgccgtccatttatatatacggccacataggcagctttattagcaaactgatggaccattagatacccaaacgtccacggtccgttgctcgattccgagctgtgtgcagttacgttattttaatcacactagcttaagggagaagaggtatatagtgggacaactcaaactcgtgtactcgaagacttgcagttgtggttgcaacctctctctgcttgcgccagcatcatggattcgtaggttgttatgtgatgatgtgttctttggccactaaaaaaatgatactccaacaaacaaga

SEQ ID NO: 101232 - DNA, 207 bp, Zea Mays
atctgtagagtgcacatttctaaagtagttgtacctgttgtgttgtaatgtaactgcattgggaactaaaaaatgggggctggattctggaagcctatctatgcttgtgaagggagaactgaacgctcttgggtgctgcagcacgggctgatggctggttgagcatatgaatcttctctcaggaagagattccttctttctttattt

SEQ ID NO: 101233 - DNA, 782 bp, Zea Mays
ctaagcatagctgctaggtccgccaatgacgtcagctgatgcttttatcacgcagggacattatgtgcttggccacaatttcgggccaggtagctcacataaccttcacgacaatctgaaccagttcgatcaggcttcctcggctcctaccttgcaacaacagccgtttaccgggaatggtcaactgacccagggatatcctggtgatatgcatgcgttgcagtttgtggagccaaccccccagattgaccatcagaatggcgatgagggtcagtcgtcaataccagtgtgggattttctttgagctgcctgcctctggcactttgccatcctcccctccacgcgagaggccgcgtttcaccctagttgaaagggcatgtggctcgcgagaagagagattcagatataccggaccgtggttacctattaattagttgtgcatcccaaaagggcattcgtttttatttgtgtcgatatagtactccatccgtttctttttattagtcgctggatagtgcaaaattgcactatccagtgactaataaaaagaaacggagggagtacgtatctgtaaatactagtttagtctgctttgctcgcccggtagatggaaggcattgtaaagtttagaaattacaaagttttgtacctaggagtacaaggtttataatgtgatcattgcatgaagtttctaagttcattttttttgtctaggagtagaacgtttggaacgtgctaagcacaaagcacaaaattatttaacttagagtccatagtttttg

SEQ ID NO: 101234 - DNA, 3179 bp, Zea Mays
tactttaatttccactcctattcttcatgtcttccccgatgccggggaccaccgccagcgccaccaagagttgatccacccaggccaggcacccgcccgtcccccggcggcggagatggcgaggaacgagacggcggccgcggccgcgccgggcgtcgacttccaccttcccgacgagatcctggccgtgatccccaccgacccgtacgagcagctggacgtggcgcgcaagatcacctccatggccatcgcctcccgcgtctcccgcctcgaggccgacgctgcgcgcctccgccgtgacctcgccgaccgtgaccgcgccgaggccgacctccgcgcctgcctcgccgactccgacgcgcgccttgccaccgctctcgacgagaacgcgaagctggcgaaggaaagggactcgctcgcggcgacggtcaaaaagctgaccaggaatttggcgaagttggaggcttttaagaaacaattgatgaaatcattgagtgaagataatctattgcaactgtctgaaaccagtcaagatcacaacgcagaagatttgacagctcgagtcccattttggaaagatgaagtttcgagcagtaacacttcttcagatgcctccagcagatctacaattactgaatccgtccatgacggaggataccagttctcgatcacaccatatatgcctccaaaattaactcctggctcaacaactatgatttcgtcctctagtggttctccccgagcttattcaactggcccaccctctcccaagttcttatctggtccgacttcacctgcaaaagctcgatctgagggccaattggcattttcatcatggcaaggatcatcaagtcatcagtattcagcacctacctctcctccccaacgccgctcattcacagggcgaccacgtatagatgggaaggaattcttccgacaagcacggacaagactttcgtatgagcaatttggagcatttttggccaatatcaaggagttcaatgctcagaaacaatcacgggaggacaccctgtcaaaagcagaagagatttttggaacagaacacaatgatctgtacatttctttccagaatatgcttaaccgaaactaatcatgaaaatttgtcagaagtagtattttctctcaaaatcaagcagggtagattctgttggaataaacgatgcccttccgtaggttctcaagatcacattgtagagatatgtatataggccaccttaattcgaggtgttccttctcaataatttggagctgtgacttaaaagcggaaatcgcatagcatacattcactcattccctgaaattcaaggcttcctgcttgtctttctgctgtaaatccggatgcagatctcttgagctattaaggtgccttccctagttccctttgtagaaagctgtataaaactgccctttgccgttcttctaactgccaagggtacacggaatggatatatgatcacggtgcattcgttgtattgagatgttcgataaactgtgattgtgattttttattgagctttttcttccaaggctgtgaattttgatataaactacagaagaaaaaaatgaaaagcaagaaatagagaagacagaaaagttccaacacgaaactctcgctggcagatgggtcccacgtaatttccccttaaggactgatttagtagacccacatgtcatgcacacatctttccgcttatccctcaggtttcgtcttccctatcccagcactggtccaccaccatggccaccccatccaccgccggcgaccctgcccctgccggcgaaccagtaccaaccccattgcaaggaccagcccagcgtcgcatctcaacatcccgcatctcccacatcgtgcgcacctacctagacctctccagttccaggaagcgccgttccgctcctaagaaccagcccaaggccggggacaaggaaagggatgcggcggccgccgaaactgacgggtccaaggcggggccgtcctcgtcccacccgtctcggctgctccgggagctgggcatccgcgtctcccgctacacgcatgaggagcgccgggatatcatcctccgctacatgcagaagcggagcggtcgccagatcgtcaaccgcgcggccagtaaggtcccatcgaggcaggctctggcagtcaggcggcggaggggtgctggagggaagttcctcggcaaggatgacgcccagattacagataagctagaagaaaaggcagaagaagagccagaattgccaccagaagtcgtctcaaatgctggaggagtacccatagttggtatggtctttgagagtgaagaaaaagcatatgagtattatgttagttatgcaggaaacatgggatttagtgttcgaaaaggatggtgggagaaaactgctaaaaattccaacaggtcaagggtctatgtctgttccagggagggatttcgctcaaagaatgacaccaagaaacctcgctcagagacaagggtgggttgccccgcacggatagcaattaaggtggcacgtggtggtaaatatcgtgtaacagaatttgtggaggatcataatcaccagcttgctgcaccatttgatattgagatgctgaaatcacaaaggatgttgaccaaagttcgacttgggagccaaaatgctagtaacatccctccagggtacaagaattatctccggtccaagtctacaaaagatatgaaaccaggggatctcagaactctgatggattattttcggagaatgaagagtgacaatccatcgttttactatgccattcaagtggatgaaaatgacaaagcagctaatgtcttctgggcggatgcaaagtcaatcatggactatcattacttctgtgatgtagtctgcttagacatgatccacaaaacaaatgattgcagcaggcctttagctttgtttctaggtatgaaccatcatcgccaaatgaccatatttggtgctgcttttttatacgatgaatctgttgagtctttcaagtggcttcttgaaacctttaagagtgccatgtgtgggaaacacccaaagacaattttgactgatggatcttcagctttgaaggaagccctgggtcttacttggcctggtactgttcaccggtcctgtgtggtcaaatataccagagcactgttaagtcattggcacat

SEQ ID NO: 101235 - DNA, 3189 bp, Zea Mays
atggagagtgcttttaagcaaatgaaaggggaatttgttggtttgctaattagaagggaggttatgcagggcaggttctcctcatttctgcttttttgggtcgaaccacgtggagtaatacctctggagctcagtggctgcatcagccaggtgtggtcgccatggttcaaaggcgacccgtgcgtcggcgcggccacggacggcacgtccatctacgccgacaaaatgaacccgggcatcaagtgcgactgctccgaccacaacaacaccatctgccacattaccgagctgaaaatgaacaaactggatgtggttggtcctatacctgaggagctgaggaacctcagccacttgacaactctgaatttacaacagaattacttaacagggcctttgccatcgttccttggagaattaactgctttgcagcagatgtcgctttctggcaatgcattatcaggaactattccaaaggagctggggaaccttgtgaatctcataatcctgagtttaggcacgaacaatttaactggctcccttccttctgaattgggtaacctggttaaactagagcatatgtacattgatagtgctggcttaagtggtcctataccatcatcattttcgaaacttacacgattgaaaacattgtgcgcatcagataatgactttactgggaaaataccagattacattggaagctggagtaatttaacagatttgcggtttcaaggcaattcattccaaggtccacttccaagcactcttgctaatcttgttcagctaacaagcttaattttaaggaattgcaggatatttggtactttggcattagtgaacttttcaaaatttacaggattaacattattggatttgagttttaataatatcataggtgaagtaccacaagctctactaaatatgaattcactcaccttgttagacttttcctacaactacctctcaggaaaccttccttcttgggctagtcataatttgcaatttgtcttacctgcggggctggagtgccttcagcgaaacacgtcatgctttcttggctctccacaatcttcctcctttactgtagactgtgggagtagtagatctgtatttgcttcagataattccatgtatcaacctgatgatgccaatcttggtgttgcatcatattatatttcaagcccaccaagatggggtgttagtaatgtcgggagattcatggatacatcaaacgggagttacatagtcaacagttcacgccggtttcagaataccctagattccaaacttttccaaacagcaaggatgtcagcatcaactttaagatactatggttttggacttgaaaatggggactacacagtcacacttcaatttggagaatttgactttgaagatttacaaacttggaagagcgttgggagaagggttttcgatatctatctccagggtgagcgtaaggagcagaactttaacataaagaaggcagcaaaagaagctggcgaagcaagcacatcgtacactgctgtcaagaaacaatatactgtacctgtcacaaaaaacatcctagaaattcatctcttttgggctggaaagggcacttgttgcatccctaatcaaggcgattatgggcctacaatatcagctttgagtgcaactctaaatacaaaaaagaagggtaataaaataggtgtaattattggagtcgtgattggtgcaacagttttaggactagcaatacttgctacactctgtgtgtggaggcacaaaaggagaaaagtatcactagagcagcaagagctctacaatattgttcgaatacctaatgtattctgttacacttatggtgaactaaggaccgctactgaaaattttagttctgctaatcttcttggtgaagggggatatggatcagtttataagggtaaattagttgatggcagtgtggtggcaattaaacaactatctgaaacatctcgccaagggaagaaggaattcgtagctgaaatagaaactatttcccgagtgcagcaccgtaatcttgtgaagttgtttggtttttgccttgagggaaataaaccacttttggtttatgagtacatggagagtggaagccttgataaagcattgtttggaaatggaagattgaacttgaattggtcaacacgatataaaatatgcttggggattgcaagaggcttagcttatctccacgaagagtctagcatccgcattgtgcatagggacataaaggccagcaatgtattacttgatgccactttgaaccctaagatttcggatttcgggctcgccaaactttatgacgataaaaagacacatgttagcacaaaagttgctggtacatttggctatctttcacctgagtacgccatgagaggtcacatgactgagaaagttgatatttttgcttttggtgtggtcatgttggagattattgctggaaggccgaactatgatggtaagcttgaccaagacatggcttatcttttagaatgggtctggcaactttacgaggaagaccatccgctggacattgcggatcccaagctcacagaattcgatagtgtcgagttgctccgtgccatccgcatcgccctcctctgcatccagagctcacctcgtcaaaggccatccatgtcgagagtggtgtcaatgctcacaggagacagcgaggcgcctgaggcagtgtccaagcctagctatgttgccgaatggcagagcaacactgaagggacgtcaagctcagtgtccacagcagaggctgtgtccgtggctccattcctaaaccccgttgtggacgatggccggtgatgatggccatcgctaagatcatcttatgtcaagcactcaagccacagattgttttcttggagatccacctttaaaggccccattatttaggttgaatgtggatgacagatttatgttgttgactggatgagatgtcctagggtttcctcacgttgtagaatacaactctcacaagtataagaatctaggaacatattccttcgatgtaacatacctcttttgtttaatctgttttgtaagagaaaccagaagaacaccttgtatttcggttgatattttgaaacccacagccaattgaatgctgggtgtgtaggcatatatatgaccaataggttgattgtaagctttactacaata

SEQ ID NO: 101236 - DNA, 440 bp, Zea Mays
cgccgagctgctggactcgcccgtcccgctccactcttcctcgaacttcttcgcgtcgcccaccaccggcgccatcccggcgcagaggttcgactggaagcaggccgccgacctgatcgcgtctcagtctcagcaagacgacagcaagacgacagccgagctgcggtcggcggcgccttcaacgacttctccttccacgcgcccaccatgcccgcgcagaccacgttgttcccttcattggtcgtcgtgcaggagcagcagcaacagcaagtcgaagcagcgaccatgggtgggcgcaacggggaggggagctcagatcggcggcgatctcggtgcggtggttgaggggaggcgcgggcgcggagggggcatgggtgggcgcaacggggaggggaggggcgaggactatcggcgttggggcggacgcatcgggagtgggg

SEQ ID NO: 101237 - DNA, 3727 bp, Zea Mays
cgccggtgcatccatggctccgccgccgcgctcccaacgctgctgctgctgcttcttcttcttctggctgcatcgtccgcgcaagctcagcaaacgtcaaggatgaagaccgatccagtcgaagcggcggcggtgaacgcggtgttcgccaagctcggccaggcggctacgtcggcatggaacatcagtggcgacccctgcacaggcgccgccacggacggcacgaacatcgacaacgaccccactttcaacccggccatcaagtgcgagtgctccgtccagaacaaccgcaccgtctgccacgtcaccaagctgaagatatacgcactcaatgcatttggccccataccacaggaactgcagaacctcacgcgcttgaccaatctgaatttagcacaaaattacttaaccgggcctttgccatctttcctcgggaatttgactgctatgcagtacatgagtttgggcatcaatgcattgtctggatctgttccaaaggagcttgggaaccttgtgaatcttgtatctctaggcattggctcgaactacttaaatggttcccttccttcggagttgggaaacctggcaaaacttgagcaattgtatattgacagtgccggcctaagtggtcccctaccgtcatcgttttctagactaacaagaatgaagacactgtgggcatcagataatgattttactggggaaataccagattatattgggagctggactaatttaacagaactgcggtttcaaggcaattcatttcaaggtccacttccagccactctttctaatctcgtccaactaacaagcttacgaataggtgacattgtaaatggaagttcttcaatgatattcatcagtaacatgacatctttgaacacattgtatggataactttgtcatcaatcaatgactcaaactatgtcttgatattttatatagtgcaatcaaggtattaagtcaaatactcttggcatgcttcattgcagaattttgaggaattgcaggatatctgatagcctggcatcagtgaacttttcacagtttgcaaagttaaacttattgtaaggcattttgtttgttccaaactccagtcaagtgtgatttgtgcaaagatgctttttaacgaactgctatggattatgctctgtttaattactgacttccctcttgttctctgttttcctgttacagggatttgagttttaacaatatcacaggccaagttccagaagcccttgtgaaattgaattcactcagcttcttgtatagtctttactgtattcagcttattcctttgttttgaagatattcatttttcatgttgctaatgcaagcaaatttgttcctaccagatttctcggtaataatagtctttcaggaagcctgccgagctctataggaacttctcttaaaaatttagatttttcttacaaccagctgtcaggcaactttccttcttggactactcagaacaatttgcaactgtgagtattgatttctgaaacttcaaatgaccaccttgtattaccttcagggctgtcgtgtcttcagagagacacaccctgttttcttggctctccacaatctgcctctcttgctgtggactgtgggagcagtagatctatatctgggtatcaacctgatgctgccagtcttggtgctgcatcctattatgttacaggagcacaaacgtggggtgttagcaatgtaggcaagttcatggaagcatcaaatggaagttacataatttacagcttacaccaatttcagaacactctagattcagaactattccagacagcaaggatgtcgccatcatctttgagatactacggtattggactcgagaatggaaactacacagtcacacttcaatttgcagagtttgactttgaagattcacaaacttggaagagtgttgggagaagggttttcgatatctatctccagggcgagcgtaaggagaagaactttgacataaggaaggcatcaggggggaaatcttacactgctgtcgagaagcagtatattgttcctgtcactagaaactttcttgagattcatcttttctgggctggcaagggcacttgttgcattcctgctcaaggctactacgggcctgcaatctcagctttgagtgcaactccaaattttacccctacagtgcgtaattctgcacagaagaagaacagtagtaaaacaggtgtaattgttggggttgtgattggtgcagcagttttaggagtactagcacttgctggaatctgtatgtggaggcagaaaaggagaaaactattattggagcaacaagagctttacagtattgttggaagacccaatgtatttgtttatggtgagctaaggaccgctactgaaaattttagttccaataaccttcttggtgaaggaggatatgggtcagtttataagggtaaattagctgatggaagggtggtggctgtaaaacagttatctgaaacatctcatcagggaaaacagcaatttgcagccgaaatagaaactatttctcgagtgcaacaccgtaatcttgtgaagttgtatggttgctgtcttgaaggaaataaaccactgttagtttatgagtacctagagaatggaagccttgataaagcattgtttggaaacgggaaactgaacctagactggccaacacgctttgagatatgcttaggcattgcaagaggcctcgcttatctccatgaagagtctagcatccgtgttgtgcatagggacataaaggctagcaatgtcttgcttgatgcaaatctcaaccctaagatctcggatttcgggctcgccaaactttacgatgacaagaagactcatgtcagcaccaaagttgcgggtacatttggttatcttgcacccgagtacgccatgaggggtcatatgaccgagaaagttgatgtgtttgcatttggagtggtcatattggagactctagctggaaggccaaactttgacaatacgcttgatgaagacaaggtttacattttagaatgggtctggcaactgtacgaagaaaaccaccctctggacatgctcgacccgaagctcgcagaattcaacagcgacgaggtgctccgtgccatccacgtggccctcctctgcacccagggctcgccgcaccagcgcccgtccatgtcacgggccgtgtcgattctggcgggagacgtggaggtgggccaggtggcgaacaaacccagctacatcaccgagtggcagatcaagggcggcaacaccagcagcttcatgagcagcaacgtcagtgggcagtcgggcgtggcgccgaggtcggcctcgcacgcctcgtcgcagttcctgggctctgtcatcgaagaaggccggtgatgatgagtagcaagttttctcaagcgacggactgttccttgtaattaaacgcacgcacgttacaaaaggctctcggattatctggttttgacctttttcgttttccttttgaaaattttcggtttgatttcgatttgtgcagttggaatttgtatgcaaatgatgatattggatggttaagtctatttgtaattttggatgttttgaggtgtgtgtgtatatatatgatgtgatctgcaagaactaagtcacaattagatattgttgttatattaattttcggtcacgcatagtattcatactgtagttagcgggaaaatcccaatttatacagttaaaatgcgcg

SEQ ID NO: 101238 - DNA, 1268 bp, Zea Mays
aacccatttgtatttccttccgcatccttcacactccggctaccaccatctctcaccccccgccgccgccggctccaactcccagcgccccgccgcgccccgccgctgtctccatcggagctccctaccgactgccccgaaccatggcagccgcatcagcgacgcgccgcggcctctcctctctcctcctctccccttcctcccgcgcgctccgccgccgcctgggccccctcgccgccgcggccgcctcaccgcacgtcgccccgtggccccttctcgcgccgcgcggggccaggaccgcgtcgtccggcgggtccgggcactccccgctgaacgacccgtccccgaactggagcaaccggccgcccaaggagacgatccttctcgacggctgtgactacgagcactggctcatcgtcatggagttccccaccgaccccaagccgtcggaggaggagatggtcgcggcctacgtcaagaccctcgcggccgtcctcggaagtgaggaggaagcaaagaagaagatctactcagtgtgcacttcaacatacacaggatttggtgcattaatttcagaggagttatcatacaaagttaaaggattgccgggagttctatgggtgttacctgattcgtatctggatgttcctaacaaggactacggaggtgatctattcgtagatggtaaggtcatacacagacctcagttccgattcaatgagaggcagcaggtaaggagcaggcctcgtcctcgttacgacagacgacgcgagattgcccaagtggagccgagggagacgatgcaaagaggcccttcgacgacgcagcaacagaggccgccatgtccacaggaggccgctacacagaatcaggagcagcactgaaaccatgctggcaggagtaggaaagcggcatcaatatgggaagacttgtatggtttttgccggcagttgcttatttatatataaactaaggccctgttcgttttttacggattggaggcccggaacggttcctagccggattgtttctctaatttatgtaagttttgataagttggaatgaatcctggtccaatactagacaaacgaacgggccctaagttggttcagaactatctgagctaaatctcgtgactatacatgtcctcttgggtctggagcgtgtaggttgaggttgacatgtaagctgtgtttcagcattgctgactgaatcattgctgtcctgaaatttcggcgaagtatggaagattcctcttcgcttgcaaa

SEQ ID NO: 101239 - DNA, 911 bp, Zea Mays
ccgcgcgcctcgggtactcgccgtggtcctattcgtacagacgtacacccccacctccacgtgggcccacaagtacggctgtcccgcctgtcggcctcagcggccacgactccgcgtgcagcccgcggctatatagcaacgcctgcagagcacacgcccccgcgtcccctcctcctccggcgctgcagctagcctcctgccctcctcgctccccgcctcgatctccaccgccgcgcgcgctcgtggggtagcagtaacaccagcaccggcggagacctgcgacctgggccatgacgatgaggggccttctccggtgcgtgtcgacgggggcgtgcagggtggcgccgggcgccgtggcggagccggtgccggcgtcgccgggggccaccggcgggaaggtgccggcggggcacgtgccggtggaggtcggcgcggaaggggaggagacgcagcggttcgtcgtccccgccgagctgctgggccggccgcccatcgccgagctcctccgccacgccgcgcaggagtacggctacgcgcgccggggcccgctccgcatcccctgccccgtggccgcgttccgcctcctcctcggcgcgctcgcggggagcggcgccggtggacccgacggggcgctcacgctcgcttacttcgccgtggccgtctgatcgacgagatcccctagctagcgtagcgggttgggttcctccttccttgaggcgtgcgttgtgctgtcagcgttcttgcttctctagattccatctgttccttctactcttctttctctcctttgctttttctcctcccctctttgtgctatgtaaatatgtaatttttttcagattgatgagacgtttattattcggtatactttgcctctcagtcattcagcggactatacttgcatatacagc

SEQ ID NO: 101240 - DNA, 1129 bp, Zea Mays
attgagactcctccccttgtcattgtcggacttgtggaatgtgaagaccccccgtggcctacgaaccctcaactctgtctgggcccaacaccttagcgaagaagtgcggagaaggttctacaagaactggtgcaagagcaagaagaaggctttctccaagtatgccctcaaatacgacagcgacgcaggcaagaaagaaatccagttgcagcttgagaaagtatgcttcagttatccgtgttattgcccacactcagattagaaagatgaagggtttgaagcagaagaaggctcacctcatggagatccaggtcaacggtggcactatagcagacaaggtggactatggttacaagttctttgaggaggtccctgttgatgctgtgttccagaaggacgagatgatcgacatcatcggagttaccaagggcaagggttatgaaggcgtggtcactcgctggggtgttacccggcttccccgcaagacccacaggggcctccgcaaggttgcctgtatcggtgcatggcatcctgctagggtgtcgtacactgttgctcgtgctggtcagaacggataccatcaccgcactgagatgaacaagaaggtttacaagattggcaaggccggacaggaaagccatgacgcctcaactgagtttgacaggaccgagaaggacatcactcccatgggtggtttcccccactacggtatcatcaagggcgactacctgatgatcaagggttgctgcgtcggccccaagaaaagggtggtgactctccgccagtctctgctgaagcagacgtctcggttggccctggaggagatcaagctcaagttcatcgacacctcgtccaagtttggacatgggcgcttccagaccacagacgagaagcagaggttctttggcaagctcaaggcctgagttgctgatggtgtcaagcgaaatggaaatgtattaccagatagttttttgtttttcagattcagctttgttggagatatcataagaacatgtttgatttgctagtctgagttgattctattgcgggcggctgaagttatattacctaatgaactcgaaagtcagcttgctagttgcgtgactttacctgcgctagcacttgccaa

SEQ ID NO: 101241 - DNA, 1304 bp, Zea Mays
cgcgtttgggttctccgccaggccggcgcgttcgacccggtagcccgaaaccgcccatatatcttgccaactttctgcgacacggtggaggcgtggagctaactacccccacgctggctcgccaccgccgccgcagcaggcgtgggaatctgggcagcgccccgcggagaagaggaggcagcgcgctctccgtccgccatggcgggctcttccgaccccgacaagctcatgagcaaagccgacaaactaacaaaattgagttttacaagatggaatgctgattggaaaagcgctacctccttgtatgagcaagctggttcagaaaggataatgagaaagcaaaagatgcttttgagaaggcctcaaaaggacaggaaatgatctcctcaccatgggacgctgctaagcatatggaatctgctgctgctttagcaaaggagcttgggcgctggaatgaagtatctgatttctatcacagagcttcagaattataccgtgaatgtggaaggccacaacctgcatctgatgctctagcaaagggtgccagtgcattggaggagaaatctccagaagaagctatcaaaatgtatgatgaggcttgttcagttctagaagaagatgggaaggaacagatggcttttgacttgtaccgtgccgcagcagctttgtatatcaagatggagaaatattcagatgccgctgctttgtttttaagacttggttcagctgctgataagtgcaatgccatcaatagccaatgcaaggcctatctgagtgcgatcatcatctatctttacacacatgattttcagcaagctcaaaaatgctacaatgactgctcagaggttcaagccttcctcaatagcgaccagaatcgatgcgcaacgaagttattgtctgcttatgaggaaggtgatgctgaagaaatcaaacgcatggctcaatcaagtgccttcaatcaccttgaccatgtggtaattaggcttgcacggaagctaccaacagatgatctgcaggccatcaagaaagctgacgatggcgaggaatccttggacgaggatgacctgacttaaaacgatctcccgagccaaaaggtgcatagagcaaacgtcatagtttgccataggtgggggaaccgctgtaaaaagaagttatgcgagttacatactaaaaacttgggcagcattcccagatctataaacatgaaatttgtagggcccaattatgttgtatccgtactggtggtttggtgttaccgaaacagcgaaactttagtggtataggcaaaaaaaaaaaaaaaaacg

SEQ ID NO: 101242 - DNA, 1281 bp, Zea Mays
gtggagctaactacccccacgctggctcgccaccgccgccgcagcaggcgtgggaatctgggcagcgccccgcggagaagaggaggcagcgcgctctccgtccgccatggcgggctcttccgaccccgacaagctcatgagcaaagccgacaaactaacaaaattgagttttacaagatggaatgctgattggaaaagcgctacctccttgtatgagcaagctgcaattgcgtataggttcagaaaggataatgagaaagcaaaagatgcttttgagaaggcctcaaaaggacaggaaatgatctcctcaccatgggacgctgctaagcatatggaatctgctgctgctttagcaaaggagcttgggcgctggaatgaagtatctgatttctatcacagagcttcagaattataccgtgaatgtggaaggccacaacctgcatctgatgctctagcaaagggtgccagtgcattggaggagaaatctccagaagaagctatcaaaatgtatgatgaggcttgttcagttctagaagaagatgggaaggaacagatggcttttgacttgtaccgtgccgcagcagctttgtatatcaagatggagaacattgcaagtaactaacatgaccatcttacaattcacccccatatttgtccgttggacagatattcagatgccgctgctttgtttttaagacttggttcagctgctgataagtgcaatgccatcaatagccaatgcaaggcctatctgagtgcgatcatcatctatctttacacacatgattttcagcaagctcaaaaatgctacaatgactgctcagaggttcaagccttcctcaatagcgaccagaatcgatgcgcaacgaagttattgtctgcttatgaggaaggtgatgctgaagaaatcaaacgcatggctcaatcaagtgccttcaatcaccttgaccatgtggtaattaggcttgcacggaagctaccaacagatgatctgcaggccatcaagaaagctgacgatggcgaggaatccttggacgaggatgacctgacttaaaacgatctcccgagccaaaaggtgcatagagcaaacgtcatagtttgccataggtgggggaaccgctgtaaaaagaagttatgcgagttacatactaaaaacttgggcagcattcccagatctataaacatgaaatttgtagggcccaattatgttgtatccgtactggtggtttggtgttaccgaaacagcgaaactttagtggtatgcaaaaaaaaaaaaaaaaa

SEQ ID NO: 101243 - DNA, 1292 bp, Zea Mays
cgacccggtagcccgaaaccgcccatatatcttgccaactttctgcgacacggtggaggcgtggagctaactacccccacgctggctcgccaccgccgccgcagcaggcgtgggaatctgggcagcgccccgcggagaagaggaggcagcgcgctctccgtccgccatggcgggctcttccgaccccgacaagctcatgagcaaagccgacaaactaacaaaattgagttttacaagatggaatgctgattggaaaagcgctacctccttgtatgagcaagctgcaattgcgtataggttcagaaaggataatgagaaagcaaaagatgcttttgagaaggcctcaaaaggacaggaaatgatctcctcaccatgggacgctgctaagcatatggaatctgctgctgctttagcaaaggagcttgggcgctggaatgaagtatctgatttctatcacagagcttcagaattataccgtgaatgtggaaggccacaacctgcatctgatgctctagcaaagggtgccagtgcattggaggagaaatctccagaagaagctatcaaaatgtatgatgaggcttgttcagttctagaagaagatgggaaggaacagatggcttttgacttgtaccgtgccgcagcagctttgtatatcaagatggagaaatattcagatgccgctgctttgtttttaagacttggttcagctgctgataagtgcaatgccatcaatagccaatgcaaggcctatctgagtgcgatcatcatctatctttacacacatgattttcagcaagctcaaaaatgctacaatgactgctcagatcgcttaacagggttcaagccttcctcaatagcgaccagaatcgatgcgcaacgaagttattgtctgcttatgaggaaggtgatgctgaagaaatcaaacgcatggctcaatcaagtgccttcaatcaccttgaccatgtggtaattaggcttgcacggaagctaccaacagatgatctgcaggccatcaagaaagctgacgatggcgaggaatccttggacgaggatgacctgacttaaaacgatctcccgagccaaaaggtgcatagagcaaacgtcatagtttgccataggtgggggaaccgctgtaaaaagaagttatgcgagttacatactaaaaacttgggcagcattcccagatctataaacatgaaatttgtagggcccaattatgttgtatccgtactggtggtttggtgttaccgaaacagcgaaactttagtggtatgcaaaaaaaaaaaaaaaaa

SEQ ID NO: 101244 - DNA, 1437 bp, Zea Mays
cgcgtttgggttctccgccaggccggcgcgttcgacccggtagcccgaaaccgcccatatatcttgccaactttctgcgacacggtggaggcgtggagctaactacccccacgctggctcgccaccgccgccgcagcaggcgtgggaatctgggcagcgccccgcggagaagaggaggcagcgcgctctccgtccgccatggcgggctcttccgaccccgacaagctcatgagcaaagccgacaaactaacaaaattgagttttacaagatggaatgctgattggaaaagcgctacctccttgtatgagcaagctgcaattgcgtataggttcagaaaggataatgagaaagcaaaagatgcttttgagaaggcctcaaaaggacaggaaatgatctcctcaccatgggacgctgctaagcatatggaatctgctgctgctttagcaaaggagcttgggcgctggaatgaagtatctgatttctatcacagagcttcagaattataccgtgaatgtggaaggccacaacctgcatctgatgctctagcaaagggtgccagtgcattggaggagaaatctccagaagaagctatcaaaatgtatgatgaggcttgttcagttctagaagaagatgggaaggaacagatggcttttgacttgtaccgtgccgcagcagctttgtatatcaagatggagaaatattcagatgccgctgctttgtttttaagacttggttcagctgctgataagtgcaatgccatcaatagccaatgcaaggcctatctgagtgcgatcatcatctatctttacacacatgattttcagcaagctcaaaaatgctacaatgactgctcagaggttcaagccttcctcaatagcgaccagaatcgatgcgcaacgaagttattgtctgcttatgaggaaggtgatgctgaagaaatcaaacgcatggctcaatcaagtgccttcaatcaccttgaccatgtggtaattaggcttgcacggaagctaccaacagatgatctgcaggccatcaagaaagctgacgatggcgaggaatccttggacgaggatgacctgacttaaaacgatctcccgagccaaaaggtgcatagagcaaacgtcatagtttgccataggtgggggaaccgctgtaaaaagaagttatgcgagttacatactaaaaacttgggcagcattcccagatctataaacatgaaatttgtagggcccaattatgttgtatccgtactggtggtttggtgttaccgaaacagcgaaactttagtggtatgtttatggtgccctatgctacatgattcttgcaaatctagcatgatgtatatgtgttggccaatcattactcctacatttgtagctgtgcagtagcccacgcgcttccatcgcaagtagtaggtcgggacattcggttaattc

SEQ ID NO: 101245 - DNA, 1538 bp, Zea Mays
cgcgtttgggttctccgccaggccggcgcgttcgacccggtagcccgaaaccgcccatatatcttgccaactttctgcgacacggtggaggcgtggagctaactacccccacgctggctcgccaccgccgccgcagcaggcgtgggaatctgggcagcgccccgcggagaagaggaggcagcgcgctctccgtccgccatggcgggctcttccgaccccgacaagctcatgagcaaagccgacaaactaacaaaattgagttttacaagatggaatgctgattggaaaagcgctacctccttgtatgagcaagctgcaattgcgtataggttcagaaaggataatgagaaagcaaaagatgcttttgagaaggcctcaaaaggacaggaaatgatctcctcgtatcctttagaaatttctctgcagttttggtattttcatttttcatattattatacattaccgtattgtacccttagctaatgccatagaccatgggacgctgctaagcatatggaatctgctgctgctttagcaaaggagcttgggcgctggaatgaagtatctgatttctatcacagagcttcagaattataccgtgaatgtggaaggccacaacctgcatctgatgctctagcaaagggtgccagtgcattggaggagaaatctccagaagaagctatcaaaatgtatgatgaggcttgttcagttctagaagaagatgggaaggaacagatggcttttgacttgtaccgtgccgcagcagctttgtatatcaagatggagaaatattcagatgccgctgctttgtttttaagacttggttcagctgctgataagtgcaatgccatcaatagccaatgcaaggcctatctgagtgcgatcatcatctatctttacacacatgattttcagcaagctcaaaaatgctacaatgactgctcagatcgcttaacagggttcaagccttcctcaatagcgaccagaatcgatgcgcaacgaagttattgtctgcttatgaggaaggtgatgctgaagaaatcaaacgcatggctcaatcaagtgccttcaatcaccttgaccatgtggtaattaggcttgcacggaagctaccaacagatgatctgcaggccatcaagaaagctgacgatggcgaggaatccttggacgaggatgacctgacttaaaacgatctcccgagccaaaaggtgcatagagcaaacgtcatagtttgccataggtgggggaaccgctgtaaaaagaagttatgcgagttacatactaaaaacttgggcagcattcccagatctataaacatgaaatttgtagggcccaattatgttgtatccgtactggtggtttggtgttaccgaaacagcgaaactttagtggtatgtttatggtgccctatgctacatgattcttgcaaatctagcatgatgtatatgtgttggccaatcattactcctacatttgtagctgtgcagtagcccacgcgcttccatcgcaagtagtaggtcgggacattcggttaattc

SEQ ID NO: 101246 - DNA, 1527 bp, Zea Mays
cgcgtttgggttctccgccaggccggcgcgttcgacccggtagcccgaaaccgcccatatatcttgccaactttctgcgacacggtggaggcgtggagctaactacccccacgctggctcgccaccgccgccgcagcaggcgtgggaatctgggcagcgccccgcggagaagaggaggcagcgcgctctccgtccgccatggcgggctcttccgaccccgacaagctcatgagcaaagccgacaaactaacaaaattgagttttacaagatggaatgctgattggaaaagcgctacctccttgtatgagcaagctgcaattgcgtataggttcagaaaggataatgagaaagcaaaagatgcttttgagaaggcctcaaaaggacaggaaatgatctcctcgtatcctttagaaatttctctgcagttttggtattttcatttttcatattattatacattaccgtattgtacccttagctaatgccatagaccatgggacgctgctaagcatatggaatctgctgctgctttagcaaaggagcttgggcgctggaatgaagtatctgatttctatcacagagcttcagaattataccgtgaatgtggaaggccacaacctgcatctgatgctctagcaaagggtgccagtgcattggaggagaaatctccagaagaagctatcaaaatgtatgatgaggcttgttcagttctagaagaagatgggaaggaacagatggcttttgacttgtaccgtgccgcagcagctttgtatatcaagatggagaaatattcagatgccgctgctttgtttttaagacttggttcagctgctgataagtgcaatgccatcaatagccaatgcaaggcctatctgagtgcgatcatcatctatctttacacacatgattttcagcaagctcaaaaatgctacaatgactgctcagaggttcaagccttcctcaatagcgaccagaatcgatgcgcaacgaagttattgtctgcttatgaggaaggtgatgctgaagaaatcaaacgcatggctcaatcaagtgccttcaatcaccttgaccatgtggtaattaggcttgcacggaagctaccaacagatgatctgcaggccatcaagaaagctgacgatggcgaggaatccttggacgaggatgacctgacttaaaacgatctcccgagccaaaaggtgcatagagcaaacgtcatagtttgccataggtgggggaaccgctgtaaaaagaagttatgcgagttacatactaaaaacttgggcagcattcccagatctataaacatgaaatttgtagggcccaattatgttgtatccgtactggtggtttggtgttaccgaaacagcgaaactttagtggtatgtttatggtgccctatgctacatgattcttgcaaatctagcatgatgtatatgtgttggccaatcattactcctacatttgtagctgtgcagtagcccacgcgcttccatcgcaagtagtaggtcgggacattcggttaattc

SEQ ID NO: 101247 - DNA, 370 bp, Zea Mays
cacaatctaaaatattttataagtaatttatagctatagaataagcaacaatatggaaaatatttattcaagagttatagtgtcaataatccatttacaaccaaatattataaagcaaataaaatatttaaaaaagaaaataagttaatgatgataaattgaaataaaaacgatataatattatacctctagtttagtatagttataggatacctagacaggtgcatttatatatttttattactttgagatatctttttaattttatgaagatcaagtccttttaagatttctcttttgatatggcacatcatcaaatcatttaactaatcatgggccatcttgttgcgtggagctaggcaaaggctgc

SEQ ID NO: 101248 - DNA, 670 bp, Zea Mays
actaacttgtatgatcttagcgggcggactccgacgttagtcctaggccgacggggcctcctacgggcccaattaattgagacgttggattcgaggctacgcgaatctcaacgaattgccagttcccgtcctcatccagtggaaggcagctgtgccagctcaaatgctcgaatcagcagacgtgggaatctcggcagggcgccgcagggaagaggaggccgagcgctctacgtctgccatggcgagctcttccgaccccgacaagctcatgagcaaagccgacaaactgtaattaggcttgcacggaagctaccaacaggtgatctgcaggccatcaagaaatctgacgatggcgaggaatccttggacgaggatgacctgacttaaaacgatctcccgagccaaaaggtgcagagaacaaacgtcatagtttgccatcggtgggggaacaactgtaaaaagaagttatgcgagttacatactaaaaacttgtgggcagcattcccatatctataaacatgaaatttgtagggcccaattatgttgtatccgtactggtggtttggtgttaccgaaacttagtggtatgtttatggtttcttgtactacatgattcttgcaaatccagcatggtgtaaaattaatatgttggccaatcattactcctaca

SEQ ID NO: 101249 - DNA, 1815 bp, Zea Mays
actaacttgtatgatcttagcgggcggactccgacgttagtcctaggccgacggggcctcctacgggcccaattaattgagacgttggattcgaggctacgcgaatctcaacgaattgccagttcccgtcctcatccagtggaaggcagctgtgccagctcaaatgctcgaatcagcagacgtgggaatctcggcagggcgccgcagggaagaggaggccgagcgctctacgtctgccatggcgagctcttccgaccccgacaagctcatgagcaaagccgacaaactgtgagccctgcgtttctattattgtcgtctgcaccttccttcgagttctcttgcttcgttcggtccgcgagcgcctcgattgctgcgacgcgagtgttgtttcaggatggggatttcatttcgtttaggtcgacaaattgagctgtttgggctttagcgtgtcaaattagatcccaccgatttgtaattcttggcccgatcgtgttgagctttcgtgtggaatgtgtcttgcgcgatcagggaattcctagatctagtcttggcgtcttgctgttagacgaagttttgtttgttcgtcaaaaagcatgacggttgtttcgggatcttgcgtacgaactgatctctagtgatcggtagagtaagcttcaacccttcgagtagtggttttggaggctcggaggagttcccctacaaccctaaacctatttccgggttcattttagaagggttcatttggtttcattctcatatgcccagggacatgccaaatatgcacgaaacgacaataaaatggcaattttgtttagatccaaactggggagaaattcctcatgtcacactctcctagatgactagatcatattgcattacctttccatttcgacacatctgcagacttgggtgaatacatacaattccttgtgctagactatgccacttcagcaatggctatgcgatgtagcttcaaggccatgtaagtgtattgcttgggagtatatgttgtgtccaatcaacattatctagattttatcttggattattctatgctttattcagttggttttacttatacatgacaatatatcagttcggtcagacctttaacattggcaaattcttttcttataatgtgtgattgactgctgattttcctgcttttttctattacttttatcaaagtgacaccgaaaagggtcatgttccagcaacctataatcgaatctgtgtaataaaattctatgcttttttctattacttttatccgtctttctacttcatgatcatcaattgtcccatatgttctctagtctagaacaatttgcattcaccctgatgtaatgtttgcctggctgattgtatttttatagtacttgtttggtgcttgtctatgcttggaattcatggttacagttggttctgtacactaatgcaggtaattaggcttgcacggaagctaccaacaggtgatctgcaggccatcaagaaatctgacgatggcgaggaatccttggacgaggatgacctgacttaaaacgatctcccgagccaaaaggtgcagagaacaaacgtcatagtttgccatcggtgggggaacaactgtaaaaagaagttatgcgagttacatactaaaaacttgtgggcagcattcccatatctataaacatgaaatttgtagggcccaattatgttgtatccgtactggtggtttggtgttaccgaaacttagtggtatgtttatggtttcttgtactacatgattcttgcaaatccagcatggtgtaaaattaatatgttggccaatcatta

SEQ ID NO: 101250 - DNA, 1362 bp, Zea Mays
cgtggagctaactacccccgcgctggctagccaccggccaccgccgccgccgaacaaaaccgactgctctccttctcacatcagcggcaagtttagagttcccgctcgccacctcgtcgcatcacgcgttcatgccccgccacccccggcaatggcaaccgcaacggtgacttccccgtcggatcccttcacgttccacggccccgtcgctgcgctggcggttccggctcaggccgacgtcgacgagttcgagttccacgtcgtcccagccgccgcggtagcgctctcggctgccgacgagctcttctccggcgggaagctcgtgcccttacgccgacccgcgccagcgtctgctccttgctcccctccgccgccgcgcctggaggtggagcccgcgtctgaaccgacgtcccctcgcgccccgcgatgcgctgggcgccggtggcgcgacctcctcctcctcctcgtgtccagctacaggaggaaacccaaggctgccagcggcggcgacgccagcaggtgcgcagcggaccggtgtctgaaggcgcggcgacgggcgacgcatttccggccgctcctctcgcgggactcctcgtcgtcctcgtcggcgtcctctgtcgactcgggcaagagcgcgcgccgcccgccgccgtcgtgttccccgctgcggacgcggtcggcgcccgtggcgaacctcctccacctcatgtccaggacaagatctacggggggcgacaaggtcggcgccgccgcggacgcgccgaagcggcaggaaccggcgggcgcgcgcctgctcccgacccgtgcctcgtcgtcgtcctcgtcctcggcgggctcttgcaggaaccctcgcgcgggggcgggggcggggccgtggcccccgcagcgcgggccctctcgcccgtcccggcccgcggcggcggcggagagcccgcgcgtgagcgcgtccgggcgcgtggtgttccgcgggctggagcgctgcgcgagcacgccggcgtcggcgggcgtcgggccgcgacggccgaggggcatggagcggtcctactcggccaacgtgcgcgtggatccggtgatcagcgtcttcggcttcgggcacctgttcatgccgtcgtcgccggccaaggagaggaaggccgacagggagagggacgtcgtcggtggccgcaggaacaacaggccggagaagctggccatggtgctcatgagagatccacaggattaggcagcggccacgctggcaataatgcatcggattccccttgtctcgaattttttttttcttgcttctttttttctttcgatcgttgtaatatagcgccagtttttaggatgcgaacaaagaaattccagagaaactttacc

SEQ ID NO: 101251 - DNA, 552 bp, Zea Mays
cttataactttgtatactatatattttcattaaagctttaatttcacttgataggaaagatgaaagtgttttctccgacccaacctacaacgtgtctgttctttttgggaagagagatgagccactcctactagcttgcgcacgtcaacttattgagcacataagtggcagtggctcagcccggtcattggtgatttctctgggtctgaaagatcattctcagggaacgctgaaggatattactgtagctgtgatcgagaatcgcctttggtgatgattgaatagctgagctgggcatgggaacgctgaaagatactgtttagcattgcgcaataggagccatcgtttataccatgcactaaattctggtacttttgtagttagaccttctatctactgggattaacaaaaggtgggtttaagctgctgtcaaaattggagtgtcaactttaacgctaaacaaaaggcaatgtacactggtaaagcacttctgagtcgaatcatgattttcgaggctatctgacaatttcagctatccgtgctggggctgtc

SEQ ID NO: 101252 - DNA, 1141 bp, Zea Mays
aaaaaaccaaacacccgtagcctccgccgagagtcgcagccgccgacacccagtcgcccaccgaggcaccgacccgaccccaaccttggagctgctgtgccccggcggtccgtctctggccagagctccgccaccgcccgccgatcagagctccgcctccgagacgacgcgcctccccccagtggctcaggccgcctgcccgcctggcaggacgccgcgccgagctctttcccggcagctgctcgcccgcgccgatcttttcttcggcaaccgcgcgcccgcgtcgagctcctccccgtccccggcagccgcgcgccagcgccgagctcctccccgcggatccgcctctgctcagtctgagctccggccagccgcgagctccgtcgaggcgtcgacgccgaggcccagctccgcccgtgagtgcctgtgccggattcagcaaacagaaatttgctctgctggttagatagatggaggtgccaatgaacaccacgcaatctggtcctcacttccctgtgcagcatcggtccctctcgttagacatcaagggaaataaaacagatattgttatcaataaatacgaagatacctttctggtgattgtgacccaaatcggctgcatgggaaccatactagctgccaagaaagatgaaagtgttttctccgacccaacctacaacgtgtctgttctttttgggaagagagatgagccactcctactagcttgcgcacgtcaacttattgagcacataagtggcagtggctcagcccggtcattggtgatttctctgggtctgaaagatcattctcagggaacgctgaaggatattactgtagctgtgatcgagaatcgcctttggtgatgattgaatagctgagctgggcatgggaacgctgaaagatactgtttagcattgcgcaataggagccatcgtttataccatgcactaaattctggtacttttgtagttagaccttctatctactgggattaacaaaaggtgggtttaagctgctgtcaaaattggagtgtcaactttaacgctaaacaaaaggcaatgtacactggtaaagcacttctgagtcgaatcatgattttcgaggctatctgacaatttcagctatccgtgctggggctgtc

SEQ ID NO: 101253 - DNA, 1643 bp, Zea Mays
cggacggttaccacaagcaactaggaggactcgtcatcgctatctactgtagctcgctattttccacactctggctggcatgatttggccccgcctgtcgcgttaggttctggttcttttcggagtcgcgagtacatgcgacggtcgggtccttgcttcgcttcttcagaaactgcttttcctctctgcgggcgcatctgcgactgcgattgcgttggtaaagatggcctgctgctttctgtttggaaagaaagcgaaacaaaccactgaaggcgatgaagatctacatagcgtcaaggtattctcttacagcgagttgagaaaggctacgcaggatttcagcggcgcgaataagattggcgagggcggtttcggttctgtcttcaggggagtgcttaaagatgggacagtggtggcggtgaaagttttatctgctacttcaaggcaaggcatccgcgagtttttgactgagcttacggcgatatccgacatcaagcatgagaatctggtcactctgatcggttgctgcgccgaaggatctcgcaggatccttgtctacaactacctcgagaacaacagccttgcgcagacattgctaggatccaggcacagcaacatccggttcaactggcacgcccgcgccagaatcgctgtcggcgttgcccgtgggctcgcgtttctccacgaggagatccgtccccccatcatccacagggacataaaggcgagcaacattcttctcgacaaggacctcacccccaagatctccgacttcgggctggcaaggctcctgccgcccaacgcgacccatgtcagcacccgagtggcaggaacattagggtacttggctcctgaatacgcgatccgaggccaagtgacgaagaagtccgatatctatagctatggggttcttcttttagagattgtaagtgggagatgcaacaccaacacgagattacctagcgaggaccagttcctccttgagaggacatgggcactctacgagcaaggacgtctagaggacatcgtggacatggacatcggcggcgaccgggacgtcgaggaggcgtgccggttcctgaagatcggcctgctgtgcacgcaagacgcgatggcgcgccgtcccaacatgaccaacgtcgtccggatgctctcgggggagaggaggatcagcgtagagaagatcactaggcccgccatgatctccgatttcgcggagctcaaggtcagcagcaaggagcgaaggccgggcgaggcacgctcgcccacgacggctcccaccacgaaatcgttcaccaccacggagccgttctcgtcgtcggagacgcccacgcagtcgtccatgtgaagtcgtgggcgtacgacgcatttttttttttggtttagtttgtatagtgtgtggacgtgttaggtgggcagggttacaggttttttttttgagtttcttgtttgttttgctgtgaggaaagatctcgtaggcctcttattgcatctttgatcatgtaaatatctgtaaacgaagatgatcaagataagctttgcacgacggttctcattgtcgaactactttggactgctgcaactcggtgattatttggatcagttcaccttacatcttttgggtttttgtcccacagaatacg

SEQ ID NO: 101254 - DNA, 2083 bp, Zea Mays
gcccgcgcccgcgggcacggtgaagaaaccatgccggccgtcgccgttacggctctcccggaccaaccaaacccctccatttatgtaacgccgccgcaaccgccaagccaaggacaaggcaggcactcccggaaaaacaaatcgaggcgaggacgaggggactcgtgcggtggagcagctgatctcgctgcgcttcacacggccacgggtgagcggtgagcctaagcactgacgaagaggaggagcaaagcaacttggggctgggggcggcgagaagtcaaaggctcgcgatcccctaccctcgaggcgccttctcctccttccttccttcaatccttcctcgtctgctccgcctaccccgcacgtttcgctccctctcttttaacaacgcccaccaccgccgcagtcgagcagagcggcggcccctcctctccctccctctcccacggctgcagggccgcttctctacctccactccatctgtagagaattttctcctccccacttgcgggcgtctcgctgaactggttgcgccgccgccgtaccggttggggaggctgcgctccgtctccacagaaactgcttttcctctctgcgggcgcatctgcgactgcgattgcgttggtaaagatggcctgctgctttctgtttggaaagaaagcgaaacaaaccactgaaggcgatgaagatctacatagcgtcaaggtattctcttacagcgagttgagaaaggctacgcaggatttcagcggcgcgaataagattggcgagggcggtttcggttctgtcttcaggggagtgcttaaagatgggacagtggtggcggtgaaagttttatctgctacttcaaggcaaggcatccgcgagtttttgactgagcttacggcgatatccgacatcaagcatgagaatctggtcactctgatcggttgctgcgccgaaggatctcgcaggatccttgtctacaactacctcgagaacaacagccttgcgcagacattgctaggtgttctatgctatgctatgcatgccatcgcaggatccaggcacagcaacatccggttcaactggcacgcccgcgccagaatcgctgtcggcgttgcccgtgggctcgcgtttctccacgaggagatccgtccccccatcatccacagggacataaaggcgagcaacattcttctcgacaaggacctcacccccaagatctccgacttcgggctggcaaggctcctgccgcccaacgcgacccatgtcagcacccgagtggcaggaacattagggtacttggctcctgaatacgcgatccgaggccaagtgacgaagaagtccgatatctatagctatggggttcttcttttagagattgtaagtgggagatgcaacaccaacacgagattacctagcgaggaccagttcctccttgagaggacatgggcactctacgagcaaggacgtctagaggacatcgtggacatggacatcggcggcgaccgggacgtcgaggaggcgtgccggttcctgaagatcggcctgctgtgcacgcaagacgcgatggcgcgccgtcccaacatgaccaacgtcgtccggatgctctcgggggagaggaggatcagcgtagagaagatcactaggcccgccatgatctccgatttcgcggagctcaaggtcagcagcaaggagcgaaggccgggcgaggcacgctcgcccacgacggctcccaccacgaaatcgttcaccaccacggagccgttctcgtcgtcggagacgcccacgcagtcgtccatgtgaagtcgtgggcgtacgacgcatttttttttttggtttagtttgtatagtgtgtggacgtgttaggtgggcagggttacaggttttttttttgagtttcttgtttgttttgctgtgaggaaagatctcgtaggcctcttattgcatctttgatcatgtaaatatctgtaaacgaagatgatcaagataagctttgcacgacggttctcattgtcgaactactttggactgctgcaactcggtgattatttggatcagttcaccttacatcttttgggtttttgtcccacagaatacg

SEQ ID NO: 101255 - DNA, 2050 bp, Zea Mays
gcccgcgcccgcgggcacggtgaagaaaccatgccggccgtcgccgttacggctctcccggaccaaccaaacccctccatttatgtaacgccgccgcaaccgccaagccaaggacaaggcaggcactcccggaaaaacaaatcgaggcgaggacgaggggactcgtgcggtggagcagctgatctcgctgcgcttcacacggccacgggtgagcggtgagcctaagcactgacgaagaggaggagcaaagcaacttggggctgggggcggcgagaagtcaaaggctcgcgatcccctaccctcgaggcgccttctcctccttccttccttcaatccttcctcgtctgctccgcctaccccgcacgtttcgctccctctcttttaacaacgcccaccaccgccgcagtcgagcagagcggcggcccctcctctccctccctctcccacggctgcagggccgcttctctacctccactccatctgtagagaattttctcctccccacttgcgggcgtctcgctgaactggttgcgccgccgccgtaccggttggggaggctgcgctccgtctccacagaaactgcttttcctctctgcgggcgcatctgcgactgcgattgcgttggtaaagatggcctgctgctttctgtttggaaagaaagcgaaacaaaccactgaaggcgatgaagatctacatagcgtcaaggtattctcttacagcgagttgagaaaggctacgcaggatttcagcggcgcgaataagattggcgagggcggtttcggttctgtcttcaggggagtgcttaaagatgggacagtggtggcggtgaaagttttatctgctacttcaaggcaaggcatccgcgagtttttgactgagcttacggcgatatccgacatcaagcatgagaatctggtcactctgatcggttgctgcgccgaaggatctcgcaggatccttgtctacaactacctcgagaacaacagccttgcgcagacattgctaggatccaggcacagcaacatccggttcaactggcacgcccgcgccagaatcgctgtcggcgttgcccgtgggctcgcgtttctccacgaggagatccgtccccccatcatccacagggacataaaggcgagcaacattcttctcgacaaggacctcacccccaagatctccgacttcgggctggcaaggctcctgccgcccaacgcgacccatgtcagcacccgagtggcaggaacattagggtacttggctcctgaatacgcgatccgaggccaagtgacgaagaagtccgatatctatagctatggggttcttcttttagagattgtaagtgggagatgcaacaccaacacgagattacctagcgaggaccagttcctccttgagaggacatgggcactctacgagcaaggacgtctagaggacatcgtggacatggacatcggcggcgaccgggacgtcgaggaggcgtgccggttcctgaagatcggcctgctgtgcacgcaagacgcgatggcgcgccgtcccaacatgaccaacgtcgtccggatgctctcgggggagaggaggatcagcgtagagaagatcactaggcccgccatgatctccgatttcgcggagctcaaggtcagcagcaaggagcgaaggccgggcgaggcacgctcgcccacgacggctcccaccacgaaatcgttcaccaccacggagccgttctcgtcgtcggagacgcccacgcagtcgtccatgtgaagtcgtgggcgtacgacgcatttttttttttggtttagtttgtatagtgtgtggacgtgttaggtgggcagggttacaggttttttttttgagtttcttgtttgttttgctgtgaggaaagatctcgtaggcctcttattgcatctttgatcatgtaaatatctgtaaacgaagatgatcaagataagctttgcacgacggttctcattgtcgaactactttggactgctgcaactcggtgattatttggatcagttcaccttacatcttttgggtttttgtcccacagaatacg

SEQ ID NO: 101256 - DNA, 2954 bp, Zea Mays
ccaactggactcgtcgcgccgccgcctctcctccacctccagtcctccactcgtcgcgccgccgcctcctccagccggtgcgccgggccgccgcctcctccagccaagcggcaagcgccagtccggtccggttctttcctctgctgcctcctccagccaagcggaaatcctctgctccagccggtcccaagcggaaatcctctgctccagccggtcccaagcggaaatcctctgctccagccggtccggttctttcctctgctgtctgcttcttcttcctcaattcctctgttgtctgctcttgaacttccccagttcctctgctctgctgctggctgctctccctaatctcctatttttatgcagcatagcactatagcagcaagccagcaacactacagcagccagcaggcagcagcaccctcatcaatcaatggctagcccatcttcagtcaacaatgtcaactatgatccaaagacagacaaagcaaggaaggctaactcaaatgatccaggttggaagtatggttattgggcaaatttggcaaatagagatcaagtgacatgcaccctttgtgacaccatagtttctggagggataaaaaggctaaagcagcatctagcaggtggttatggagatacaaagatatgttcaaagaccactactgcaattagaaaggagatgagggattacttggaatccaaaagaaggaaaagagttattttcctagatgataatgagcagcaagaggaggaagaggaagtaatggtggtggatgcagcagctgaatctgttcaagttcaacaagatgaacctatagaatcccaaggctctaaggtacaaccaagttcagggactgcagccaaacacaggcgtgcaacctatctgtacaaggatacaacatcaatcaagaccaaggcaaatcaagcaagcaagcaaaagtcaattgtggagatgcttcggaaatcacctgaagatgtagttgatgaaaggcgtaaagggtgttctcaacccacaattccatccaagatgaagtccaaagaggagaagaattatgtggatatgcaatgggctttgtggttttatgaatgtggtgtgccatttaatgctgcagcagcaagacaatttcaggttgcagttgaggcaactgcccagtttggttcaggctataagcctccatctccatatcaacttgggcagccattgctaaaggatgctgtgaaattgacaagtactatgagggaggaacatgagagggcatggaagcattatggttgcacgcttatgtcggatggatggtcagataggaggggcaggcatttgatcaactttcttgtgaatagtccagaggggacatacttcttagagtctgtggatgcatcaagtgaagttcatgatgcatttatgctagctgatttattagggaagaaaattgaagagattgggaaagaaaaagtggttcaggttatcactgataatggggctaactacaaggcagcaggtaggatacttatggagaggtttccttcacttttttggagcccatgcgctgcacattgcttagatcttatgctagaagacataggaaacttgaaggaatttaagaagcccattgtacgtgcaagacgtgtcacaactttcatctataggcacggtagaattcttagtttaatgagagagaagacaggtggggcagatcttgtgagagctgcagccactagatttgccactgctttccttactttgaaaagtttgtacaagcacaaggatcctttgaaggccctattttttagtgaagaatggaatggaaacaagttggcaaaaactgctgcaggtaaggaggcttgtgatattgtgctctctgtggagttttggaataaagttgaagattgtcttagagcttcagcccctctcctcattgtacttagagtggttgatggtgatgagaaacctgcaatgccagaggtcgcggcactaatgaaacatgcaaaagagaagatcaagctaagctttgctattgatagcaagaaaagcttacttaagagaatcatagacatcattgagaaacgatggatgaaacaaatggaccatcctttgtatgggggtgctctttatttgaatccaggaaaattgcatcctctcattcgagatgatgatgatgcaactgttggccaactaagaggttgtttccttgatgtgcttgcaagaatggtggatgatgaagaaacaagagccaagattgatgctcaatccttagactatgaagctcttagaggagaggccttctcaaacaaaatggccaagaacaacctggagacaatgaacccacttgattggtggcgttcatatggtgggcgtgctattgagattcaaaggtttgctaggcgtattgttggtctttgtgcttcatcatcgggttgtgagagaaactggagtagatttgagtttatccatacaaagaaacgtaataggttgctgcataagagattgaatgatattgtctatgtttcctacaaccgaaggatgaagactaggtttcaaataaggcgtgagaagaaagggaaaggttttgaccctttggtcattgaagagttcgattgggataatgagtgggctgattcctcctatgtgcagcctcaaggtgctcgtgggtgtgattgtggtgaggatgagaatggccttacatgggaacttgttgatcaagctgtgggtgcatcaagctcgctgcgaggccgaaatcttccaaggaatgccaacaagcgtgcaagagtttcacactcaaggtttgactttgaagaagattttggttcagccaatgaagaagaggaggaccaagatccacatgatgatgttgatgtgactgattctgaagatgcacatgatgatgttggtggagaaaacactgaggctgctccagatgagttcgaagatggatattgactcactaagagtt

SEQ ID NO: 101257 - DNA, 75 bp, Zea Mays
ggtcggcccgagcctagacaactcctgggatctctcctccccgacggggtccctcccgggagcgagatccaggcg

SEQ ID NO: 101258 - DNA, 2705 bp, Zea Mays
cgatcccggtcccgtagctggtggtttgtgcggcggcggcggcaaattcgtgcaatattgcgtatcgcctctgttaacctttacccaggcgtccggacatgcggagggggcacagttttgtatcggttgtggttccgtgcttctgcggtgggattgcggtggattttggggcttcgattttaggtagagcacttcgagctgtgttggcgtagaaaccctagatccgcgatcccggtttggtgctagcctgtttggtttacccactttggtctcgtctatagccatcataggtcgaattactatcaggttcaggtccctattctctgcctcggttcgatggatgaagtccacggtgcacagctcgtcggttaggcagggagtgagtgaaatctgcttcgatctgattaattcctagctcaaacgataccagggatgtttgtgtgccgagcagcctctttgctttgctgtcgctctctagattcattctaaggcgtacctgagtgatattgcatatggtttgtgatggagacttcgccattgatttcttgtcttttttttttttgcaggtgaccctgttctgattctcgtggtttcaggggaggatctaggtccagggagattaatctcgaggttggacctcacatttttatggcctttgactgcaacaaggaaagaggagtttcttcgcctgacagttgctcccgcatttgcaccgagggcactctcgtccaggcaaatcccttatctcactactggaagcctaaacgtttggagaacttcaacaagttggagaaccagaagtccagttatgaatctgctccgagtggctctgatccaaaacaggatgctgaagcgagtgatgaggcaactgcctcactgtgtggcttcaggtgcttcactgatctgccagcttcgttggtctgcgaggtccttgcacgtctcgatgcgaaggaccttggaattgtatcctgtgtctccaccctcctgcacgccttagccacagatcatcagggatggaagaagttatactgcgaaaggtgggggcttccagacctccccaccaccctgaatgggcccttgctgccgggtgtccccctagatgggaagttttggaaaacatttttcgtggagcgggagtttaggagcaaatccttcatgggaagattcaatctggatattctccgtggccacaatgaggatgtgcgtgctgtgtcccttttggtatcagcaaatctgatattcacaggcggccgcgattctgtggttaggatgtggaagatggaggaagggttattgattgatacatcccgtgcacttggtggcaccatccgggcgattgcagctgactcgaggcttttagtgagtggaggaactaatgcctatattcagtgttggagggccgttgaaggcaatggtcaattatttcacatctctggaagtggtaccgaccagaatgcggagtttcgcctctggggtcatgaaggtcctgtgacttgtcttgccctggattcactgaggatttatagtggttcttgggacatgactgttcgtgtttgggacagagaccagatggagtgtgtgcaaaagttcatgcatgcagactgggtttgggatcttgctctgcgtggaaatactgttgccagtactgctggtagagatgcatatgtatgggatatcagggctggcgagttaacaagcttaatttccaatgcccatgttggtagcgcatattcaattgcttggacacacctgccagatgtgctgtttactggtggagaggatggtgctattcgattgttcaatgtttctgatgtctgtgatgatgagggtgacattaaaccagtggcaacttgggtgccacattcaggtcctgttcattctcttgcttttgagtatccatggcttgtgtcagcctcgagtgatggcaggattgcacttattgatttgaggaagcttctgtcctccaaaagttcatcaaagggtctgcgtgttaagagagttgatggaagcgcaatagagcctccacagaggatgcttcatggcgttggatgtgatctcttctccatcgctattggtgcagataggattgtatgtgccggtgaggatggttctgttagagtctggaacttctcagaagcattggagattgagaggagggcacaggctctaaggagtttgaggcaggagaaccgcatcaggcggaggaaatcacaagcggagatgaatacaaatactagaaggcctgaccagtgttcaatagccatgaaaaagaaccaactgaagggtgataagagcgcaacttggcacaacaagcgtgccattaatgagaaggccaagtcttagattaggattgtcattggtagccgttcactgagttgcagtctatcgtggccatacattgccatcactgggtactttcttgttggtcgtacttgagattttattttcactgaagccgggtctagtaacacgttttcaacattgacacattcaaatgttcaactttatgtggttatacaattaccaacttaatatatgcaaatcttctatgcctagcatatattgatcaaaagaaagataagttcctcaaacctttcgagttctgaaagcttttggtcttttagctttcatgttactgtaaaagaatatttagttttcagtgtccgggtatttgtactgaaggcccttctcccttctataaatta

SEQ ID NO: 101259 - DNA, 2788 bp, Zea Mays
cagcgacggcgcagatcgcaaagcaccagggcgatctcgccgcccagcacgggcggttcaggtcaagcctcgcgtcagccgtcaggtctcctccgggcagcgccgcgtgcgtccccccatcccccccattcgacgagagagagattgccccccacccattcgacgagatctcggaggcagcctcgaggtaacctccgtcctccgcgtaacttgtggcttcctttctagctcgattctgattatcccggctggtgatgcgctcttcggtcccgatcccggtcccgtagctggtggtttgtgcggcggcggcggcaaattcgtgcaatattgcgtatcgcctctgttaacctttacccaggcgtccggacatgcggagggggcacagttttgtatcggttgtggttccgtgcttctgcggtgggattgcggtggattttggggcttcgattttaggtagagcacttcgagctgtgttggcgtagaaaccctagatccgcgatcccggtttggtgctagcctgtttggtttacccactttggtctcgtctatagccatcataggtcgaattactatcaggttcaggtccctattctctgcctcggttcgatggatgaagtccacggtgcacagctcgtcggttaggcagggagtgaccctgttctgattctcgtggtttcaggggaggatctaggtccagggagattaatctcgaggttggacctcacatttttatggcctttgactgcaacaaggaaagaggagtttcttcgcctgacagttgctcccgcatttgcaccgagggcactctcgtccaggcaaatcccttatctcactactggaagcctaaacgtttggagaacttcaacaagttggagaaccagaagtccagttatgaatctgctccgagtggctctgatccaaaacaggatgctgaagcgagtgatgaggcaactgcctcactgtgtggcttcaggtgcttcactgatctgccagcttcgttggtctgcgaggtccttgcacgtctcgatgcgaaggaccttggaattgtatcctgtgtctccaccctcctgcacgccttagccacagatcatcagggatggaagaagttatactgcgaaaggtgggggcttccagacctccccaccaccctgaatgggcccttgctgccgggtgtccccctagatgggaagttttggaaaacatttttcgtggagcgggagtttaggagcaaatccttcatgggaagattcaatctggatattctccgtggccacaatgaggatgtgcgtgctgtgtcccttttggtatcagcaaatctgatattcacaggcggccgcgattctgtggttaggatgtggaagatggaggaagggttattgattgatacatcccgtgcacttggtggcaccatccgggcgattgcagctgactcgaggcttttagtgagtggaggaactaatgcctatattcagtgttggagggccgttgaaggcaatggtcaattatttcacatctctggaagtggtaccgaccagaatgcggagtttcgcctctggggtcatgaaggtcctgtgacttgtcttgccctggattcactgaggatttatagtggttcttgggacatgactgttcgtgtttgggacagagaccagatggagtgtgtgcaaaagttcatgcatgcagactgggtttgggatcttgctctgcgtggaaatactgttgccagtactgctggtagagatgcatatgtatgggatatcagggctggcgagttaacaagcttaatttccaatgcccatgttggtagcgcatattcaattgcttggacacacctgccagatgtgctgtttactggtggagaggatggtgctattcgattgttcaatgtttctgatgtctgtgatgatgagggtgacattaaaccagtggcaacttgggtgccacattcaggtcctgttcattctcttgcttttgagtatccatggcttgtgtcagcctcgagtgatggcaggattgcacttattgatttgaggaagcttctgtcctccaaaagttcatcaaagggtctgcgtgttaagagagttgatggaagcgcaatagagcctccacagaggatgcttcatggcgttggatgtgatctcttctccatcgctattggtgcagataggattgtatgtgccggtgaggatggttctgttagagtctggaacttctcagaagcattggagattgagaggagggcacaggctctaaggagtttgaggcaggagaaccgcatcaggcggaggaaatcacaagcggagatgaatacaaatactagaaggcctgaccagtgttcaatagccatgaaaaagaaccaactgaagggtgataagagcgcaacttggcacaacaagcgtgccattaatgagaaggccaagtcttagattaggattgtcattggtagccgttcactgagttgcagtctatcgtggccatacattgccatcactgggtactttcttgttggtcgtacttgagattttattttcactgaagccgggtctagtaacacgttttcaacattgacacattcaaatgttcaactttatgtggttatacaattaccaacttaatatatgcaaatcttctatgcctagcatatattgatcaaaagaaagataagttcctcaaacctttcgagttctgaaagcttttggtcttttagctttcatgttactgtaaaagaatatttagttttcagtgtccgggtatttgtactgaaggcccttctcccttctataaatta

SEQ ID NO: 101260 - DNA, 2507 bp, Zea Mays
atgccagtccaaacgaacctgagaccgagactgcgacctgctcgtcttcgtttcaaagtgacgggggacgggaggcaccaggcgtgctttgctaagtttcagaagcccaaaatgtggataatccccccgatttattccacaaacttgggccccctccctgttcaggaggagtttggttccacagcgacggcgcagatcgcaaagcaccagggcgatctcgccgcccagcacgggcggttcaggtcaagcctcgcgtcagccgtcaggtctcctccgggcagcgccgcgtgcgtccccccatcccccccattcgacgagagagagattgccccccacccattcgacgagatctcggaggcagcctcgaggtgaccctgttctgattctcgtggtttcaggggaggatctaggtccagggagattaatctcgaggttggacctcacatttttatggcctttgactgcaacaaggaaagaggagtttcttcgcctgacagttgctcccgcatttgcaccgagggcactctcgtccaggcaaatcccttatctcactactggaagcctaaacgtttggagaacttcaacaagttggagaaccagaagtccagttatgaatctgctccgagtggctctgatccaaaacaggatgctgaagcgagtgatgaggcaactgcctcactgtgtggcttcaggtgcttcactgatctgccagcttcgttggtctgcgaggtccttgcacgtctcgatgcgaaggaccttggaattgtatcctgtgtctccaccctcctgcacgccttagccacagatcatcagggatggaagaagttatactgcgaaaggtgggggcttccagacctccccaccaccctgaatgggcccttgctgccgggtgtccccctagatgggaagttttggaaaacatttttcgtggagcgggagtttaggagcaaatccttcatgggaagattcaatctggatattctccgtggccacaatgaggatgtgcgtgctgtgtcccttttggtatcagcaaatctgatattcacaggcggccgcgattctgtggttaggatgtggaagatggaggaagggttattgattgatacatcccgtgcacttggtggcaccatccgggcgattgcagctgactcgaggcttttagtgagtggaggaactaatgcctatattcagtgttggagggccgttgaaggcaatggtcaattatttcacatctctggaagtggtaccgaccagaatgcggagtttcgcctctggggtcatgaaggtcctgtgacttgtcttgccctggattcactgaggatttatagtggttcttgggacatgactgttcgtgtttgggacagagaccagatggagtgtgtgcaaaagttcatgcatgcagactgggtttgggatcttgctctgcgtggaaatactgttgccagtactgctggtagagatgcatatgtatgggatatcagggctggcgagttaacaagcttaatttccaatgcccatgttggtagcgcatattcaattgcttggacacacctgccagatgtgctgtttactggtggagaggatggtgctattcgattgttcaatgtttctgatgtctgtgatgatgagggtgacattaaaccagtggcaacttgggtgccacattcaggtcctgttcattctcttgcttttgagtatccatggcttgtgtcagcctcgagtgatggcaggattgcacttattgatttgaggaagcttctgtcctccaaaagttcatcaaagggtctgcgtgttaagagagttgatggaagcgcaatagagcctccacagaggatgcttcatggcgttggatgtgatctcttctccatcgctattggtgcagataggattgtatgtgccggtgaggatggttctgttagagtctggaacttctcagaagcattggagattgagaggagggcacaggctctaaggagtttgaggcaggagaaccgcatcaggcggaggaaatcacaagcggagatgaatacaaatactagaaggcctgaccagtgttcaatagccatgaaaaagaaccaactgaagggtgataagagcgcaacttggcacaacaagcgtgccattaatgagaaggccaagtcttagattaggattgtcattggtagccgttcactgagttgcagtctatcgtggccatacattgccatcactgggtactttcttgttggtcgtacttgagattttattttcactgaagccgggtctagtaacacgttttcaacattgacacattcaaatgttcaactttatgtggttatacaattaccaacttaatatatgcaaatcttctatgcctagcatatattgatcaaaagaaagataagttcctcaaacctttcgagttctgaaagcttttggtcttttagctttcatgttactgtaaaagaatatttagttttcagtgtccgggtatttgtactgaaggcccttctcccttctataaatta

SEQ ID NO: 101261 - DNA, 2250 bp, Zea Mays
cagcgacggcgcagatcgcaaagcaccagggcgatctcggcgcccagcacgggcggttcaggtcaagcctcgcgtcagccgtcaggtctcctccgggcagcggcgcgtgcgtccccccatcccccccattcgacgagagagagtttgccccccacccattcgacgagatctcggaggcagcctcgaggtgaccctgttctgattctcgtggtttcaggggaggatctaggtccagggagattaatctcgaggttggacctcacatttttatggcctttgactgcaacaaggaaagaggagtttcttcgcctgacagttgctcccgcatttgcaccgagggcactctcgtccaggcaaatcccttatctcactactggaagcctaaacgtttggagaacttcaacaagttggagaaccagaagtccagttatgaatctgctccgagtggctctgatccaaaacaggatgctgaagcgagtgatgaggcaactgcctcactgtgtggcttcaggtgcttcactgatctgccagcttcgttggtctgcgaggtccttgcacgtctcgatgcgaaggaccttggaattgtatcctgtgtctccaccctcctgcacgccttagccacagatcatcagggatggaagaagttatactgcgaaaggtgggggcttccagacctccccaccaccctgaatgggcccttgctgccgggtgtccccctagatgggaagttttggaaaacatttttcgtggagcgggagtttaggagcaaatccttcatgggaagattcaatctggatattctccgtggccacaatgaggatgtgcgtgctgtgtcccttttggtatcagcaaatctgatattcacaggcggccgcgattctgtggttaggatgtggaagatggaggaagggttattgattgatacatcccgtgcacttggtggcaccatccgggcgattgcagctgactcgaggcttttagtgagtggaggaactaatgcctatattcagtgttggagggccgttgaaggcaatggtcaattatttcacatctctggaagtggtaccgaccagaatgcggagtttcgcctctggggtcatgaaggtcctgtgacttgtcttgccctggattcactgaggatttatagtggttcttgggacatgactgttcgtgtttgggacagagaccagatggagtgtgtgcaaaagttcatgcatgcagactgggtttgggatcttgctctgcgtggaaatactgttgccagtactgctggtagagatgcatatgtatgggatatcagggctggcgagttaacaagcttaatttccaatgcccatgttggtagcgcatattcaattgcttggacacacctgccagatgtgctgtttactggtggagaggatggtgctattcgattgttcaatgtttctgatgtctgtgatgatgagggtgacattaaaccagtggcaacttgggtgccacattcaggtcctgttcattctcttgcttttgagtatccatggcttgtgtcagcctcgagtgatggcaggattgcacttattgatttgaggaagcttctgtcctccaaaagttcatcaaagggtctgcgtgttaagagagttgatggaagcgcaatagagcctccacagaggatgcttcatggcgttggatgtgatctcttctccatcgctattggtgcagataggattgtatgtgccggtgaggatggttctgttagagtctggaacttctcagaagcattggagattgagaggagggcacaggctctaaggagtttgaggcaggagaaccgcatcaggcggaggaaatcacaagcggagatgaatacaaatactagaaggcctgaccagtgttcaatagccatgaaaaagaaccaactgaagggtgataagagcgcaacttggcacaacaagcgtgccattaatgagaaggccaagtcttagattaggattgtcattggtagccgttcactgagttgcagtctatcgtggccatacattgccatcactgggtactttcttgttggtcgtacttgagattttattttcactgaagccgggtctagtaacacgttttcaacattgacacattcaaatgttcaactttatgtggttatacaattaccaacttaatatatgcaaatcttctatgcctagcatatattgatcaaaagaaagataagttcctcaaacctttcgagttctgaaagcttttggtcttttagctttc

SEQ ID NO: 101262 - DNA, 2242 bp, Zea Mays
actctaagacacaacttaagacactcattatacatgccctcaccattatacatgccctcacttcagtgcagctcgagcatggagcgtagtagagacgaagagcccaaccaatcggcatcgttactgactgtattggtagtgtacatgtccattcatgcgctctctctctctctctctctctctgtatatataccaccatacgtccataccagctccgtgcacgccacagtgtcgtcaagatcgagaagcatacatggacagcaccaacgtggcaagtgcagcgccacggcctcgagcgccatgcagcctccaagccgcactcgtacgcagagccgccgttgtccgcaccaccaccaagaacgcgacgacgagaccacggtcgctgcgcctctcctgcaaggcgggcgacgacgacgacggcgtcgaccgccgcgacgtgctcctcggcctgatggccggcgccggagcggcggctgccgggatcgcgagtaataatacgcacggcagcagcagcgcgctcgcggcgcccgtccaggccccggacctccaggcgtgccggacgcctgacgtccccgcgacggcagcggaccccagctgctgcatgacgtaccgcgccggcctggcgccgccggccattatcgacttccagccgccgcgcgcgtcgtcgtcgtcgtcctcgccgctccgcgtgcgccccgcggcgcacctggtggacagcgcgtacgtggccaagtacgagagggccgtggcgctcatgagggagcttccggacgatgacccgcgcagctttgcgcagcaggcgcacgtgcactgcgcctactgtaacggcgcgtacggccaggccgggttcccggacctggacttgcagatccacaactgctggctcttcttcccgtggcacaggctttacgtgtacttccatgagaggatcctcggcaagctcatcggcgacgactccttcgcgctgccgttctggaactgggacgcgccaggcggcatgacactgccggcgatctatagcagcgcgtcttcaccgttgtacgacgagagacgcaacacggcgcaccagccaccgtcgtttctcggcctcgacttcagtgacaccgaccccgacgacatgccaagggatctgcaggtcgaccagaatctcaaggtcatgtaccgccagatgatctctggcgccaagaggagggagctgttcatggggcagccgtaccgcgcgggcgacgcggcggacccgggcgccggcaccgtcgagaacgtgccgcacgggccgctccacgtgtgggtgggcgacccgacgcagcccaacggcgaggacatgggcaacttctactccgcggcgcgcgacccggtgttcttcgcgcaccacggcaacatcgaccggctgtggcacgtgtggcgcggcctgagcccccgcaacaccgacttcgccgacgccgactggctggacgccagcttccacttctacgacgaggaggcccggctcgtgcgcgcccgcgtccgcgactgcctcgacccggccgcgctgcgctacgcgtaccaggacgtcgggctgccgtggctggacgccaggccggccaggacggcgggggcgggggcgccggcgcccgccacggacggcgtggtgttcccggcgaggctggacaggaccgtgagggtggccgtggcgcggcccagggtctcacggagccaggaggagaaggacgaggaggaggaggtgctggtcgtcgacggcatccaggtcgcggatcacctgaggtacgtgaagttcgacgtgttcgtgaaccagtgcgcgggcggggacgccagcacggcggcggccgagtgcgcggggagcttcgtgctcacgccgcacgtgatccagcagaaggaggaaggaggaggaggctcgccggtcaagacggcggcgaggtttggcatcaccgacttgctggacgatatcggagctgacggggacgttacgatcgtggtgtcgctcgttccgaggtgcgccggcgacgtggtcaccgtggacggcgtcagtgtcacgtacgttaagtgaaagtagtgccgcgcgcgcgagatgatcaatttatacaccctgatccgtctatatacacgtacggatgcccgtataacaagtgctttgaataatgggtgtctgcttatgcttttgtatctgctcctagcgagtggctgaataatactggtccagactatatgaactacaaatagaggacacgtgtcttggtagttgttt

SEQ ID NO: 101263 - DNA, 673 bp, Zea Mays
aaagggccttgcatctccagcgtcggcgtccacgacgccggggaccagcgaccatgcggccactttcctgttgcgctctcgtccgtctccacaatttgtgcagaccaaagacaaagtaagagtgtgctgaaagaagaaattgacctacttaaggtggaaccaaacgaaagcgaagtggatctagaaagaagcatttaacgactggccgcaccagaccaaaccgtagcagaactcaactgaaggcaactgcgggcccgcggccgcaatgagtcaacagatgaagtgtttgagaagacaaattattattctttggggagagtgcataaatcttcgataagcgaaggaatgcagtctatcagatgatgaaaagcagaaggaatcccttctcagagagtgaaatccaaaactggtgctttcaaatatttcaagatctgatttacatgcattcgcatggatatttccaatgcgaccttaatcctgatatgtggttttgcattttttttacaaacaatattgcaatggttgatctatgattcctgtttgttgtgaaacaagtttctagccccaaccattttcacatgacattttagataagaaaatagttctccatatagctcaatcttcatgtttaaaatatcatgtgtatttgactggagggactatcagttataag

SEQ ID NO: 101264 - DNA, 738 bp, Zea Mays
aaagggccttgcatctccagcgtcggcgtccacgacgccggggaccagcgaccatgcggccactttcctgttgcgctctcgtccgtctccacaatttgtgcagaccaaagacaaagtaagagtgtgctgaaagaagaaattgacctacttaaggtggaaccaaacgaaagcgaagtggatctagaaagaagcatttaacgactggccgcaccagaccaaaccgtagcagaactcaactgaaggcaactgcgggcccgcggccgcaatgagtcaacagatgaagtgtttgagaagacaaattattattctttggggagagtgcataaatcttcgataagcgaagtccatgcgaaggatgaaccataaaaactgtgaagatcaaataagtcataagagaatgatttttgagaatgcagtctatcagatgatgaaaagcagaaggaatcccttctcagagagtgaaatccaaaactggtgctttcaaatatttcaagatctgatttacatgcattcgcatggatatttccaatgcgaccttaatcctgatatgtggttttgcattttttttacaaacaatattgcaatggttgatctatgattcctgtttgttgtgaaacaagtttctagccccaaccattttcacatgacattttagataagaaaatagttctccatatagctcaatcttcatgtttaaaatatcatgtgtatttgactggagggactatcagttataag

SEQ ID NO: 101265 - DNA, 3275 bp, Zea Mays
ccgcctcgccctgctgcttcccttcttccgcctccgcctccactccacctccgcctccgcgcccttccgacctcccagtcctcctcatctcgcgattggcgaattatagggtttcgcggcggccacccggatccagctcggcttggtgagcgcctccaaagcttcggatcgcgagagggcgctgtgctcactcgctgttccgccgccgccgcgacgacgacgacgagcttctgtgcgcctgtgcctgggttcggagcccccgtcgcccctccgctggccaccggataccagctcatgatgtggaaatctcagctctaaatccgcttaggttgtgataccgtgacagtgtgggactgacataattgtcactgtgcaagatgttttggcacgtgccaggattctccgctgcatcacctgtggatactattttggacaaggaaaattttaagttggaggatcttcttgatgaggatgaaataattcaggagtgcaaagcactgaatacccgcttaatcaattttttgcgggataaggttcaagtggagcaattgctccgctacattgtagaggaggctcctgaagatgcagaaaagaaacggatatttagatttccatttatagcttgtgaaatatttacatgtgacgtggatgtcatcatgaagacattagtggaggatgaagatcttatgaatttgcttttctccttcctaaaacctgaccaccctcatgggacattgttggctggttactttgctaaggtagtaatttgtttggcgatgaggaagacacttcaactagttcattatgtgcagggccatcctgaaatagttagccagcttgttgatcttattgggattacttctatcatggaggttttgattcgcttaatcggtgcagatgaaactatgtattcaagccatgcagattctatgcaatggttagatgacatacaagtccttgagatgattgttgacaagttcagcacatcagattctgctgaggttcacgcaaatgctgctgaaatcctttgtgcagtaaccagatacgcccctccagcacttgctgcaaagatttccagtccaagcttcgtagggaggttatttcaacatgcttttgaagattcaaggcctaaatcggtgctggtccactcattatcagtgtgcatatctttgttagatcctaagagacttgtatcggcttcctaccaagctttccgtagccagttgagccatggaacacttgtcactgcaagtccagagacagtaaatggcatgctggatagcctaggggatttgttgaagctgctggatgtttcatctgccgaaaatgttctgccaacaacatatggaagcttacaacctccactcgggaaacatcgcttaaagattgttgagttcatctctgttctactatcaattggtagtgaagttgccgaaacgcgactgattcaactaggagcaatccagcacgctatagatctattttttgagtacccgtttaacaacttcttgcaccaccatgtcgagaatatcattgggtcatgtctggagagtaagcaggatcacctgattggccatgtccttgatgagtgtaaacttgttacaagaattctggaagcggagaagaactctgctctgtcgtcagatttaactaagcatacattgtctacagagggaagatgtccaccaaggataggaattgttggtcatatgacacgaatagctaacaagctccttcagctggccaataccaacatcatggtccaatcatatttgcagcaaaattctgattggattgagtggcacaccagtaccctaacgaagcgtaatgcattagaaaatgtttaccagtgggcatgtggtcgaccaacatcactacaggatcgtggtagggatagtgatgatgaagacttccgagatagggactacgatgtggctgcacttgctagtaatttaagccaggcatttaaatatggtatctacagtaacgatgacattgacgaggctcaagcatcacttgagcgggatgatgaggatgtatattttgatgatgaatctgcagaggtagtaatctcctcccttcgccttggagacgaccaagaaagtggctcgctctttacaaattccaactggtttgcatttgacgaggacaaggcactgaatgatggtttggttagcccagaagcttccccatctccaaattcagaaatatccgcactaaaagaggatgatgaagtcattcttggcgaagtaatagatgacacagaaggttctgaaccaactctaccagtctccaacaaagacgcaaacgaagagtctggtcacaccgtcttggcaaatggtaccattgacaaacaggaagatgatatcaggccactgactccggatgtaaaagagagtcaacccgagtttgtggaatggaaggaggaagaagctgaacctggtgatgttgctgagaaggatactgcagttcctggtattgaggttgaaagtgagaagcagctgaattccatggacgatgttatgctttgtgatgccgagttaggagaggaaaagaagagtggtggtatgcttggatcttcagcacctgaggcagaagcagcatcgcctgtttcatctgacatcgattcaatcaagcacccggaacaagctgctgacagtgctgtatcagagtatccaatgggcgaacaaaatcctgagatatgaaatgaatttgagggcagcagagttccgctcacgtgatggcggatgatgatggacgtgcaggaagcacttggaactggttggaccattactgtacaagcagtttgaggatcatgtgtgggttttctgttctactctcttggaggaaggtggtcccggaacatgcatctgatggagcctcaaaggttccacttagtctcatggagatgcttaggttcgatgtgtaacatattcatggagacgcaaaattcagaaagttgacttccctgcccttttccttaatcagtggggttctggttgtgtcactctggtaaatagccgataattgaataggtgatatctggtctggctacatgtccattactgtagttggtgctatttgtacgaaagttttggctcaaatgcagtcagttgattcttgtcatatttagaacttgtttgaaatttgtgtaaacgaaaaaaatatagcttctatttttcccaggtgcttggtgcttaattcatctgttataaatatagattttattttcccctcttgttctttgttttccccagcagaacagaaaaagaaaa

SEQ ID NO: 101266 - DNA, 2664 bp, Zea Mays
tcccccacttggctagctcgcgctcccatttctttcccaacgtctctctgtccagcctccgcctctcccctgtgccctccccagtccccagtccccaccctgccctgcctgcgctttccacaccgctccgcgtgcgccgcacgtagcccgcacctccgcctgccgtgccgtgccgtgctctgctcctcacccgatgctgccgccggcgcggtccgtcccgagccacaggcggagatgagctccaggaaccgctccgccgcctcgtgcgctgccccggctgcagcaccatctctccggacgccgcgccgcctcaggcggcgaccggttaaggcggcagcaccggggccgggcggcggcgggcggcggagcgggcccgcgacgccgctgctgaaatgggacgtgggcggccggcgtggtgagggcacgaaggctgccgacgaagcgggggacgccgcgcgggcgcgggagaccaaggcgagggaggtgtcagtgcggaggctcgcggccggagtctggcggctgcgcccgccggaggccgtggccggcgccggcgccggcggcgagaacagggtccgtgtgggtgtcgagcatatcccaaggcatctacaagtccagcttctgaagcagaacacttcaggtcatcaccagagtttgaagaatgaggtttcaagccccatatctgttctggagcggaagagtggagagctccacaaggtacaacttcacgctacctctgccatgcttcctgtcgctaccatggagaaggcaacgaaatgggagcctggggacataaagggaatggagtcacatgatgcgtatctgatagccagccagctaaatcttcttgatgaacagcaagacacagtgtatgttgctggcctccagatggagctccagcaagcacgtgataggataagtgagctggaaaccgagcggcggtcggctaggaagaagcttgatcacttgttcaagaaacttgcagaggagaaagcagcttggagaaacagagagcatgaaaaggtgcgtgctatcctcgaagatatgaaggcagaccttgaccatgagaagaaaaacaggaggcggctggagatgatcaacttgaaactcgtcaatgagctgaaggaggccaagatgtcagcaaaacagctgttacaagattatgagacagagaggaaggcgcgtgagctcaccgaggaggtatgcaacgagctagcaagagaggtgggggaagacaaagctgagattgaggccttgaaacgggactccctgaggttgcgagaggagctagacgaggaacggaagatgctccagatggctgaggtgtggcgtgaagaacgggtgcagatgaagctcgtcgatgcaaaacttactcttgacgccaaatacacacagctgagcagactgcaacatgttgttgaggcgtttattgccgcacgcagtactgcaaatggagacataacagtagtagaggaagcagagaacataattcaggcaatcaagtcagtcagagcccaaggcgctgaattcagatatgagccaccggcggcatcggaagacatattttccatctttgaagagctgcgtccaagtgaggagcctgtcattaaggagattgagccatgctacacgaatagctctgccaaatgtgaatcggaaattcaacaggttagcccaatgaccgatatattcctcgaaacgaaagccaaagtttactcaaacaaaagccctaaagatgaaagcgacgccgaagatggcagcagctgggagacaataagccatgaagacatgcggggttcgagcggttcgcctgatggaagcgaaccttcagtcagcaataagataagcatttcttggaacagcagaaatggtttcgagtacagggagaacgagaagctggaagatgacttagctgatgcctacctggcaagcatgaaccaacccaagaagaaagaatcggccatttcaaagctctggaagtcgtcccgcccaaagaacagtgaggtatgcaagaaagatgcagtcgttgaaacggtgaatgcaagaccgtctaatgcacggcactcagtggggacttattccactgttgaaagtggcatccaagaaactggactcagtccaccgagcgtcgagcagtggagctcgccggactcgatgaatatccaattcaaccggggcttcaagggctgtatagagtacccacggacgtcccagaagcacagtttgaaggcaaagctcatggaggcacggatggagagccagaagatccagctccgccaggtcctcaagcagaagatctagtgcaggccagaaccagaggacgaaatattgtaaacctagattttaatccaaggaataatggcaaggagtacctagatgcttcatttttttctcctgttttagagtaacctgtaatgcatgtacaacaagggctagagagaaaaaaaaggacagggatggccttggtgggctgtccggactccggagcctttgctgcttctgtatcttactttagttttggtgttatggtcggatctggtaggctatggtgagatctagcatgatgtataatacagacacaaacaagcagcaacgttgagacaaattgcatccctttgtaaacagttctccggtgttttccataaccattttttgtgtgtgaaactc

SEQ ID NO: 101267 - DNA, 2119 bp, Zea Mays
aattttccctcattttcctggggctgctgcgccgcgcttctctctctcgccttctccctcttcgcggcgatccgggttccgctgcaacggcccctgtcgactgtcgtcttctcttctccctcacggcgctcgatccctccggattgccgcgtagcgggatcagtgattcagctggttgaacagaactagtaaagatgtcatcagaagggaacaaagatgtgcctaatgaagctttgtccgtggatctgtcatcgatttctggtgcaaagcgcaagcgtggccgcccaaggaaatatgagcatcctgcatatgaactaccacagaaggtacagcccctccaaagcgccccgcctcttcactgctcacaagatggctcaagtatggccagccatacatcaggcggctatgctcatggtagttggtccgcacaacctaggaattcggttaatgcttctattcaaggtaattctggcaaggatgacgttctcggcaagcattttgttggcaagctgaccaagaaaatccctgggttttccctcattacggtaaaagtgaaggacaatcaggtgctcaaaggttgggttccagatgaaattaatctccgtccaataacacctaaggatgaccttgccccagagctacccatgcttcgaccgagtcatgttcggaagcgagcatcagcaatccacatgcaaacagctcttactgtgccattgcacttggaggatattacacttgcaaagcctctgcagatgaggaggcctgtcgaggaaactattgctaagcactctgtgcctcttgctcctaggccttacatgggttctggtgttgttgcgccagtacctatatcagttgcacttgcacccaataatcctgaattgacaagtttgaccaggcaggatgctgaacttgtcatcccacaatcatcagttgctgcagtgccaattacatctgttcctccatgcaagcaactggctaatcaaaacgagtttactgaaaagaattatgttgatgagtttcagaaagattcagaatctcgaaatgtaaccaaggagttaccaggggaaaggcaacagcttaatgatcaagtgacagatgtggttacagaatcttctggtcaaatccagaatactgatgcaacagtgtctgataagatcaagataacatcaggcacaatataattttatactcctgatttctgattccatattattttgttaaaacttaaaagtgaccattaagtgggggttttcttcaggcgccagagatcagccaaatcctgcaaatagtgagcagcatgagcagcagagttctaaggaaccatcaggtgatatatgatcccaatgtttcacacacttaaaaaaactggccatgatcttatatcgtgggtatggaaatttagacatcacagaacaatatgagcagatgaagacagagaccgatgtccaaaaaggagttgatgcctcaaagtcagatgcctcagttccagatgacattcagcctgcgtgtgatgaacaagaaatcaaggttggctgtaaatgaaagtagagatcaagattcaagaaacacaacacagatcatgatgtttctgtcaggcgtattgggatgtggagctggagttttactgaatggcccaatgctttaggtgtaggcccatttttttacattttagattaagtagagatacatatttttttaaaaaaaaccaacaaacagcagtgtagcacagatagaatcgcaaacgagaaaaaaggagacagaaacatacttggtcttttcaattttaggaagatggcatgccttaaaagttaattttgaactcctaatcttgtaatataactttgggcccgtttggttcctttagttctgagactaaagtttagttatgagactagagtttagttttggttttatggactaaaagtattcaaaacgcattaaatgaatcataagaccgtctgtagcagtctactcatagtttacctaaaattactgttttacactttctgcactgtagactgtaccattcgtagagtagagtttgaatatgagtatgaggatatgtaagctgttggagatagtctaagaggactaaaatacccttaagcattcttttgat

SEQ ID NO: 101268 - DNA, 2041 bp, Zea Mays
aattttccctcattttcctggggctgctgcgccgcgcttctctctctcgccttctccctcttcgcggcgatccgggttccgctgcaacggcccctgtcgactgtcgtcttctcttctccctcacggcgctcgatccctccggattgccgcgtagcgggatcagtgattcagctggttgaacagaactagtaaagatgtcatcagaagggaacaaagatgtgcctaatgaagctttgtccgtggatctgtcatcgatttctggtgcaaagcgcaagcgtggccgcccaaggaaatatgagcatcctgcatatgaactaccacagaaggtacagcccctccaaagcgccccgcctcttcactgctcacaagatggctcaagtatggccagccatacatcaggcggctatgctcatggtagttggtccgcacaacctaggaattcggttaatgcttctattcaaggtaattctggcaaggatgacgttctcggcaagcattttgttggcaagctgaccaagaaaatccctgggttttccctcattacggtaaaagtgaaggacaatcaggtgctcaaaggttgggttccagatgaaattaatctccgtccaataacacctaaggatgaccttgccccagagctacccatgcttcgaccgagtcatgttcggaagcgagcatcagcaatccacatgcaaacagctcttactgtgccattgcacttggaggatattacacttgcaaagcctctgcagatgaggaggcctgtcgaggaaactattgctaagcactctgtgcctcttgctcctaggccttacatgggttctggtgttgttgcgccagtacctatatcagttgcacttgcacccaataatcctgaattgacaagtttgaccaggcaggatgctgaacttgtcatcccacaatcatcagttgctgcagtgccaattacatctgttcctccatgcaagcaactggctaatcaaaacgagtttactgaaaagaattatgttgatgagtttcagaaagattcagaatctcgaaatgtaaccaaggagttaccaggggaaaggcaacagcttaatgatcaagtgacagatgtggttacagaatcttctggtaagatctagaattttatgtttgaagtgtaataattggcatagtgcatgtagacggaagtctccatagctctttctcctggcaggtcaaatccagaatactgatgcaacagtgtctgataagatcaagataacatcaggcgccagagatcagccaaatcctgcaaatagtgagcagcatgagcagcagagttctaaggaaccatcagacatcacagaacaatatgagcagatgaagacagagaccgatgtccaaaaaggagttgatgcctcaaagtcagatgcctcagttccagatgacattcagcctgcgtgtgatgaacaagaaatcaaggttggctgtaaatgaaagtagagatcaagattcaagaaacacaacacagatcatgatgtttctgtcaggcgtattgggatgtggagctggagttttactgaatggcccaatgctttaggtgtaggcccatttttttacattttagattaagtagagatacatatttttttaaaaaaaaccaacaaacagcagtgtagcacagatagaatcgcaaacgagaaaaaaggagacagaaacatacttggtcttttcaattttaggaagatggcatgccttaaaagttaattttgaactcctaatcttgtaatataactttgggcccgtttggttcctttagttctgagactaaagtttagttatgagactagagtttagttttggttttatggactaaaagtattcaaaacgcattaaatgaatcataagaccgtctgtagcagtctactcatagtttacctaaaattactgttttacactttctgcactgtagactgtaccattcgtagagtagagtttgaatatgagtatgaggatatgtaagctgttggagatagtctaagaggactaaaatacccttaagcattcttttgat

SEQ ID NO: 101269 - DNA, 1956 bp, Zea Mays
aattttccctcattttcctggggctgctgcgccgcgcttctctctctcgccttctccctcttcgcggcgatccgggttccgctgcaacggcccctgtcgactgtcgtcttctcttctccctcacggcgctcgatccctccggattgccgcgtagcgggatcagtgattcagctggttgaacagaactagtaaagatgtcatcagaagggaacaaagatgtgcctaatgaagctttgtccgtggatctgtcatcgatttctggtgcaaagcgcaagcgtggccgcccaaggaaatatgagcatcctgcatatgaactaccacagaaggtacagcccctccaaagcgccccgcctcttcactgctcacaagatggctcaagtatggccagccatacatcaggcggctatgctcatggtagttggtccgcacaacctaggaattcggttaatgcttctattcaaggtaattctggcaaggatgacgttctcggcaagcattttgttggcaagctgaccaagaaaatccctgggttttccctcattacggtaaaagtgaaggacaatcaggtgctcaaaggttgggttccagatgaaattaatctccgtccaataacacctaaggatgaccttgccccagagctacccatgcttcgaccgagtcatgttcggaagcgagcatcagcaatccacatgcaaacagctcttactgtgccattgcacttggaggatattacacttgcaaagcctctgcagatgaggaggcctgtcgaggaaactattgctaagcactctgtgcctcttgctcctaggccttacatgggttctggtgttgttgcgccagtacctatatcagttgcacttgcacccaataatcctgaattgacaagtttgaccaggcaggatgctgaacttgtcatcccacaatcatcagttgctgcagtgccaattacatctgttcctccatgcaagcaactggctaatcaaaacgagtttactgaaaagaattatgttgatgagtttcagaaagattcagaatctcgaaatgtaaccaaggagttaccaggggaaaggcaacagcttaatgatcaagtgacagatgtggttacagaatcttctggtcaaatccagaatactgatgcaacagtgtctgataagatcaagataacatcaggcgccagagatcagccaaatcctgcaaatagtgagcagcatgagcagcagagttctaaggaaccatcagacatcacagaacaatatgagcagatgaagacagagaccgatgtccaaaaaggagttgatgcctcaaagtcagatgcctcagttccagatgacattcagcctgcgtgtgatgaacaagaaatcaaggttggctgtaaatgaaagtagagatcaagattcaagaaacacaacacagatcatgatgtttctgtcaggcgtattgggatgtggagctggagttttactgaatggcccaatgctttaggtgtaggcccatttttttacattttagattaagtagagatacatatttttttaaaaaaaaccaacaaacagcagtgtagcacagatagaatcgcaaacgagaaaaaaggagacagaaacatacttggtcttttcaattttaggaagatggcatgccttaaaagttaattttgaactcctaatcttgtaatataactttgggcccgtttggttcctttagttctgagactaaagtttagttatgagactagagtttagttttggttttatggactaaaagtattcaaaacgcattaaatgaatcataagaccgtctgtagcagtctactcatagtttacctaaaattactgttttacactttctgcactgtagactgtaccattcgtagagtagagtttgaatatgagtatgaggatatgtaagctgttggagatagtctaagaggactaaaatacccttaagcattcttttgat

SEQ ID NO: 101270 - DNA, 1719 bp, Zea Mays
attttcctggggctgctgcgccgcgcttctctctctcgccttctccctcttcgcggcgatccgggttccgctgcaacggcccctgtcgactgtcgtcttctcttctccctcacggcgctcgatccctccggattgccgcgtagcgggatcagtgattcagctggttgaacagaactagtaaagatgtcatcagaagggaacaaagatgtgcctaatgaagctttgtccgtggatctgtcatcgatttctggtgcaaagcgcaagcgtggccgcccaaggaaatatgagcatcctgcatatgaactaccacagaaggtacagcccctccaaagcgccccgcctcttcactgctcacaagatggctcaagtatggccagccatacatcaggcggctatgctcatggtagttggtccgcacaacctaggaattcggttaatgcttctattcaaggtaattctggcaaggatgacgttctcggcaagcattttgttggcaagctgaccaagaaaatccctgggttttccctcattacggtaaaagtgaaggacaatcaggtgctcaaaggttgggttccagatgaaattaatctccgtccaataacacctaaggatgaccttgccccagagctacccatgcttcgaccgagtcatgttcggaagcgagcatcagcaatccacatgcaaacagctcttactgtgccattgcacttggaggatattacacttgcaaagcctctgcagatgaggaggcctgtcgaggaaactattgctaagcactctgtgcctcttgctcctaggccttacatgggttctggtgttgttgcgccagtacctatatcagttgcacttgcacccaataatcctgaattgacaagtttgaccaggcaggatgctgaacttgtcatcccacaatcatcagttgctgcagtgccaattacatctgttcctccatgcaagcaactggctaatcaaaacgagtttactgaaaagaattatgttgatgagtttcagaaagattcagaatctcgaaatgtaaccaaggagttaccaggggaaaggcaacagcttaatgatcaagtgacagatgtggttacagaatcttctgctctttctcctggcaggtcaaatccagaatactgatgcaacagtgtctgataagatcaagataacatcaggcgccagagatcagccaaatcctgcaaatagtgagcagcatgagcagcagagttctaaggaaccatcagacatcacagaacaatatgagcagatgaagacagagaccgatgtccaaaaaggagttgatgcctcaaagtcagatgcctcagttccagatgacattcagcctgcgtgtgatgaacaagaaatcaaggttggctgtaaatgaaagtagagatcaagattcaagaaacacaacacagatcatgatgtttctgtcaggcgtattgggatgtggagctggagttttactgaatggcccaatgctttaggtgtaggcccatttttttacattttagattaagtagagatacatatttttttaaaaaaaaccaacaaacagcagtgtagcacagatagaatcgcaaacgagaaaaaaggagacagaaacatacttggtcttttcaattttaggaagatggcatgccttaaaagttaattttgaactcctaatcttgtaatataactttgggcccgtttggttcctttagttctgagactaaa

SEQ ID NO: 101271 - DNA, 1770 bp, Zea Mays
aattttccctcattttcctggggctgctgcgccgcgcttctctctctcgccttctccctcttcgcggcgatccgggttccgctgcaacggcccctgtcgactgtcgtcttctcttctccctcacggcgctcgatccctccggattgccgcgtagcgggatcagtggtttagaggagaggaagcgctgattgacgctaaccgggtgttcttaccatttttagattcagctggttgaacagaactagtaaagatgtcatcagaagggaacaaagatgtgcctaatgaagctttgtccgtggatctgtcatcgatttctggtgcaaagcgcaagcgtggccgcccaaggaaatatgagcatcctgcatatgaactaccacagaaggtacagcccctccaaagcgccccgcctcttcactgctcacaagatggctcaagtatggccagccatacatcaggcggctatgctcatggtagttggtccgcacaacctaggaattcggttaatgcttctattcaaggtaattctggcaaggatgacgttctcggcaagcattttgttggcaagctgaccaagaaaatccctgggttttccctcattacggtaaaagtgaaggacaatcaggtgctcaaaggttgggttccagatgaaattaatctccgtccaataacacctaaggatgaccttgccccagagctacccatgcttcgaccgagtcatgttcggaagcgagcatcagcaatccacatgcaaacagctcttactgtgccattgcacttggaggatattacacttgcaaagcctctgcagatgaggaggcctgtcgaggaaactattgctaagcactctgtgcctcttgctcctaggccttacatgggttctggtgttgttgcgccagtacctatatcagttgcacttgcacccaataatcctgaattgacaagtttgaccaggcaggatgctgaacttgtcatcccacaatcatcagttgctgcagtgccaattacatctgttcctccatgcaagcaactggctaatcaaaacgagtttactgaaaagaattatgttgatgagtttcagaaagattcagaatctcgaaatgtaaccaaggagttaccaggggaaaggcaacagcttaatgatcaagtgacagatgtggttacagaatcttctggtcaaatccagaatactgatgcaacagtgtctgataagatcaagataacatcaggcgccagagatcagccaaatcctgcaaatagtgagcagcatgagcagcagagttctaaggaaccatcagacatcacagaacaatatgagcagatgaagacagagaccgatgtccaaaaaggagttgatgcctcaaagtcagatgcctcagttccagatgacattcagcctgcgtgtgatgaacaagaaatcaaggttggctgtaaatgaaagtagagatcaagattcaagaaacacaacacagatcatgatgtttctgtcaggcgtattgggatgtggagctggagttttactgaatggcccaatgctttaggtgtaggcccatttttttacattttagattaagtagagatacatatttttttaaaaaaaaccaacaaacagcagtgtagcacagatagaatcgcaaacgagaaaaaaggagacagaaacatacttggtcttttcaattttaggaagatggcatgccttaaaagttaattttgaactcctaatcttgtaatataactttgggcccgtttggttcctttagttctgagactaaa

SEQ ID NO: 101272 - DNA, 1918 bp, Zea Mays
aattttccctcattttcctggggctgctgcgccgcgcttctctctctcgccttctccctcttcgcggcgatccgggttccgctgcaacggcccctgtcgactgtcgtcttctcttctccctcacggcgctcgatccctccggattgccgcgtagcgggatcagtggtttagaggagaggaagcgctgattgacgctaaccgggtgttcttaccatttttagattcagctggttgaacagaactagtaaagatgtcatcagaagggaacaaagatgtgcctaatgaagctttgtccgtggatctgtcatcgatttctggtgcaaagcgcaagcgtggccgcccaaggaaatatgagcatcctgcatatgaactaccacagaaggtacagcccctccaaagcgccccgcctcttcactgctcacaagatggctcaagtatggccagccatacatcaggcggctatgctcatggtagttggtccgcacaacctaggaattcggttaatgcttctattcaaggtaattctggcaaggatgacgttctcggcaagcattttgttggcaagctgaccaagaaaatccctgggttttccctcattacggtaaaagtgaaggacaatcaggtgctcaaaggttgggttccagatgaaattaatctccgtccaataacacctaaggatgaccttgccccagagctacccatgcttcgaccgagtcatgttcggaagcgagcatcagcaatccacatgcaaacagctcttactgtgccattgcacttggaggatattacacttgcaaagcctctgcagatgaggaggcctgtcgaggaaactattgctaagcactctgtgcctcttgctcctaggccttacatgggttctggtgttgttgcgccagtacctatatcagttgcacttgcacccaataatcctgaattgacaagtttgaccaggcaggatgctgaacttgtcatcccacaatcatcagttgctgcagtgccaattacatctgttcctccatgcaagcaactggctaatcaaaacgagtttactgaaaagaattatgttgatgagtttcagaaagattcagaatctcgaaatgtaaccaaggagttaccaggggaaaggcaacagcttaatgatcaagtgacagatgtggttacagaatcttctggtcaaatccagaatactgatgcaacagtgtctgataagatcaagataacatcaggcacaatataattttatactcctgatttctgattccatattattttgttaaaacttaaaagtgaccattaagtgggggttttcttcaggcgccagagatcagccaaatcctgcaaatagtgagcagcatgagcagcagagttctaaggaaccatcaggtgatatatgatcccaatgtttcacacacttaaaaaaactggccatgatcttatatcgtgggtatggaaatttagacatcacagaacaatatgagcagatgaagacagagaccgatgtccaaaaaggagttgatgcctcaaagtcagatgcctcagttccagatgacattcagcctgcgtgtgatgaacaagaaatcaaggttggctgtaaatgaaagtagagatcaagattcaagaaacacaacacagatcatgatgtttctgtcaggcgtattgggatgtggagctggagttttactgaatggcccaatgctttaggtgtaggcccatttttttacattttagattaagtagagatacatatttttttaaaaaaaaccaacaaacagcagtgtagcacagatagaatcgcaaacgagaaaaaaggagacagaaacatacttggtcttttcaattttaggaagatggcatgccttaaaagttaattttgaactcctaatcttgtaatataactttgggcccgtttggttccttt

SEQ ID NO: 101273 - DNA, 1840 bp, Zea Mays
aattttccctcattttcctggggctgctgcgccgcgcttctctctctcgccttctccctcttcgcggcgatccgggttccgctgcaacggcccctgtcgactgtcgtcttctcttctccctcacggcgctcgatccctccggattgccgcgtagcgggatcagtggtttagaggagaggaagcgctgattgacgctaaccgggtgttcttaccatttttagattcagctggttgaacagaactagtaaagatgtcatcagaagggaacaaagatgtgcctaatgaagctttgtccgtggatctgtcatcgatttctggtgcaaagcgcaagcgtggccgcccaaggaaatatgagcatcctgcatatgaactaccacagaaggtacagcccctccaaagcgccccgcctcttcactgctcacaagatggctcaagtatggccagccatacatcaggcggctatgctcatggtagttggtccgcacaacctaggaattcggttaatgcttctattcaaggtaattctggcaaggatgacgttctcggcaagcattttgttggcaagctgaccaagaaaatccctgggttttccctcattacggtaaaagtgaaggacaatcaggtgctcaaaggttgggttccagatgaaattaatctccgtccaataacacctaaggatgaccttgccccagagctacccatgcttcgaccgagtcatgttcggaagcgagcatcagcaatccacatgcaaacagctcttactgtgccattgcacttggaggatattacacttgcaaagcctctgcagatgaggaggcctgtcgaggaaactattgctaagcactctgtgcctcttgctcctaggccttacatgggttctggtgttgttgcgccagtacctatatcagttgcacttgcacccaataatcctgaattgacaagtttgaccaggcaggatgctgaacttgtcatcccacaatcatcagttgctgcagtgccaattacatctgttcctccatgcaagcaactggctaatcaaaacgagtttactgaaaagaattatgttgatgagtttcagaaagattcagaatctcgaaatgtaaccaaggagttaccaggggaaaggcaacagcttaatgatcaagtgacagatgtggttacagaatcttctggtaagatctagaattttatgtttgaagtgtaataattggcatagtgcatgtagacggaagtctccatagctctttctcctggcaggtcaaatccagaatactgatgcaacagtgtctgataagatcaagataacatcaggcgccagagatcagccaaatcctgcaaatagtgagcagcatgagcagcagagttctaaggaaccatcagacatcacagaacaatatgagcagatgaagacagagaccgatgtccaaaaaggagttgatgcctcaaagtcagatgcctcagttccagatgacattcagcctgcgtgtgatgaacaagaaatcaaggttggctgtaaatgaaagtagagatcaagattcaagaaacacaacacagatcatgatgtttctgtcaggcgtattgggatgtggagctggagttttactgaatggcccaatgctttaggtgtaggcccatttttttacattttagattaagtagagatacatatttttttaaaaaaaaccaacaaacagcagtgtagcacagatagaatcgcaaacgagaaaaaaggagacagaaacatacttggtcttttcaattttaggaagatggcatgccttaaaagttaattttgaactcctaatcttgtaatataactttgggcccgtttggttccttt

SEQ ID NO: 101274 - DNA, 1830 bp, Zea Mays
aattttccctcattttcctggggctgctgcgccgcgcttctctctctcgccttctccctcttcgcggcgatccgggttccgctgcaacggcccctgtcgactgtcgtcttctcttctccctcacggcgctcgatccctccggattgccgcgtagcgggatcagtggtttagaggagaggaagcgctgattgacgctaaccgggtgttcttaccatttttagattcagctggttgaacagaactagtaaagatgtcatcagaagggaacaaagatgtgcctaatgaagctttgtccgtggatctgtcatcgatttctggtgcaaagcgcaagcgtggccgcccaaggaaatatgagcatcctgcatatgaactaccacagaaggtacagcccctccaaagcgccccgcctcttcactgctcacaagatggctcaagtatggccagccatacatcaggcggctatgctcatggtagttggtccgcacaacctaggaattcggttaatgcttctattcaaggtaattctggcaaggatgacgttctcggcaagcattttgttggcaagctgaccaagaaaatccctgggttttccctcattacggtaaaagtgaaggacaatcaggtgctcaaaggttgggttccagatgaaattaatctccgtccaataacacctaaggatgaccttgccccagagctacccatgcttcgaccgagtcatgttcggaagcgagcatcagcaatccacatgcaaacagctcttactgtgccattgcacttggaggatattacacttgcaaagcctctgcagatgaggaggcctgtcgaggaaactattgctaagcactctgtgcctcttgctcctaggccttacatgggttctggtgttgttgcgccagtacctatatcagttgcacttgcacccaataatcctgaattgacaagtttgaccaggcaggatgctgaacttgtcatcccacaatcatcagttgctgcagtgccaattacatctgttcctccatgcaagcaactggctaatcaaaacgagtttactgaaaagaattatgttgatgagtttcagaaagattcagaatctcgaaatgtaaccaaggagttaccaggggaaaggcaacagcttaatgatcaagtgacagatgtggttacagaatcttctggtcaaatccagaatactgatgcaacagtgtctgataagatcaagataacatcaggcgccagagatcagccaaatcctgcaaatagtgagcagcatgagcagcagagttctaaggaaccatcaggtgatatatgatcccaatgtttcacacacttaaaaaaactggccatgatcttatatcgtgggtatggaaatttagacatcacagaacaatatgagcagatgaagacagagaccgatgtccaaaaaggagttgatgcctcaaagtcagatgcctcagttccagatgacattcagcctgcgtgtgatgaacaagaaatcaaggttggctgtaaatgaaagtagagatcaagattcaagaaacacaacacagatcatgatgtttctgtcaggcgtattgggatgtggagctggagttttactgaatggcccaatgctttaggtgtaggcccatttttttacattttagattaagtagagatacatatttttttaaaaaaaaccaacaaacagcagtgtagcacagatagaatcgcaaacgagaaaaaaggagacagaaacatacttggtcttttcaattttaggaagatggcatgccttaaaagttaattttgaactcctaatcttgtaatataactttgggcccgtttggttccttt

SEQ ID NO: 101275 - DNA, 2875 bp, Zea Mays
cttttgcagccaaacctcctgctggacaaccagcagctccagctactgcagcagcaacacctgctggaccagatcccggcgacgacggcggagagcggcgacaacatggggcgcggcggcggcggggtgtccgacccgctgctgggcgacgagttcgagagcaagtccggcagcgagaacgtggacggcggcgtctccgtggacgagctgcaggaccccaaccagcggcccagcaagaagaagcgctaccaccgccacacccagcaccagatccaggagttggaagctttcttcaaggagtgcccgcacccggacgacaagcagcgcaaggagctgagccgggagctggggctggagcccctccaggtcaagttctggttccagaacaagcgcacgcaaatgaagaaccatcacgagcggcaggagaactcgcagctgaggtccgagaacgagaagctgcgcgccgagaacatgcggtacaaggaggccctgagcagcgcgtcgtgccccagctgcggcgggccggccgcgctcggcgagatgtccttcgacgagcaccacctccgcgtggagaacgcgcggctgcgggaggaggtcgacaggatctcctccatcgccgccaagtacgtgggcaggcccatggtgcccttccccgtgctgtccagcccgctggccggggccggggcacgcgcccccgcgttgccgccgctggacatggcgccgccgtatggcgctgccgctgacatgttcggcggcggcggtgtcgtcgctgctgctggtgctgccggtgccggggacctgctgctgaggggcgccgccgtgcagtcggacgccgacaagcctatgatcgtggagctggccgtggcggccatggaggagctggttcggatggcgcagctggacgagccgctgtggaacgcgcccgcggggctcgatgggtccgctgaggaggagacgcttaacgaggaggagtacgcgcgcttgttccccggcgggctcgggcccaagccgtacgggctcaactcggaggcgtcgcgtgacagcgccgtcgtcatcatgacccatgccaacctcgtcgaaatcctcatggacgtgaaccagtatgcggccgtgttctcgagtatcgtgtcgagagccgcgacgctggaggtgctatcaaccggcgtggctgggaactacaatggtgcattgcaagtgatgtcggtggagtttcaggtgccttccccactggtgccgaccagggaaagctacttcgtgaggtactgcaagcagaacgccgacggaacatgggccgtcgtcgacgtctcgctggacggcctgcgccccggcgcagtcctcaagtgccggcgccggccgtcgggatgcctgatccaggaaatgcccaatggctactcgaaggtgacctgggtggagcacgtcgaggtggacgacaggtcggtgcacagcatctacaagctgctggtgagctcggggctggccttcggtgcacgccgatgggttgggacgctggaccgccagtgcgagcgccttgccagtgtcatggccagcaacatcccgaccagcgacatcggtgtgatcactagcgcggaggggaggaagagcatgctgaagctggcggagaggatggtgatgagcttctgcggcggcgtgacggcctctgcggcgcaccagtggacaacgctgtccggcagcggcgctgaggacgtccgcgtcatgaccaggaagagcgtcgacgaccctggcaggccgcccggcatagtcctcaacgctgccacctcgttctggctccccgtcccgcccaagcgtgtcttcgacttcctccgtgacgaaagctctcgcagcgagtgggacatcctctccaatggcggcgttgttcaagagatggctcacatcgccaacggccgcgaccatggaaactgcgtctcgcttcttcgtgtcaatagcacgaactcgaaccaaagcagcatgctgatcctccaggagagctgcaccgacatgtcgggctcgtacgtcatctacgccccggtggatgtggtcgccatgaacgtggtcctcaacggcggcgaccctgactacgtggcgctcctgccctctggcttcgcgatcctgcccgacggcccatcgtcagggagcagcagcatgctgcaaggcgacggcggcgtcggctcaggtgggtcgctcctgacggtggccttccagatactcgtcgactctgtccccaccgccaagatctcgctggggtcggtggccacggtgaacagcctcatcgcctgcaccgtggagcgcatcaaggcggcggtgatctccggccagagcaatccccagcagcagtagcttcgttgaatccaacagtgttcttatcctttgcattgaaggagcagcaaaattttagagctttcgtcagtgggaagtcaagaacgcacctcagactctcctgcttgccatgtggtgctcatagttccctttactttttcgcctagtttcccccaaaatttctggggttatttcaagaaacacttcagtcgccgaaggaaacgagtcaccacgacgcaagggtagttggttcgggtattgacttcctcttcatgttggcctctcggatgctgcttcctctgaatttaggcttcttctcttgtggtgtacaaaaccgttatttagcatgtaatttgtgctgctgctgctgctgcacctgttcagacttgttcagtatccaggattcccccaatagagatttgtgtcccttaatacctctgcacagtgcttgtgtctagccgccatttcagtcccaaaaatgtgcctgtgtaacgcggttgcatgcttgcattattgttcaatgtcttcgttgctattttgcagctttaagttcacaattaat

SEQ ID NO: 101276 - DNA, 816 bp, Zea Mays
ttttttttgtttttttgagtgagccccatgtggcctcaaatcaaatgataaaatgtactttatatggagtaaatttctggtggtagttgctgaaagaatgatttcttttggcagaatgcgttggagcagttggcatccattgatctcatcgagctatgcaaggaggccagaattgagcgctgccgtgcaactagagacttgagtagctgtggccgctatgtgcaccatgtgcttaactcatgtggccatgcctcattatgtgctgagtgcagccaaagatgtgacgtctgcccaatctgcaggagtccaatatcggacaatggaaatagggttcagctacgtctttactacaagtgcctggaagcgggccttatttctaagcagcacgatgacaggtttcaggaaaaggaagaccatggcaatcctgttagcatggatgtccagcggctgcattcattgtttgatgttgcagtccagaacaatcttacttcccttatttgccactatatcacagatgtttgtttggatgagaatgctgtgtcaagtgatccacttctggcttttcttttggatgaggtggtcatcaaggactggtgcaagaaggctgttaatgcgctcattactgagattggcgtgatctataagtttggattagaaatgatgagatctaagttatcccaactgcaaaagtttgccacacagttggcaggaatttacagtgtacttgaagttatggtttcatctttcaccgaagcggtttcagcgcatgttaatgacctgcatcaactcattgagaacacattgaaggcaaagcag

SEQ ID NO: 101277 - DNA, 299 bp, Zea Mays
attggttggaagacgacggcagctttctgtggattggtgtgttccttcttgcccaggggtgtttgttggttgttacaggcggcacggtgcgtgaccgagtctggtctgatgtgctctggcgtgcaggagggtgtgagatgaccgaccgtcggaaggaagggcctctctctctggtcactgcagcatctcctctgtactaaaatgatatagttctagatttggattgagtcaaaccttttaaattttaactaaatttaaaattattattattatttatgaatataagggtattgtttggt

SEQ ID NO: 101278 - DNA, 459 bp, Zea Mays
atggaaaataggtttcgaacaataagagagctgggatccaagggaaaaagaagcaacccactggtgcttgaagagtttatgtgggaaaatgaatgggttgaagaaaataatgaagctgatggtgatagcagcatatggcatgctgtggatgaggcgttaggggcaactcatgctctccaaggcagaaatttgccaagattagctgctgcaggtgctgcttcaagttctcggcctcaacgaacctatgttaggacaaggaagcgttcaagaaatgcagcagcacaagatattggagaagatgatagtgatgctcaagaagatggtaatgctacaacagatgcagaagaacaacaagaacaaccactagaagcaactagagatatggaccaagatgaatctgaatctggaggagggaaagctgctgctaatgctttttgcttggatgctgatctgctctag

SEQ ID NO: 101279 - DNA, 1122 bp, Zea Mays
ctgccctcctcgggtccttccaacctcggcctctccgcgcccgccgccacattgccatcgccatcgccgccgcatccacccacgggcccaccaaacgacctcgctgcgcccacccgtccgcccccatctagctcagcggtcccgcacaaccgaccactcggcagaatgccgccgcttcggcctccgccgccgcggctcctgctcaacaacgtctcgtgcatgcggaacgcgcagacggtgctccgcgacatcaacctcagcgtccacgacggcacagccctcgtcctgaccggtgcgaacggctccggcaagaccaccctcctccgcatgctggcgggcttttcgcgtccctcggcgggggagatcctctggaatggtcacgacatcacctccccgggcgttttccagcagtacaagctgcagctcaactggatgtcgctcaaggacgccgtcaaagagaagctcacggtgctcgagaacgtccagtggttcgagctcctcgaggggaaggacggcagcaggtcgggcccagccatcgagctcatgggcctcggcaggctcatgaacgagaaggccaggatgctctccatggggcagaggaagcggctgcagctcgccaggctgctcgctatcgaccgacccatctggctgctggacgagccctcagtcgcgctggacgcagagggtaccaggctgcttgaatacattatcgcagagcatcggaagaagggtggcatcgtgtttgtggccacacatctgcccattcagattgaggattctatgtcgcttcggcttccgcagaggtttccccggaggaagacgctggttgatcttgtccgctgatgtcaatgtgagattgtgagcacaggaatttagctgtatctctctaattcctctccagctatctgtctgattgctgttggagcaattactctggtgctgcatttgtcatcctatttttgacaacatggcaacacattgtcgatgttgataatctgtaggggtctttgtgatcaccgattcgatgcattggcccatgtatttggggacactagaaagcatttgccatggctgatatatgtatggctgttctttgtgatcatggttttgatgcattgaccc

SEQ ID NO: 101280 - DNA, 3477 bp, Zea Mays
cggagtctcgttcccctccgaccgaggacccaagccccaaggttctccatctccaggtgacccctccgcctcgatcccgtaggatttttcagctgatttcttcgccaagcggcatgtatacccgtgtttgtgaacgatttgggcttgccgcccgccgcttgtgatgcgatccggtatttttttggtgaatattgcggagtgctatgcgtacgcagatcttgctgttcctctaactgtctagtgtgtttcgttcgagatttcttgctctgctatggacgttcagtagctattctcatgctggcgatgatatccacttacttcatacttcgatgttgcactgtgttcagctatggagcaccatataattcagcaagtcggagagcatgagggggaggaggaggaggatggcatgggaacagaagcggcattcgagggggtgcacaatcacgacactttcaggtacaagcacaagaagaggtccaaggtgtgggaggagtacaaacccatcttcctgaacgggaaggttcagtttgcagagtgcctgtactgccacagccgcatgagctgcaaggactccaatggaacgagccatctctggcggcaccagaagatctgccctggcaagagggacgtggtgtttcggcggctcaaggattcctacttcccatgtgttttggtgaatcagagtgaaccggttacaccaggtgattcggtgaatcagattatttcagagacacttgacgacataagttcagtaattcccaatagattcaaatccaaggtgtggagagagttttcacctatctatgttgagggtaagctccaggctgctgactgcgtgcattgccgcaaacgcctcagtgcaaataagtttgggggaagaagccatctgagtcgacatctgcagacctgtcaggcacgaaggggctacaataatcagaagggaacgctttacccttctagtgttcctgatttgaagtccattgggcaagatgagctctcacctgccttggcaaatgggaaggttcacatagcaggatactccagcaaacatctctggtctagtagctctgctgacacttcccctattgtccggcccattcaagtgtcggcgcatcaacctctgccatcacaagattttccaagcctggggaaacagagaacctcatttacaaccacaactagtgacataaggaaggttgaccaaggaacagcttatcaagaactagccaggatgatagtttcgcatggttatcctttatcaattgtagagcatgaagaaatgagaagatttgtaaagagcctcaaccctatgattcatgcagatgcagtctcacacaatgatatagaaggacattgctgtgctctatttgagaaggaaaaggcaaaacttaaagatcaattgaccctttcctcccggcgtgtctctttgtcagcaagcatatggactcctgagggagccgaaccaacagtaaattacctttgtttgacagcacattttattgataaaaactggaaagttcaccgaatgataatcaagtttggcatgtttcggtcctcacctactgatgtggaaaggatggtacatcataaggaggcttgtgtaccagagtctgaatgtggagcatataatgtcatatgggatgccattagagattggaatcttgatcagaagattttgagcttgacttctgttggtgaggttaggaatgctttaagttcctcaaagctgaaggaaatacttgtggagaaaaaatgccttcctatcagaggcaagctatatgatgttgcttgtgttgatgatgtccttaacactattgcttccaaagtgcagcaaaatatcattcaccttgtcggtgacatggtaacagagttttttgttgcacatacatcttcatcgttgaatcaacaacagcttatggaagtcatttcacagatgagtctgaagtgtccacaagaagatgctaagtggtggtacaaattttattttcggcttgaagtttttttgcatttcaataagccatttccttttgaagaagcagcatctccagagcatgtcatagttgctgagtctatttgcaagattttgaggacgttttatcgtgttattgaagtcatttctgcctctagttctccgacagcaaacatgtacttcaatgagatatggaaagtgagaacagtcttgcaagaagaagcatcaagtgagcatgcagaaatcactgcgatggtcgcagagatgcaggaaacattcaatgagtactggcaacattcatacttatggttatgcatacctgttatcctagaccctagattcaagttcggtttcattgagttccgtctgaaacgagcttttggattaaaatcagcaagctacttatctggcatacgtgaaacactccaggaactcttcaatgaatactgcagtccagtggatcagccgaatgtgcgtgtgccaaaaagcgaatcttttagtctagatgacaacgactcatttgaagattgggaccagcacctcaatgagcaagcgagcagtcagaaatccacggaactcgataactaccttgcggacggtttggttccaaggaaggatgacttcgataacctgaactggtggatgtgtcacgccacaaagtacccgacactggcggctatcgtgcaggacatcctggcgatgccagcatctgctgttccatcagaagcagcgttcacaagcagtggaccagtaattccaaagcaccacagcatgctaagcatcaagaccattgaggcacttgtttgcactcgagattggatgagataaagcggttacggtcatactgtgctctgtttatcgatatggctctggaacttctgttccttgcatctttgcctataaacatgaatacatgacgtgctgctgctggcccagaaaacttggcaccccagattgtgtaccctgaactctgaacaaccaatgatgggatgcagttttgttcaggggatggtcctggctcccaaccagtgggatccagtccccagccaggattgggtggtggatcctgtgaaattcctgcgttagaaacaggccctcagaggtttggtaggtgtacctgacttggttccatgtgtgtacagttgctcgatgtagttgcagatgtagttgcagatctgcggcccaaaacagagctaagctaattgtaatgttgcaggcatgctttattggtgatcttggacacttctggttctggaatagcatccctagtggctataccagttcgttgcaaatggactcgcggttgaaagaataaactgagctactacttcagtccaatgttgcataggaaacatatatggctggtttggtggccagggatcatcaggccagacaatctttctctaacaccataataccatcgccacaattatgtgtagtagcacatcttatcttgtactaccattattcatggtggcgtccacagcgaaaagtaaccgtacgcg

SEQ ID NO: 101281 - DNA, 2700 bp, Zea Mays
gaccgaggacccaagccccaaggttctccatctccagctatggagcaccatataattcagcaagtcggagagcatgagggggaggaggaggaggatggcatgggaacagaagcggcattcgagggggtgcacaatcacgacactttcaggtacaagcacaagaagaggtccaaggtgtgggaggagtacaaacccatcttcctgaacgggaaggttcagtttgcagagtgcctgtactgccacagccgcatgagctgcaaggactccaatggaacgagccatctctggcggcaccagaagatctgccctggcaagagggacgtggtgtttcggcggctcaaggattcctacttcccatgtgttttggtgaatcagagtgaaccggttacaccaggtgattcggtgaatcagattatttcagagacacttgacgacataagttcagtaattcccaatagattcaaatccaaggtgtggagagagttttcacctatctatgttgagggtaagctccaggctgctgactgcgtgcattgccgcaaacgcctcagtgcaaataagtttgggggaagaagccatctgagtcgacatctgcagacctgtcaggcacgaaggggctacaataatcagaagggaacgctttacccttctagtgttcctgatttgaagtccattgggcaagatgagctctcacctgccttggcaaatgggaaggttcacatagcaggatactccagcaaacatctctggtctagtagctctgctgacacttcccctattgtccggcccattcaagtgtcggcgcatcaacctctgccatcacaagattttccaagcctggggaaacagagaacctcatttacaaccacaactagtgacataaggaaggttgaccaaggaacagcttatcaagaactagccaggatgatagtttcgcatggttatcctttatcaattgtagagcatgaagaaatgagaagatttgtaaagagcctcaaccctatgattcatgcagatgcagtctcacacaatgatatagaaggacattgctgtgctctatttgagaaggaaaaggcaaaacttaaagatcaattgaccctttcctcccggcgtgtctctttgtcagcaagcatatggactcctgagggagccgaaccaacagtaaattacctttgtttgacagcacattttattgataaaaactggaaagttcaccgaatgataatcaagtttggcatgtttcggtcctcacctactgatgtggaaaggatggtacatcataaggaggcttgtgtaccagagtctgaatgtggagcatataatgtcatatgggatgccattagagattggaatcttgatcagaagattttgagcttgacttctgttggtgaggttaggaatgctttaagttcctcaaagctgaaggaaatacttgtggagaaaaaatgccttcctatcagaggcaagctatatgatgttgcttgtgttgatgatgtccttaacactattgcttccaaagtgcagcaaaatatcattcaccttgtcggtgacatggtaacagagttttttgttgcacatacatcttcatcgttgaatcaacaacagcttatggaagtcatttcacagatgagtctgaagtgtccacaagaagatgctaagtggtggtacaaattttattttcggcttgaagtttttttgcatttcaataagccatttccttttgaagaagcagcatctccagagcatgtcatagttgctgagtctatttgcaagattttgaggacgttttatcgtgttattgaagtcatttctgcctctagttctccgacagcaaacatgtacttcaatgagatatggaaagtgagaacagtcttgcaagaagaagcatcaagtgagcatgcagaaatcactgcgatggtcgcagagatgcaggaaacattcaatgagtactggcaacattcatacttatggttatgcatacctgttatcctagaccctagattcaagttcggtttcattgagttccgtctgaaacgagcttttggattaaaatcagcaagctacttatctggcatacgtgaaacactccaggaactcttcaatgaatactgcagtccagtggatcagccgaatgtgcgtgtgccaaaaagcgaatcttttagtctagatgacaacgactcatttgaagattgggaccagcacctcaatgagcaagcgagcagtcagaaatccacggaactcgataactaccttgcggacggtttggttccaaggaaggatgacttcgataacctgaactggtggatgtgtcacgccacaaagtacccgacactggcggctatcgtgcaggacatcctggcgatgccagcatctgctgttccatcagaagcagcgttcacaagcagtggaccagtaattccaaagcaccacagcatgctaagcatcaagaccattgaggcacttgtttgcactcgagattggatgagataaagcgattgtgtaccctgaactctgaacaaccaatgatgggatgcagttttgttcaggggatggtcctggctcccaaccagtgggatccagtccccagccaggattgggtggtggatcctgtgaaattcctgcgttagaaacaggccctcagaggtttggtaggtgtacctgacttggttccatgtgtgtacagttgctcgatgtagttgc

SEQ ID NO: 101282 - DNA, 4154 bp, Zea Mays
agggcccaccgtctcttctcacatcctcgcagttccacccctgtccccttccacctccctccccagtgcccccctccgctttctccatcccgcctccgatccggccacccgccaccgccgacaccgggcgacccgtcccaccgccgcgccgctccaggggaaccgtccgggcaggcgggggaggatggagtccatcatagcgcgggcgctggagtacacgctcaagtactggctcaagtccttctcccgcgaccagttcaagctccagggccgcaccgcgcagctctccaacctcgatatcaatggcgatgcgctgcacgcgagcctggggctgcctcccgcgctcgccgtcgacacagcgcgtgtcgggaagctccagatcacgttaccatctctatcaaatgtgcaagtagagccaattgaggtgaacattgacaagctcgatctcgtgcttgtagagaaggacgattctgaaaatctttccagccctagcagcactgcatcatctccatcagcaactaagagcagtggatatggttacgctgacaagattgcagacggaatgacagtgcaagtagggattgttaacctgctactggaaacacatggaggggctcaccgtcaaggggatgcaacatggtcaccgccactagcagcaatcacattccgtgatcttgtattgtacacaacaaatgaaaaatggcaggtagtaaacttgaaagaagcaagagatttctccaacaacaaagggttcatttatgtttttaagaaactggagtggcaatcactgtcagttgatctgttgcctcatcctgatatgttcgccgatgcaagatttaactcttctagtagtcaagacgacaaaagagatgatgatggtgcaaaacgaatgttttttggtggtgaaagatttttggaaggaatatctggagaggctaacatcacggtccagcggacagaacagaataatccacttgggcttgaggttcagctacatattacagaagctgtctgtcctgccttaagtgaacctggcttacgggcctttcttcgatttatgactggggtatctgtgtgcctaaacaggggagatatagatccaaaagctcaacagcttgcagaagcagcaggatcttcattggtgtccattatcgtagatcacatattcctctgcattaaagatactgagtttcaacttgaacttctcatgcagtctttgttcttctcacgggcaagcatttcagacggcgaatgctcaaagaacttatcttgcatcaaggtcggcgggatgtttctgagagacaccttttctcgccctccatgcacattgatacagccgtctatgcaagcagtttcacaagaacctccacctgtgcctgacttcggtcaaaatttttgccctcctatatatccatttggcaatcaactattagactttgctgctggagttcctttgttttccctctattgtcttcagaccaccccttctccatcacctccgaagtttgcttcaaaaacagtcatcacatgccagtctatcatggtaaccctccaggagcaatcgtgcttaagaattgcttcattcttggctgatggagttgtacccaatcgtggtgccatattgccagagtcttcaatcaacagcctgacattttcacttaaagagtttgatctctctgttccattagatactgatgaaatcgcaaggtgcagtggaaccaagaatactaacccccaatcatcattttcgggtgcaagactgcatgtggaagacctatacttctgccagtcaccatcaactaagtgtccattgctaaaccttgacagagatccagcttgcttccttctgtgggaatatcaacctgttgatgcgagtcagatgaagtgggctacttggtcttctcacctaagtctctcacttgaaacttctagcacttcaaatggacagagagcagtcagtgattctaatttgtggaaatgtattgaactagatgatatccgatttgaggtagctatggttacagcagatggtgggcctttgttggatgtaccacctccagagggtgttgtaagaattggtgttgctttccaacagttcaagtccaacacctcagttgagcaattgttttttgtgttaggtttttatacttactttggtcaagtagcagaacgtatctcaaaggtcagcaacgctaacaagtctgagtcagtgaagtcatcggctgacaagtcggagaataaactgccaagtgatacagctgtgagtttaactatgaataatctccagctcaatttcttagaatctttgtcagcaagtgatgtacatatgcccttggttcagtttggcggaggggatctgttcctgaaagtttctcaccgcactctaggtggtgcctttgcagtcacgactaatttgatgtggacaactgtttcggtgaactgtttagaaggagaaagtgctattgtttgtgagcatggcactgcagtgactggtgaacacagcattttagtgcatggaaatgggcaccccaagatgagagctgtcttttgggttgatcataggagcaaacaccaggttaaagaacctcagttccttgatataaacatcactcatgtaatgccttacgatatccaggatatggagtgccatagcttgaatgtatcagctaaggtatctggtgttcgtcttgggggtggaatttcttacactgagtctttactgcatcgatttggtatcctgggtcctgatggcggtccaggggaaggtctcttgaggggtttgaaggatttatcttcaggcccacttgcgaagctgtttaaatcctctcacctcactgaaaaggaagatgaaaggtccaaaattgatgatcacaattcaaagtttgatctcggggtgccagatgatcttgatgtatcaattgaacttagaaattggctatttgcacttgaaggaactgaagaagtaggataccttttttctcctcgtggaggtgatggtatcagtagagaagaaaaatgctggcattcaaccttcaggaatctacatatctctggcaagagcagtgaccgacttaaattgggaggcagaagaaaggtgtcacccgaaaaggcatttccagtggaacgctttacggctggaattgaaggtttgcaggcaataaaacctcgtctgagagatcagtgcactaaaaaaggaccatcaaacaatcatgagatgggcagagattttaatagttcaagttctgttggtgaccatggagttgatgtcgaagctaccatggtcattggcgaagacgagattgagggtgccaaatggacaatggataatgtcaaattttctgtcaaagaaccaatcgaggcggttgcaacaaaagaagaactagagcaccttgtgatgctttgcagatctgaggctgatgcaatggggaggatcactgctggaattcttcgtctccttaaacttgacaaatctcttgggcaaggaactatagaacaactacgtaacctaggaagtggaggcatggacaatatcttttcacccaggaggctcagcaggcagaacagttttggtagcataggcactcctcggactccaactatgcaagccattgcagacgtcatgggttcgaaaaccacactggaagcaactatttcctcattacaaggcgagatttccgaatccaaggccaaatgtatggcactgatttctcaggcaagcagcactgaggatcaaaaccgtgccgaggacatcaggcagcttagcgaaaagctcgagagcatgcaatcgttggtgacacgattgagaactttgatcatttgatctgactatctgagttgtgcatggttttttttgtgtacagtacacaaggtcgttctgttcaaactcggaagtggcaaatgctgcttcctggtggctggttgagttattcttttgtgtacatttatatatcttgggaggcggtgtgtaaagattaaggggggtggaataatcggttgataggcagctggaggaaattttgtaggcagctggtactggcaaatatgctttgtagcacggcatcatatgatcaaacgggtcactaagaagagtgcagtgccatttatatcattgtatgtataaaatgtgcacagaacgtgcttttcgcgcacaaaaa

SEQ ID NO: 101283 - DNA, 4120 bp, Zea Mays
cccctcctaggctcaccaagtcaccagtcactaccactccgccagccaggcgctccctccatttccgacgcggcgcgccgaggtctgcacggacgcgcctcggtcactccgtcttcccacctctccggtctccgctggtcgtggtctcgagttccctcgcttgcttacgggaggcaacgacacgaccccgattcgagtggcgaccgggggaaccgcgtcttcgttccgtcgggggccgcctccgggtactccattctccggccccgcgattcccttcctcgcctgctgctgaggatcaagtcctcttctagtaagacaccgcgggctccaggaggcgcggcccaggctgctgatcctcgcccctggaccggtagacactgtggtggtgactggtagtattagtgattttaaatggcttcagcaagaaaagtaagaaacgcgaataagcgttatgccaaaatcaatgaagactggcaggataaagatacaccaagtgtacctaaaagtaaagtgcgaaagaaaaagttatcggacatgcttgggtctcagtggagcaaagatgagctcgagcgcttctatggtgcctacagaaaatatggaaaagattggagaaaggttgctggcactatccgcgatagaacatctgatatggtgaaggctctttacaacatgaataaggcatatttatctcttccagagggaacagcaactgctgcggggttaatcgcaatgatgaccgatcactataatattctggatggaagtaacagtgatcgagaaagcagtgattcaccaaaagcttctaggaggctacagaagcgtggtcgtgcaaaacttcaatctgtgtctaagacatctgatacacattttactgatctgttgcaacctcagcctgcttcatcgagctatggatgcctttctttgttgaagaaaaaacgttctggagacctatttgtagggaaccggccacgtgctgttgggaaaaggactccaagagtacctgttgcaagcatgtaccatcgagatgacaggggtgcaccaaatagacaagctaaaccggatgctaatgatggtgatgatgaaggagctcatgtagctgcacttgctctggcggaggtacatcaaagaggaggctcacctcagatttcccatacacctcggagatctggtgatcatatgtttttgtctcctgctaaaagtagtggcagaaaaaacgctgattcagagatgggaagctcaaagctccatggatttcagttggatgctgattaccctgaaggtagcttgggaagtagggaagccgagactggtgattataccaaaggcacatcctatttgatagccaacaaaggatctccatctagcaagcctcagaagaaagtcaagaggcctcaaaagaggagaaaaaaagctgtacgcagaacggatgatcagtttgaggatgatagagaggcttgtagtggtactgaagaagggtgcagcatgaaaaaggcaaaagaggaaccagagctggagacattgggaaccaaaactgcatggccatctagcacatcaaataaaagaagtcgccaactcttttttgatgatgaaagtttggctctagatgcattacatactttagctgatctatctgtgaatatcctacaaccatcttctgttgttgaatctgaatcatcagcacagatcaaggatgaaaaaagggacaatgattctgatggaaagcctggtatacctgcagcagctgtatcggtgtatgagcagaaagataactccaaaagtacatcaaagaaactcaaaaggcagccagaaatggcaagcactgatatggttactaggaaaaaaggcaaacttgctaaagatactcatcctgatgggagcaccacttctgaagtaaaacagcaagcttgtacatgtggtgtgaaaacagaaaaaaagaagaaatcttccatgggaaagattttaaaagatgaaaagaaaatgccaaaagatgttgagaagactgaggtttctcctgaagaagagaagacatcttctaacaaaaccatggatatcgcagagacaactacacaagttgcaacaactctgcatgctgacttgatggcaaagggtaaaagccgtcgtaaactaggcattcaaaaatcactaactcaagaatgtaaacctgccgagggtgctggcgattctggaagtgataaattgtcttactcactaagtaatattattgatctcaaggacaaactctctcattgcttatcatcacgtttgctccgtagatggtgcatgtttgagtggttctatagtgcaattgattacccgtggtttgcaaagagtgaatttgttgagtatttgaaccatgtcaagctaggtcatgttccaagactgactcatgtcgagtggggtgtcatacgaagttctcttggaaagccccgtcgattgtcgaagcagtttttgcacgaggagagagagaagcttgcgcagtatcgtgattcagtcaggcagcattatactgaacttctatctggcgttagagaaggtctaccaaccgatcttgcgcgacctctagcagttgggcagcgtgttatagcctgccatcctagaacaagggaacttcatgatgggaatgttcttactgtcgatcataatcagtgccgggttcagtttgatcgacctgaactgggtgttgagcttgtgaaggatatcgactgcatgcccctacatcctctggaaaattttcctgaatctctcagacatcaaagtgccatcaatggatactacagccacttatcggaagcaaaatatgaggatcagatgaaagagttggctagcggaggtgcagcaagatccacatcgaatttgaatggtaccgatgcaaccttctataccccttctggtcatccgatgagtaccttaatgaagcaagcaaaggccaacacggcagttaatgaggttgcagttgcgacacaacagtcaatgtacaatcaaccatgcacactttcgcagatacaggaaagagaagctgatataagagctcttggtgagctatcacgtgctcttgataaaaaggaagctttgctggtggagttgaggcacatgaatgaagaagtgtctggaaagcagaaagatggagaaattattaaagacttggagcatttcagaaagcaatatgctatggtgcttgtgcagctaagagattctaatgatcaagtggctgcagctttgctttcgcttcgccaacgcaatacatatcatgggaattcagggcagtctaaatctatggaaaatggcatagcccttgctggagcaccagatccgtataaccttttcagttatattaatccagagtctggttctcaagtgatcgaagttatcgagacttcaaagtccagggcaaaaatgatggttgatgttgctatccaggctatgtgcaaagtgagtgaaggagagaatgctttttcaaaaataggggaagcactagatcacttgaatagccgcggtactggctctggttcaagtatacttggcataagacggatacctcccgattcaggacagtcaaatgcatcttatcatgacgactgcacagcggcccctgcagcaaacagcagttcaaggttgccgaacggctgtgattcggaagctcaatttcccaaagagttgatatcatcctgcgttgctatgatgcttatgataaagaactgcacggagaagcagtatcaccctgctgaagtcgcgcacatcctcgattcggcactgtcaagcgtacaaccgtgcagctcccagaacatcccgatcttcagagagatcgaaatgtgcatgggcatcatcaagaaccaaatgctggcgttgatacccactccaagtggctaagcttcaatcctgccgcgggtatttaactaatgtactctgaaaacgaaaaaacggatacctgtatgtgatgtgcaatattcctttttttgctgttgtctgtatgtacaaggcgtgtgttattattcattgcctgttattattatattcaactggggtaaaaaaaaatatcatgtactctgtctccctttctccctctttctcaaggatgcatttcactccatctttttatgtctaactaataactaattggtaa

SEQ ID NO: 101284 - DNA, 1462 bp, Zea Mays
ccacccgctaacggcgacgacgactgcttccccagtgggagacctgcaatcctcagccacctgcccctccccctcccccatctccgttcacctcttcccctcttccctaccttcctgtattcgcggcgtcgagtgccgccgcccttcgccggcgccgagcacggagcaacgcaccagtttcagtacctggattcgaactgagagtggattacgaagtcatggcaaggttatgttgcttcggcgccggttgctccgatttcacggggcaagggtcaatagcatccggtaaagggaaaggctgtcaagggcaagtcaagatctgctatggatataaccttgtaagagggatgacgaatcatccaatggaggactatcattttgccgaacttgttgatgtcaaaggaaacgagcttggtctttttgctatttatgatggtcatttaggggataccgttcctatgtatttacagaagaatttatttacaaatattttgaatgaggaagagttttggacacacacagatagagcgattataaaagcgtatgaaaaaacagaccaagctattctgtcacatactccagatctgggacaaggtggctccactgctgtaaccgccattcttgtgaacggcaggaagttatgggtagctaatgttggcgattcaagagctgttcttttgaaaggtggtgagcccatacagatgtcgatagaccatgatccgaatgttgagcggagtgtaatcgaaaataggggtggttttgtttcaaatatgccaggagatgttccccgagtatgtggtcagttggctgtctccagagcttttggagacaggaatctaaaatcactattgagatcagagcctgatataaaaatcgaagacatagatcacactgccgagctacttgttcttgcgagtgacggtctttggaaggtgatgaacaatcaagaggttgtcgatttggccaaaaggtacaaggatccctatgctgctgccaagcaattaaccgtcgaagcacaaaaaagagatagtaaggatgatatatcatgcatcgttgttcggttcaaggcgtaagtcggtctcgaaggattttcatcgagagcaaaaaaacaagtgaattaggctgcctgacgatggtagtgataatctgatggttgaataatgactggggtgttggatgtaaatgatttgtctgctccaatgtaaagttcatatataagtatgctaggattatttggtttggcgatttcaaaggtacaggtgcgagggcccgagagctactaaatagctaccatctgtaaataatggttatattggatgttgaatttgtaagagtagactgagcaaaagacatctggatagttcctaaaagaacaaggtactctttatgttcagaaagttctacaggtgtgtatgtgcttcagttagattttaaataaatcctagcaaggtggaagaggaat

SEQ ID NO: 101285 - DNA, 1415 bp, Zea Mays
cccggttgaccattccaacaggccccacccgctaacggcgacgacgactgcttccccagtgggagacctgcaatcctcagccacctgcccctccccctcccccatctccgttcacctcttcccctcttccctaccttcctgtattcgcggcgtcgagtgccgccgcccttcgccggcgccgagcacggagcaacgcaccagtacctggattcgaactgagagtggattacgaagtcatggcaaggttatgttgcttcggcgccggttgctccgatttcacggggcaagggtcaatagcatccggtaaagggaaaggctgtcaagggcaagtcaagatctgctatggatataaccttgtaagagggatgacgaatcatccaatggaggactatcattttgccgaacttgttgatgtcaaaggaaacgagcttggtctttttgctatttatgatggtcatttaggggataccgttcctatgtatttacagaagaatttatttacaaatattttgaatgaggaagagttttggacacacacagatagagcgattataaaagcgtatgaaaaaacagaccaagctattctgtcacatactccagatctgggacaaggtggctccactgctgtaaccgccattcttgtgaacggcaggaagttatgggtagctaatgttggcgattcaagagctgttcttttgaaaggtggtgagcccatacagatgtcgatagaccatgatccgaatgttgagcggagtgtaatcgaaaataggggtggttttgtttcaaatatgccaggagatgttccccgagtatgtggtcagttggctgtctccagagcttttggagacaggaatctaaaatcactattgagatcagagcctgatataaaaatcgaagacatagatcacactgccgagctacttgttcttgcgagtgacggtctttggaaggtgatgaacaatcaagaggttgtcgatttggccaaaaggtacaaggatccctatgctgctgccaagcaattaaccgtcgaagcacaaaaaagagatagtaaggatgatatatcatgcatcgttgttcggttcaaggcgtaagtcggtctcgaaggattttcatcgagagcaaaaaaacaagtgaattaggctgcctgacgatggtagtgataatctgatggttgaataatgactggggtgttggatgtaaatgatttgtctgctccaatgtaaagttcatatataagtatgctaggattatttggtttggcgatttcaaaggtacaggtgcgagggcccgagagctactaaatagctaccatctgtaaataatggttatattggatgttgaatttgtaagagtagactgagcaaaagacatctggatagttcctaaaagaacaaggtactctttatgttcagaaa

SEQ ID NO: 101286 - DNA, 1486 bp, Zea Mays
cccggttgaccattccaacaggccccacccgctaacggcgacgacgactgcttccccagtgggagacctgcaatcctcagccacctgcccctccccctcccccatctccgttcacctcttcccctcttccctaccttcctgtattcgcggcgtcgagtgccgccgcccttcgccggcgccgagcacggagcaacgcaccaggtccgcccgtggttccagcggaggtctcgctgattgttgggacttacggatttctcgccttttttttgtttctaaaagtttcagtacctggattcgaactgagagtggattacgaagtcatggcaaggttatgttgcttcggcgccggttgctccgatttcacggggcaagggtcaatagcatccggtaaagggaaaggctgtcaagggcaagtcaagatctgctatggatataaccttgtaagagggatgacgaatcatccaatggaggactatcattttgccgaacttgttgatgtcaaaggaaacgagcttggtctttttgctatttatgatggtcatttaggggataccgttcctatgtatttacagaagaatttatttacaaatattttgaatgaggaagagttttggacacacacagatagagcgattataaaagcgtatgaaaaaacagaccaagctattctgtcacatactccagatctgggacaaggtggctccactgctgtaaccgccattcttgtgaacggcaggaagttatgggtagctaatgttggcgattcaagagctgttcttttgaaaggtggtgagcccatacagatgtcgatagaccatgatccgaatgttgagcggagtgtaatcgaaaataggggtggttttgtttcaaatatgccaggagatgttccccgagtatgtggtcagttggctgtctccagagcttttggagacaggaatctaaaatcactattgagatcagagcctgatataaaaatcgaagacatagatcacactgccgagctacttgttcttgcgagtgacggtctttggaaggtgatgaacaatcaagaggttgtcgatttggccaaaaggtacaaggatccctatgctgctgccaagcaattaaccgtcgaagcacaaaaaagagatagtaaggatgatatatcatgcatcgttgttcggttcaaggcgtaagtcggtctcgaaggattttcatcgagagcaaaaaaacaagtgaattaggctgcctgacgatggtagtgataatctgatggttgaataatgactggggtgttggatgtaaatgatttgtctgctccaatgtaaagttcatatataagtatgctaggattatttggtttggcgatttcaaaggtacaggtgcgagggcccgagagctactaaatagctaccatctgtaaataatggttatattggatgttgaatttgtaagagtagactgagcaaaagacatctggatagttcctaaaagaacaaggtactct

SEQ ID NO: 101287 - DNA, 679 bp, Zea Mays
atggcaaggttatgttgcttcggcgccggttgctccgatttcacggggcaagggtcaatagcatccggtaaagggaaaggctgtcaagggcaagtcaagatctgctatggatataaccttgtaagagggatgacgaatcatccaatggaggactatcattttgccgaacttgttgatgtcaaaggaaacgagcttggtctttttgctatttatgatggtcatttaggggataccgttcctatgtatttacagaagaatttatttacaaatattttgaatgaggaagagttttggacacacacagatagagcgattataaaagcgtatgaaaaaacagaccaagctattctgtcacatactccagatctgggacaaggtggctccactgctgtaaccgccattcttgtgaacggcaggaagttatgggtagctaatgttggcgattcaagagctgttcttttgaaaggtggtgagcccatacagatgtcgatagaccatgatccgaatgttgagcggagtgtaatcgaaaataggggtggttttgtttcaaatatgccaggtttgtcctcattttttactctttaagcacgataccctgatttaattgactggggtgcctttttcgatatttggttcattgtcggaagcatttgaacatgtgaaatacacaatcttagtg

SEQ ID NO: 101288 - DNA, 818 bp, Zea Mays
atctccctttctctctctctctctctccttcacgtggcgccatgcacgagcgctaatcagacaagcagcaccagcaccaaaaacaagaggcgagggtggcctggccaaagtgacccacctcaccaaccatcactcacccagtcaccctccataactcttctcctcctctctcccagtctcactcccctcacttcgtgcatggtcttcagagtagtagagagagcaggaggaggagcacgagagaggagcagcgaagaagaagaagaagagcagcaggcagcttccgatgtgctgctacgtgggcaaggccaccaagatcttcctgtgcctcgtggcggcgctcctggtcgcgggcctcgtcctcggcttcggcctggcccgccacacgtggggagccgaaaggacccggcagcaaccggactgccgctggcccgactgccagcagcagcaccagggcggcgaccccccgctcgtcccggatgccgtcaccacgcagcccaacccgctcacgcagccggccgtcgccgcgttccccggtgccaccgccaccccgtcgccgtccgccgccgtcgccgcgccgcccacgggcgtgccgtactttggaccacctggcccgttcgtcgtgggcctcggcccagctgctcatgcgtgaggggggctgtctttttcttttttttctttacttttgctcgtagtcctctcccttctggaatcagtgcttcagtattgtttattattactgtatcattttttatatgtttcgctagtttttgacccgtttcgctgtacagtttggtaaattaatccggttctccccc

SEQ ID NO: 101289 - DNA, 923 bp, Zea Mays
aaactcagaagtccgaaccggcaaagcttcggcggacccaccaggcaccagctggcaggatatattcccatgcttatcttggcgttggcggagagtggattggcacacgctttcctttcctgcagacaagctgtaaatctcgccgagctcgtcgtcggagaccaaggagaagagcaagggggggcgcagaggcagaggcttgccagcctacctagctcgtcggggccctatggagatccagcaccaccgggggctgggcaactccaaggttgtgaaggtgcagagcgaggaggcgtgggatctgttcactgatcaagcgagcaacgagggccggcccgttgttgcccatttcggggcgtcatggtgcgtgacgtccctgtccatgaactacaagtttgaggagctagcgcagacccaccccgaggtcttgttcctctacgtggacgtcgacgatgtccagagtgtttcatccaggtacggagtgaaggccatgccgacgttcttcctcatcaagagcaaggaggtggtggggaagatcgtcggggcgaacccagacgaggtgaagaagctggtggatgcttccgccgaacccttggagactcagatagtcgtggagtagtagtcgtttcagactttttttttttttgaagagtcgttcgtgtcttccgaaactgcttcgggagactgtgcgaccgtgagtgcttcttggtcagggtctggatcgtcccggactgtccagtgtcgcccgtgtgcgtgtgcgtgtgcgtgtgatgggtttctgtcgctttgtagcagtagtagcacgaaaaatttgctattttagcctttttaacgtgggctaaatgttattatgtgaccctctaaaaaaactaaaccaaacaggcctatggatccggcttttcgctcaatgatagagggtaggc

SEQ ID NO: 101290 - DNA, 1417 bp, Zea Mays
aaactcagaagtccgaaccggcaaagcttcggcggacccaccaggcaccagctggcaggatatattcccatgcttatcttggcgttggcggagagtggattggcacacgctttcctttcctgcagacaagctgtaaatctcgccgagctcgtcgtcggagaccaaggagaagagcaagggggggcgcagaggcagaggcttgccagcctacctagctcgtcggggccctatggagatccagcaccaccgggggctgggcaactccaaggttgtgaaggtgcagagcgaggaggcgtgggatctgttcactgatcaagcgagcaacgagggccggcccgtgggtgtccccttccttccccctccctccctcccaccctccggcctgcttcttcttctgctcttgttgaggggtctccctttgttcagttctcgaagctgcaatgatccccctgttgatgatttgggggtctcaaactcccaatcgctttcgattcggaccgttctttatccctgttgtttacagtcgtgctagaaacggtagatgcgcataccaatcgtaacgccattgcttctgtgtgagattacacgactccgaagcgacctgacctctgcagatgtggccgtgctccttgctcttcatgttcatgcagtgtacatctctctccgtttccacggcagaatcagtagaattggggggaaatagtagcctgatggcaggtgctgtattgctagtgaacagcgattctgcaccgacgggttcttctttttttttttttttttttggatccaaagagcctgacaaacctatccggctatcttgtgcaggttgttgcccatttcggggcgtcatggtgcgtgacgtccctgtccatgaactacaagtttgaggagctagcgcagacccaccccgaggtcttgttcctctacgtggacgtcgacgatgtccagagtgtttcatccaggtacggagtgaaggccatgccgacgttcttcctcatcaagagcaaggaggtggtggggaagatcgtcggggcgaacccagacgaggtgaagaagctggtggatgcttccgccgaacccttggagactcagatagtcgtggagtagtagtcgtttcagactttttttttttttgaagagtcgttcgtgtcttccgaaactgcttcgggagactgtgcgaccgtgagtgcttcttggtcagggtctggatcgtcccggactgtccagtgtcgcccgtgtgcgtgtgcgtgtgcgtgtgatgggtttctgtcgctttgtagcagtagtagcacgaaaaatttgctattttagcctttttaacgtgggctaaatgttattatgtgaccctctgtctatgacttgtgggaccatctgtgtctatgatttgtgggtctgaatctaaaatagagaagttcac

SEQ ID NO: 101291 - DNA, 1531 bp, Zea Mays
ctgcattattggacagagacgcgccttgcaactttgagctctctggcctgcccccgttccagcaagatctgtactccgtatccatcatctccttgcttagtgggcactcaaagtgttgctcaaacaaatgatgattcatcgatagtggctgaggcgacagctctccaagtttcgtctgttcgctcgtggtggaaattccgctgagcgagcgagtgaatcctcctcttcctagccccggcgtgaggagcgccggcgatgtcgaccggcggcaggaagatgaggacggcgtgcgtgaccggaggaaacgggtatatcgcctcggcgctcatcaaggtgctgctggagaagggctacgccgtcaagacgacggtcaggaaccctgatgacatggagaagaactcccacctcaaggacctgcaggcgctcgggtccttggaggtcttccgcgccgacctggacgaagacggcagcttcgacgacgccgtcgccggctgcgactacgccttcctggtcgccgctccggtgaacctccacacgaagaatcccgaggaagaaatgatcgagccggccgtcaggggaactctgaacgtgatggggtcgtgcgtgaaggcgcgcacggtgaggcgcgtggtcctgacctcgtcggcggccgcggtcaccaccaggccgcagctacaaggcgacgggcacgtgctggacgaggagtcatggtccgacgtcgagtacctcagagcccacaagcctgcaggcccctgggggtacccggtgtccaaggtgctcctggagaaggaggcgagcaggttcgcggaggagcacggcatcggcctcgtcaccgtctgccccggcctcaccgtgggcgccgcgccggccccgaccgcccgcaccagcgtccccaactgcctctctcttctatccggcgacgaagccgcgttcgccgtgctggacgccatcgagagcgccaccgggtgcctgccgctggtccacgtcgacgacgtctgccgcgccgagctgttcgccgccgaggagggcgcggccgcggggaggtacgtctgctgcggcctcaacacgaccgtcgccgagctcgcgcgtttcctggcggacaagtacccgcagtacggcgtcaaaacgaacctgctctccggcgagcggcttgagaagccgagagtgtgcctgtcgtcggcgaagctggtgaaggaaggtttcgagttcaggtacaggacgctggatgacatatacgacgacatggtcgagtacggcaaggacctgggaatcctgcccgacttgtgatgctgcttgcttcctctgctctcggccggcgatcaggactggactttaaaccgtccggcaaaataagcccgtctatttatgctgctactgtgccgaaccataattggaccttcaaaaaatgtcaagaaaatttgtctatgttatgcatttttgtctactcagaaccgtttgtctgactagtaaatatggaatcgaatcctgtattagcaagcgtgacaaatatgcatcaactgttgcaagctgt

SEQ ID NO: 101292 - DNA, 491 bp, Zea Mays
atctcgacggatccacccgccatcctgcccgtgtttccccgcaaaacaaatacccctagcacccctccacaccggcggccttgctgggtcctactcctcctcggttgtgcctgctgaggtggcggcggcaggaactaggtaaggggagggaagggaagggaaggagatgtatgaggtagagcagaaccgtagcggtgacgccttcacacacggatctggaccactagatatcgcagctgttggattgcaagttcatgccggcggtggaggtcaaggcactatgcgagcaggcaaaggcgatcctcatcgaggagtggaacgtatagctcgtgcgttgccccatcactatgtgtggcgacatccacgaccagttctacaacctcatcgagctcttccgcatcggcagggaagtgtctaacaccaactaccacttttatatagatagaaactaagtatccagtgtgatctctgattctttgaattataccttg

SEQ ID NO: 101293 - DNA, 1108 bp, Zea Mays
gcaaaacagagacgtgcttggcttgaagtatacaaagaacagctcttgctagaaaccaagcaaaaaacgggacaggactgaagaatatgatgacttgatttgcatcgtaccgaagacattgctggccggaaattgatgagtccatggatgagtccatgatggacttggagaatgaggcagtgctacggaacgactgcgagaaggaagccgtgctgcggaatgaattctgccaaattgtatcattataggggggttgtgtatcataaattaaaaatcttgtgccaaggaagttagacctgcaaattggtcatacatgctactgttgcctagtagtttattccattttttgcagcttagtttatgtttcaattccaagtttatttgttgatgtatctttgtaacaatttttttatagaggaataaggaagcaaaaggatatagacatacggttataaagttttgggatctactcagcctagtgtacaataaagaccaagcaaatggagagggtgctaaaacagcagctgaaagttcaaaggaaatgacaaaagagaatgataccggaggcaaggatgctccatattctgtatcttcctcgagtagtttaaaaagacaaagatcagatgattcatttaactctatatggtgtgataagttcgacatgcttacatctgcattgaaagatgacggtccaaagctaccctcttccgccgaatttctcgccgcattacaagaggttgagggacttgatgaagacacagaacttgagctttaggacatcctcacctctaatgcacgcaagtttgagtcgatgatagcactcccaatggaaaggaggaagaggtggcttatgatgcagctaaggaagtgaaacaacttatatgtgaacttagatctctttgttgaactgattgtgtgaacttgtctttgtgaaacttttgtgtgtgaacttgatggctatgtgaaactgttgtgtgcgaacttgatggctctatgaaactactatgtgaagatttgatgtctttgtagaacttttatgtgcgaatttgatgactttgtaaaactgttatgtgtgacttgcctttgtggaattgttatttgtgaactt

SEQ ID NO: 101294 - DNA, 684 bp, Zea Mays
tgactggcaagatttaccatttaaaaactatgcccccggagaatgaggagaattctatccgacttattacacgttctgatgccacatttgagaagagccagaactgagcacctacaacccttttaagttaagcaacacaagttgaattcatgctcccatgtggtttgttaccaagatctgttgtatatacatatgacttatcaatgattttcatgttgttgtaactatccagtatcgtacaactgacctgttacctagggggaaacactgcatgactgttgttgatatgaggcggagcgagcgattcttgcaggaggagagagtgattctcctagaggtggaggaggatgaagtggtgatagacttcaagccaactccaagtgtcgtgtcgacctctgcctccgctccctgcacacatccctcccggtcgtcttcaaggtccagacctcctccccgctcaagttcctcatcagcacgttgcgtggtgtcatgtcgccgctttcctcagtgtccatacgcgtcgtgcgaggcatcccgcttcatctctaatcacctttatgtgcacatcgtccatatgtgacccccttctccatataatttcaacaagttttactcttttgggctccgtgtaagttcattagtaaaatctctactaattattaatgctgcaaagttaacctgtca

SEQ ID NO: 101295 - DNA, 697 bp, Zea Mays
tgactggcaagatttaccatttaaaaactatgcccccggagaatgaggagaattctatccgacttattacacgttctgatgccacatttgagaagagccagaactgagcacctacaacccttttaagttaagcaacacaagttgaattcatgctcccatgtggtttgttaccaagatctgttgtatatacatatgacttatcaatgattttcatgttgttgtaactatccagtatcgtacaactgacctgttacctagggggaaacactgcatgactgttgttggtatccttgtctgatatgaggcggagcgagcgattcttgcaggaggagagagtgattctcctagaggtggaggaggatgaagtggtgatagacttcaagccaactccaagtgtcgtgtcgacctctgcctccgctccctgcacacatccctcccggtcgtcttcaaggtccagacctcctccccgctcaagttcctcatcagcacgttgcgtggtgtcatgtcgccgctttcctcagtgtccatacgcgtcgtgcgaggcatcccgcttcatctctaatcacctttatgtgcacatcgtccatatgtgacccccttctccatataatttcaacaagttttactcttttgggctccgtgtaagttcattagtaaaatctctactaattattaatgctgcaaagttaacctgtca

SEQ ID NO: 101296 - DNA, 954 bp, Zea Mays
atgcagccggatccgggatggagcatccatgggcgtcctgaccacgccatcaatcaagcaaaaatggaaccaaaggttcgagctccgcaggcggcaagctccttcttcatccacgccctccctccgccttgagaaccatatatcttcaaggacaagggtccgttgtggtgtttagaggcggaggcggtgcccggccagcatacactctggtttcacagaatgaggcacactttgctggtgactggttcgaaatttgatttctactggccaggatgtacccaatgaactcatggatctggctatgaagggttctttaaatgatgttggaagtgtagatgtcttctcttggataagctgtttggatcttcgcagtctcgctgtgctgacaaattccaccctgtccagctcaagtgatccacataatatatctttccattacttaatacctgaaggaggcaacgataagttgtcctacttcaagctaaaagtcttgctacctgattcagatctcactgttactagtcaaaagcaaatcaaggacaagctaaatgttgccactccagaaggaaattttctttggttattccacacagaattgtcaccctttcttatcgcaaaatctcagttgtcgaaaaagagattttttatatcgctgcagattccatcataaagggcaaagtcgaagatcttggtcgcatggaactaggcggttacgccattggcgctattgaagattgcagcaagcgtctcagcgattatatcagtatggatgttcttagtgccatacaaagagcgggagctgcattcagttgggtgcctaaagaaccttataacgaggatgcatgcctacttgattttgacgtgctattgatggagcctcgcaagctggagaaaaccctgattacttccatcatgtggtgggctactggatgtttgcagcaatgtaggtactag

SEQ ID NO: 101297 - DNA, 537 bp, Zea Mays
aatcaaagagatgacactttaatttatttggtagtacaatcaatagagacctgctacacactttgatccatactaaattaaactagaaatcattacacatatttaacaaatccttcgacaactacccaatgatgcaatccaacaaccaacaaccgtaatagttagaagctgatgatgacgatcagtagagacttgttgtgtgtcctctcaaacctattagatgaccacctcttaagtagcttattccctgatggatagatgaacctggagaatgaatccaagtcttcaaggactcattccaaaggttcatctcgagctagcaagcaagcaatgcaagctcaatctgcaatcctttttcgttgccagagctgctgcatgcatgcttagtacgtactatagttatgagagagagataaccacgcataaccatacactgctagactcactagatcagaaacgcatcgacatatgcatataatatcgtcagcagggcaggtcgatcgatctgtggtagctggctagctagctagttatata

SEQ ID NO: 101298 - DNA, 1518 bp, Zea Mays
cggtcacaataatgagtctacttgtcacctttcaaatcgtaataagtaggcaacaacaagtttggcttgtcaaagctctcatagatcaaatgtctactgttgcaaccacatgttttgggttcaggaacctagttcacttgcaactttatcctctgctacaaaatgcaaagcaaagtagcatgcatccaaaagtgttgcttgtagcatccacaggaacaacttcgatctgcttgctgttgacatggaatcagaagaagagaaattttcagaaaattttactctcagctatagcatgtctgctgctacttacaattggtgctcttggttgggcatgtaaaatcagaggcaaatggcacaagaagaaaatccagacgagaatgatgctagaatacttgagttctacggatgaagctgggggaaagaatatagagttcccatttattacctttgaaaacattgtcacagcaacagacaatttctctgactgtaatatacttgggaaagggggttttggcaaagtatacaagggaatgttggaaggaaccaaagaagtagccatcaagagactgagcaagagttctgggcaaggtgccgaagagttcaggaatgaagtaatcttgattgcaaagttgcagcacaagaacctagttaagcttcttggttgctgtgttcatgaagatgagaagctgttagtttatgagtacttgccgaacaaaagcttagattacttcctctttgattctgcaagaaagtcaacgcttcagtggccaacaaggttcaagataatccacggggtagctagaggaattatgtatcttcatcaagactcgagattaacaataatccatagggatctcaaagcaagcaacatcttgttagataaggacatgagcccaaaaatatcagattttggcatggctagaatattcagtagcgaccagctccatgcaaatactaaccgagttgtaggcacatatggttacatgtctcctgaatatgcaatggaaggtgccttttcagtcaagtctgacacttacagctttggtgttttaatgctggagattgtaagtggtttgaagatcagctcaccacatcttcacatggattttcctaatcttagagcatatgcatggaacatgtggaaagaagggaaaatagaagatttggtggactcatcagtcatggagaattgctcccttgatgaagtttcacaatgtgtacatataggactcttgtgtgttcaagacagtccgagcttcaggccactcatgtcggcggttgtgtccatgctggagaacaaaacgacgacacttccaactccaagtcaacctgtatattttgcagttagggacccctaccaacctggaaaggcagttggcaacaaggagttgtctatatatgatatgagtctcactgtgccagaaggtcgttaaatgctttatttttataactgattgggatgattaattaaaccccactggcatattcattgcataactaaaactgatcgttcagccc

SEQ ID NO: 101299 - DNA, 92 bp, Zea Mays
gaaagaacgaccttacgatttattgggcctttgggcctttcgggaggtcttttatttctttagtggacccgggggatatctatcccccacaa

SEQ ID NO: 101300 - DNA, 579 bp, Zea Mays
atgcccctcttttttcaggcgagaagacggcagcggagatctggggctcaccttctggagttgttctctacgtcctgtgtatgcgctgtggtagtacggttgctccaccaccgccagttgaaggactcatgcactgagcgtaggaccaacaagcgattgacggcgtggatgatgttgaccaccgcaccgaggcgcatgatggctcggcaagctgcgacgaggtcgagcggctcgtcggcgagcgtggggtgcaggagggagcgggagcatggggaggaatactctctttgccaaatgctcatacttgcatcctaccgccggtcgtctccaccatcgtgcgacagtttcgcctttcatggggttgcatggcttctctccctgagatctcactgccgacccacgcagtggcgagtagcgtcttgttggccgcaccctagggttggtggagcctcccatcggccatctccaccatcgcacgacgacttcacctttcctggggtccgcatagcttctctccatgagatcttgtcgccactgttctcaaccgccgcaacagggagtacgggagcgatggaatag

SEQ ID NO: 101301 - DNA, 531 bp, Zea Mays
atggatgaggctactttccgtgatacccaggttcacgtccatagatgtctacatattcagagaactgcaacagtgcacactcctttcaaagactgggtgcagcaaagattgttcttactgccctcagtaacattggatcgaaagctcaaaaatgatggacaaggatgttggagcagcaaaaaaagtgtcccacccctttgctcaaccatagttgatggtgaaaaggctctaattacctttggcagttacaacgggaactacaacaacgagtcacccgttgtagctgtcgtcgccgcttctgtgacaattggctatgttgtaattactaccacagatgagaaacccagagatattattgtgacagataattttgatatcaagagaactcaacctgcaagtaattccaaaatgatcgttgctgaaactgatgtacttactggagagaatgacatgacaaacttgccatatggtgaattggcaaagaagcttaaattagttcaagatcaactagcaccagagggttcaagatga

SEQ ID NO: 101302 - DNA, 113 bp, Zea Mays
taaaatccaatgaatagagagactggtaaatgttttcctaggtgtatgtatactcagttagtaattggtgtttggaaccacaaagctttagattgaatggatatgatgggatc

SEQ ID NO: 101303 - DNA, 539 bp, Zea Mays
atggctccccttcgccaccgccatgccaccactctgctcgccgcctctgctcccctccgccttctgtcgctcccacaccatcgcccgcgcctcctcattgccatccatcgtcgtcgtcgtcgttcgcccccaaggcgcgtttcatcgcctgccgctccgagttcatccccgtccagtagctggcccgcccgctggcggagtacatgagcttgccgaacacccagtacttggtgctggaagccgagcgtgacaactgacaacgactccaccgttcggtgttacgtgtatcgcttccacttctttgcgcttgaggtcggccctgtcctactcgtcgacgaagaacccaacaatcgttgcattcgcctcctctcctgcactagagggatcactgctcatggaggcgcagaatgataaattctcagcttccatggcgaatagggttttctgcagcagcaggtcacaagatttgacccttcaacagcttacatcagatgctacaatagaggttgcaattgatataccttttccattttgagcaa

SEQ ID NO: 101304 - DNA, 1873 bp, Zea Mays
gcaatatgaatagggaaaagcattgagaaagagaaagggagaatcaaaggaaaaaaacacatgattcttataataatggaaccacgatatctattacatggattgcagcagggagcagaaagtacatatcagcttatgagcactaaaaacatcaagaaagggaaagaaaacaacagagtgggaaaaagaggaggcatgtatcagtttaaaaatcattcgacattggtgacatatcacagacacaaatgaaggggtgaaaggaatgtggaaccctagctttagctaggcagtaaaaatgtggatgcataaaaacaaagaaatcatatttgagccgtacctaaaaggagacactggtcagttgtgagtgtgtgctctggtcatcgagttctgagaggaaacactgggcagtgtgtgctgtggttgtcgaggcggcgctctatgccgcagctatcttagacaatattttttttacattagcttcacgcttggatgtgcttgctgaagtagacacggtcgttagtatcaaatcttttgtttatgaagcaacgaacaatggacattttataggagttggaacctagatgggacccacacgttggccagcagcaggtaacgacaggtatggagaaatgaagacgcttctagcaggcccgcgatcgcgtggtgaaagtaggtgggacccttgcgttggacagcgactggaagtctggaacagaaacgaagacgtttgtagcacatggtaggtcggccatcgatctgtcatcggacggctcacagaaaattggacgacgtggacatcctgcccgctccgttttgctcccgcggttaatatagagaataaatccttcccgatcgagcatgcattgcaaacaaagaaatcagcaagccagcatcaacagtttagacgactgacatcgatccgcatgacgatgctgccccgcggcgccgcggataaaatcatcagccacaccctggcaggcgcgatgctctcaggcctcggcctatggcacctcttcaaccacatgaggctcttggtctccctcgccccgaccccgtcgtcctcatcgtcgcgcgtcgtcgtcctcgcgccggcagcatggttcccggcgccacggggtgcgtcgcctcgagcccatcgccatgctggccgcgggagcgtacgggctggccacccagatgctcgcctactcgccgatgccgttccgcgccgacggctccatcccgcctgagcggctgccgaaccacgagcacgccatcatctacgcctcgctcctcgtctacaccagctccaacatatacctggacgacgacgacgaccgcgccacgcggcgccggcgccgacgacgctctccatgctcctcctggcagcgctcttcgcgcaggagctgttcgtgttccacgtccactcctccaccgaccacgccggcgtagttccagcggcagaggcctgcctggtccttgagcgcctccaccgcgccgacgctcatcgccaccatccacgacgccctcgctgccgccgccatgtccggattctcctaccgctcggatcttgggctcttgcttttgagttcggttgctgtgctggtcgctgattgactcgcagtagtgctcctctgaggttgtgttgatgctcctgtgctgtgtattggggcttgggagtgagctgggagaccggcgggtgggttatataccggagggaggccggcggaaacaggtggccgcggacgctggttttgctggacaccgggggctctcagtctccctgcttgtttacgctttctccagagctgtttcgctggataccaggggctctcactcaccactgtccgtgcttgtttacactttatccacagttctggagagaagaacgaga

SEQ ID NO: 101305 - DNA, 6021 bp, Zea Mays
tcaggttgtagaatcactcttgagcaaagtaattaatgaacttgagcaccgtattgcaagccagagtgaattggtgaaagaaactatggataccaacggctgtaactcagttttgagaatggagtctccctgtaacaccaatgacagtaaatcattatccagagtggaccctccacaagtggagttgacttcctgcagtgatctggagaaggttaaagaaactatggataccaatggctgtaactcagttttgagaatggagtctccctgtaacaccaatgacagtaaatcattatccagagtggaccctccacaagtggagttgacttcttgcagtgatctggagaaggttaaagaaactatggataccaatggctgtaactcagttttgagaatggagtctccctgtaacaccaatgacagtaaatcattatccagagtggaccctccacaagtggagttgacttcctgcagtgatctggagaaggccactgatgactgggacgatctcaaagggattgagaccgaggcatgtggcaacttgaatgatatgatgatgaagaatgtacctgactgcaatgggggagttgctatagacagcagttatacatccagagagccaaattcgtcctctcaacgtgctccgaatgatcttgaagctttcaaatttgcctctgatgatttagattttgaaatggacaaccttcctgacaattctagtatgcaaagtattggaatgtgaacccctaaccctaacaggggttgggtgatatattaataggctgggtaaactgggccaggcccattacagagaggtgagatggtcattacacggggaagaccccaaaccctaaacgggtattctaacacccccccgcagtcacaactctatcctgtacagatgttgagactggatcgaaagtctaaaaatacactcgacggtaatcccttggtgaagatgtcggcgaactgcagcgtggtggggacgctgagaactcgaacgtcaccggcagcgacacgctcgcggacgaagtgcaggtcgatctccacatgcttcgtgcgctgatgctgcacggggttggtggagaggtagaccgcgctgacgttgtcgcagtagacgagggtggcgcgctggaggggactgtggagctcgtggaggagctggcgcagccaggaggcctctgccacgccgttggccacggcacggtactcggcctcagcgctggagcgagagacgacgggctgacgcttggcggcccaagagacgaggttggcgcccaggaacacggcgtaaccggaggtggaccggcgcgtgtcgggacagccagcccagtcagcgtcggtgtagaccacgagctctgacgtcggggatggtcggagaaggaggccgtagtcgagggagtcgcggaggtagcgcagaatccgcttgagcgcggtgagatggggctcccgcggagtgtgcatatgcaggcacacctgctggacggcgtatgcgatgtcgggcctggagaaggtgaggtactggagcgcgccggtcaggctccggtaggacgtcgcgtcggcgaccggaggcccgttgtcctcagagagcttcgcctgagtgtcgacaggcgtggagcagggcctgcagtcagacatgccagcccgctccaggatgtcgatggcgtactggcgctggtggaggaagagaccctgggaccgacgctcggcggtgatgccgaggaagtggtgtaggggcccaggtccttcatcgcgaactctcgctgaagggcgatgatcgtgcgacgtagaaggtcggcggtggatgccgtgagcacaatgtcgtcgacgtagagtaggaggtagacggtgtcgtcgccgcgccggtagatgaacagggacgtgtccgacttggccttaacgaagccgatggaggccaggtaggaggcgaagcgactgtaccatgcccgtggcgcctgcttgaggccgcacagggaccagttcagccgacagaccagatccggacggtcagcgtcgacgaagccggtgggctggctgcagtagacagtctccgtcagagtgccatggaggaaggcattcttgacatcaagctgatggatcgcccagtcgtgggagagggcgagggagaggacggcgcgaacagtggcgaacttgacgacggggctgaaggtctcgtcgtagtccactctggggcgctgtgtgaagccccgaaggacccaacgggccttgtagcggtcgagggagccatccgaggtcagcttgtggcgaaatagccacttgccggtgaccacgttggcgcctggtggacacggcaccaggtcccaggtgtggttggccaagagggtcgcgtactcctcctccatagcacgacgccagtgtgggtcggcgagggcagtgcgaacggaggagagcaccggggaagcgtcgggtggagtgctggacgtatcagctgccaggatcagccggtcgacggggcgaagaacgccagcggcgcgccgagtcaccatcgggtggacgtgtccggggtcacggtggatggcgaccgggtggtatacggacggctcggagcggaccgccggaacgtcgagagcggcgggtgtggccggctcgcggcggtgataggcgacggcggggtcggcgaagcgggtcgcgctcgtcgacgggcccgagtcggggggcgcggaggtagtggcgtggccgcggcggtggtagacgagcgtggggttggcgaagcgagtcggggtcgacggggccacgcgtggcacaggcggggtcgacggggccgcgcgtgtcgcaggcgtggtcgacggggccgcgcgtggcgcaggcgtggtcgacggggtcgcgcgaggcgcaggcggggtcgacggggccgcgcgtggcgcaggcaggatcgacggggccgcgcatgacgaaggcatgatcgacgtggccgcgcgtggcgcaagcggggtcgacggcgccgcgcatggcgtggagatgggcgcgagctgtggcgtcgtggctgcacgaggagcaggtaacggcgcaagacgggacgccgggggtgggggggaaccgggtcggactcgaggagagagtcaagatcggtgggtggggtggagcctgcaaggggaaacacatcttcgtcgaagacgacgtgacgagagatgatgatgcggtgggaggtgaggtccaggcaccgataccccttgtggtcaggggagtagccgaggaagaggcagcgagtggagcgaggagaaagcttgttaggggcggtagcggaaatgttggggtagcaggcacagccgaacacgcgcaggtggtcgtaggaaggggctgtgccgtaaagggcgaagtgaggtgtagggtggctcaccgccttcgagggaagacggttgaggagatgcgtggcggtatgaagggcctctgcccagtaggtggcaggaagagacgcctgaaagagaaggcatcggatcatgttggtggtggttcgaatcatgcgctcggcctgaccgttctgagcagaggtgtagggacacgagaggcgcaactggacgccgtgagtgaggaagaatgaccgagaggcgtggttgtcgaactcgcggccgttgtcgcattgcagggcacggaccgggcgctcgaactgggtggatacccaggcgaagaagtgagtgagggtggtaaacgtgtcagacttcagtcgaagggggaaagtccaaagaaaatgggagtagtcgtccagaatgaccaggtagtatttgtacccggagaggctaaggacaggagacgtccagagatcacagtggacaagatcaaaggcctgaacagccctagacgtggaagtggaaaaaggaagacggcagtgacggccgagctgacaagcatgacagagacgctccgaagagccccgagtataggatatgtctgagtggctggaaagctgggacatgacgtcaggtccagggtgcccgagacaacggtgccaaatggcggaggaggtggtggtagtagcaagagcaggagatgaggctactctggtgtggggagtggagggcaagtgaagagaatagagggggccagagctgtcacagcgagcgagcacagcatgtgtgggaaggtggcgtatggtgagaccccaggggtcgaactccatagagcactggttgtcactagtgaagcgacgaaccgagaggaggggatgagtcagtccgggagcaacaaggacgtcgttaaggcagaatggtcctggaagaaccgatgcacctactgaggtgaccgggagggtggaaccgttgctgacgacgatggaggaaggatgtgaggggtgcggtggatgggagtggaataacgaactaggtgtgggggtagtgtggtaggaggccccggagtcaaccatccaatcgacgggagagggagacagagggaaggctgcagggtgcgcggaaagagctagaggaggagcgctggcgtggttgctaggaggggagggggacaaagggggctcgattgccagggaggcaatcattgtacgagggaagacaaggggcccggacacgtgacgaccggtcgtgggatggatttcaacacagtcacggaggacagggctcatggcgtgatcgaaggccacaaaggtgccctggacaaactgaccatcgtggaggacacgcacggtgagcccgtcgaaagggggtgaagccatgagagagtggagaagggaatggcgaatggtgcggcagagggatgagctgcacacaagtcacagtgagacaactagacgagcagacgagatgccaagacgtgcggccaagcaggaaacagcgacaggcggcagccgtgcgtccgcgcgggtcgtcgcctcgacgggaccaagcggcaagcagaacagcggagcgccggaccgggcggctggagcgcggagcgacggagcgtgccgagtccgaggctccgagcggctggagcgtcggcaggagcgaccggcggccgagcgggcagctggcagccttcgggcagcgggcgacctccaggcgcttggaagcgtcgcagggttgcgagggaggccggcgtcagagcccgggaggaccacgtgcaccagcaccccagggagccgcgcctgtgcgtgcacgcctgcgtgtagacgacgagcagggcagcgctgctgcagggaggggaccgggcgcgggcggaccgtcgggggcgtggggcagcggcacaaacggccagagcgacacgacgggagcggcggctccgggagaggcgcaggacggggatccgccggtcgctcgccttcttcctcaacccgccgctggactgcgtcgcctgcccgccgggcgcgctcctccacgggaacaggcaggtcggtggcccgcgcgcgttcggaggaagacgagcgcccgaggaagacgacgagcagggccaggggacggcaggccggtcgacggacggagcgctgcgcagcgcaccaaagcagccgccacccgccaggcaagaggccacagccaaacagggactgggcgcggccccggcagccctggcggcgctcggcagtgggggaggagagagccggcggctggcggctgggagggagagacgctgtcggttggggaccggcggctgggagagaggagggtgggaaaaacctaatctgataccatattggaatgtgaacccctaaccctaacaggggttgggtgatatattaataggctgggtaaactgggccaggcccattacagaggggtgagatggtcattacatggggaagaccccaaaccctaaacgggtattctaacacaaaggcagacacaatcaagaaactctggaatgcagacccgaagctccgcaaaatccacagtaggccacttattccgatcttccactaatagtcaattccatcgtcgttattctagtttgcataagttgatgttatgacattatgtttgcatacagacaacatgtaaaacatgctattatgttcatcctatgctttcaaacaagtgtagctcacttttgcctttctgctgttactttttagttgatatt

SEQ ID NO: 101306 - DNA, 740 bp, Zea Mays
tcaggttgtagaatcactcttgagcaaagtaattaatgaacttgagcaccgtattgcaagccagagtgaattggtgaaagaaactatggataccaacggctgtaactcagttttgagaatggagtctccctgtaacaccaatgacagtaaatcattatccagagtggaccctccacaagtggagttgacttcctgcagtgatctggagaaggttaaagaaactatggataccaatggctgtaactcagttttgagaatggagtctccctgtaacaccaatgacagtaaatcattatccagagtggaccctccacaagtggagttgacttcctgcagtgatctggagaaggccactgatgactgggacgatctcaaagggattgagaccgaggcatgtggcaacttgaatgatatgatgatgaagaatgtacctgactgcaatgggggagttgctatagacagcagttatacatccagagagccaaattcgtcctctcaacgtgctccgaatgatcttgaagctttcaaatttgcctctgatgatttagattttgaaatggacaaccttcctgacaattctagtatgcaaagtattggaatgtgaacccctaaccctaacaggggttgggtgatatattaataggctgggtaaactgggccaggcccattacagagaggtgagatggtcattacacggggaagaccccaaaccctaaacgggtattctaacacccccccgc

SEQ ID NO: 101307 - DNA, 878 bp, Zea Mays
tcaggttgtagaatcactcttgagcaaagtaattaatgaacttgagcaccgtattgcaagccagagtgaattggtgaaagaaactatggataccaacggctgtaactcagttttgagaatggagtctccctgtaacaccaatgacagtaaatcattatccagagtggaccctccacaagtggagttgacttcctgcagtgatctggagaaggttaaagaaactatggataccaatggctgtaactcagttttgagaatggagtctccctgtaacaccaatgacagtaaatcattatccagagtggaccctccacaagtggagttgacttcttgcagtgatctggagaaggttaaagaaactatggataccaatggctgtaactcagttttgagaatggagtctccctgtaacaccaatgacagtaaatcattatccagagtggaccctccacaagtggagttgacttcctgcagtgatctggagaaggccactgatgactgggacgatctcaaagggattgagaccgaggcatgtggcaacttgaatgatatgatgatgaagaatgtacctgactgcaatgggggagttgctatagacagcagttatacatccagagagccaaattcgtcctctcaacgtgctccgaatgatcttgaagctttcaaatttgcctctgatgatttagattttgaaatggacaaccttcctgacaattctagtatgcaaagtattggaatgtgaacccctaaccctaacaggggttgggtgatatattaataggctgggtaaactgggccaggcccattacagagaggtgagatggtcattacacggggaagaccccaaaccctaaacgggtattctaacacccccccgc

SEQ ID NO: 101308 - DNA, 207 bp, Zea Mays
aagtttttcatgtcctttgtatctgagtaccctatcgagtcgatcgaagatccatttgatcaggatgactggagcacttatgccaaactcactgatgagattggacagaaagtgcagattgtaggagatgatcttctcgttaccaaccccaccagggtcgccaaggccatcaatgagaagacctacaatgctctcctcttgaaggta

SEQ ID NO: 101309 - DNA, 1330 bp, Zea Mays
atgggcagcaacaagagagtgcccccgtacctcctgctggtgctgctggccgtcggagccgccgcggtgagcgtcggcatcctgcacaagatgagggagcgccgcgtcctcgccgtcctcgtccaggaacgcgaccagcagctcatctccttccaagtcctcctcgagaaagaaaaagaaattaataaagaaatgaggaggaaagtggatgaactggaagccaaaacatctgccctaagtattgagagggcagaattgaaaaacaagctcatggattcagaaactaccaccacatatcttaccaacacccagaaagaattggaagcagctcttgtggagaaagagagccatatcaaccaaatgaaagagagtgcagctgctgcaaacacagaccagacaacaactataaaggaactcctgcagcagaaagaagctgggcctgagcttgacaaatccgaaagttacagtgattcgattcctgctacatcagaagataattccaacagtaatacaatatcagagagcagacacaatgatgagagcattgtagcgggagcaaacaccgaaaatgcaacttctgaaactgtggtacttgacaaatctgaaaactccagtgattccatacctgttctggcagaacaggaaaactccatcaacacaaatccatcagatagcagccagcaggatgagagcattgtagtggaagccagaaacgataatgcaacttctaaccttgtggtacttgacaaatctgaaaacaccaatggttctgtacctgttacagaagaacaaaattcctacagcaccactgcatgggagagcaaccaacaagataacagttcctcacaagaacagttcttaaagttaacaaccaacatagaagatggtcatcttcaagagaacaaaggtgatgccaatgagcaatcagatgatactccagagggaagccattcagataaatccgagcttcaacaggggaaccaaacactgatagacaaccaggaagccagcaaagaagaatcagacagcacaagacaggtggagaaccctcaagatgaggccagcaaccacagcagagaaagtaaagtgctggagaaggaaaatgagaaagaaataaatcgtgagggcacgagctcagaagtcagcttgagtgaagccagccagaacaaaacgcaagcagtggaacctgttgttgaccccacggatgtaaaccccagcacatccacaaataatgagagaagagaaacaagcaagagacatagaaaggagaaggtctagatctagaaggaataggaaggccactgttgagatagatgccacagcaaaccca

SEQ ID NO: 101310 - DNA, 2636 bp, Zea Mays
ctgtgtaaacctatggacattttctggaattccaaggcgcctaacctttactatccctgaccttttctccgagcgttcattcaggaagctgcccggcgacgcgccgctcccccgcctcttccttgccgccgccgccgccgccgccgcagacgcgcggcacggggcggtgcccgtgcaaggcgatcggggccgtaacgctcgactgcccctccacctcctcatcctcaccccagcggtgagtagaacaaggggcggtggtcttcactgacatcgcccaccatgctgcgccggtgcatgcgggatctgcgctcgccgcggtctctcgcgagggtctccagaccgatctccgtcgagagtccaacattccttaaatccagaagcaactctacaaaggcatctccaaagagttcacagaatgctgccccaggtcctcaaggacaaccttctcagtcgggaagtaatgtttcaaagattgttcttggaactcttgtggttggtgcagcagctatgggtgcacatcaacttggttatatagatcttcaatttagggacaagaaatttccttttagcttaaagaaggaagatgtcgtaaaggtgtatgaagatctgaagattccttctgagcagaaggttgaccagacacaaaacgtgtcaggacagaacgccgagattgttcaagagaacaataatgaggctcatactccaaagggcgttctaaatgacgggatgggggcactagaggttccaatcaatgaggatcagcttgttcctgcagaagaaaagaaatcacaaaccctagcccatgagacacatccagttccagatgaacatggatctgatactaaaatgccatctgaagattctctagctgttgagatagagacagttcccatcgatgctaatgaatctagcgaagttcctcatgaacagcaaactgataggatagacagcacaattcctcctacacagtcaaccccaacaacagttagtacttatgatcaccccacagatccagatgcaccaaaggatctctcaggagctggtgctgttgagcagaaatctcttgctgagacatattttctgcaagatgaacctgatgtttcgaaagatgcaaccattaaggaaaaaagaagtgatgaagttattcgtgaaaaaacttctaaagatggtaagattgtacttgatatcattgaggctattcatgccgccgaaaagaagcaggcagatgtagatgcatacatgtattcagaagagagaagaaagttgaaggagaagtatgaaaaggagctgaaagacaccagggccagggaactgatgtatgcagaggaggcagcaattctggataaggagctaaagaaagagaaactgaagaatgctgctgcattaaaggaactgcaagaaaaagctgaacaaaaattgcaggatgagctgcagaggaaggatgaagaaacaagccaacaaattgagaaggcccaagagatagctaaagctgaacttgctgcagctgttgcaaaagagaaagcatcccagattgaacagattgctgaagcaaaccttaatattgatgcgctgtgtatggcattctatgcacgatctgaagaaactaggcagagtcattcagttcataagcttgctctgggcactcttgctttggaacacgctttatccagtggatcaccaatccgatcagaagtggagctattgcgtaaatctgttgaaggcatcgacaaagattcactgttagaactggctctttcatcactcccagaagatgttttagattatggatcagataccatgatggggttgaagcaaaagtttaactccttgaaggaaactatcagacacttcagccttctaccagcaggcggtggtggaatcctggcacatactgttgctcgagttgcttcttcaatcaagattaaaggcgataactctggagatggcattgagtctcttatcaacaaagtagaaaggttgattgtggatggagacttgattacagcggccgatgccttggagcaagggttacatggaactgaagcagaggagatagctaccgagtgggtgaagcaagccaggaaacgagcgatcgccgaacagacccttgctctccttcaggcgtgtgcttcttcgaccacgttctcatgattttggccagacttttttttttcttccttttgtttgcttggatttgccggtttcagtactctgtgaaaaagcttgtttttcccagaccatgttgaaaatgcgtggatggtgaacgagaaaaatcagatacaatactatagcagccagccagccactgggtctcaaagtgggggccctgcctaagtttttcatcgtgtaaacaaagctaataagttttgccctgtagctacttgctgttcgtgacattttagtgtccagttaaagcaatgtttttttaatgcaattgctgaaggattccttgcagatgtggtcatgtagcagttctacaaagggtcagtggacactgaataagtctagttacagcttgttttgttccacccagctcaactaaagtttagtttctgtcactgaatgttttaacgataattacgaatattgaatatagtctaattataaaattaattatacaaatgaaaactaaaaga

SEQ ID NO: 101311 - DNA, 1340 bp, Zea Mays
atttgcatgcatcagtattgaatctagattcgtttcttacagccttgttgcatacttgttataccgtagcatgtttgtgctcaagcatgctgtgagggtgtgacctcgacatacaaatccaaaccaccagtttctgttgtatgaatttctgtttcttcggtgtttaactttgttctgagtgttgatcgttgtacagggccctcctatctgtggtgtgccgccggactcgaagatgagcaataagcttgaacctgttgatgctggcgatgaagatgatggtgactctgggcagggtgaggagggcatctcagcgggcggagggatatgacaacctaaagggcaacgagaacaggagaagcgaagaggtgatgccaaggaaaacggtgaagaggattgaggaagaagtggaagaccaggaagatagtggcggcagcggcgacgacaatggggatggccatgacgaggagggtgtacatgaggaaggtggcgacaaagagatagatgatgatgacgacgacacactccagcccctaaagaagccgaagaagtgaagatcttcgctccgattagttaccatgtgctgaaaatttaggaagaaggagaaaattagtttattttcacctaaatttcctccgatctccaagaggatttgaatttctaaactatcctaaaatggctccacacgttcaacagcacgtgtgtgggcttgtaggagctttatgatttgaggcaattagggagattgaaattgcctttttcatcccgtatggaatcaaacgatcaatgatgcagccctggttgccttcaacttcattaatggttgccttcaacatcatggcagcttcatgtgaatcgtacgtttgtactataccttcaaatctcaactgatgtaacggaattctgacaggatacgaaaaacgctgatgcatggttagcattggaggaaaggagagtgagtaatatggagaagaaagtggatcttcggcgaagaatgttggagctaagaaagatgagcagatacgaggttaagttacattgttactcgataccgagaaactgactccgttggctcgtcgctactacatcaagaagcgaaagcagatagccgcagcggctggagttaaagttgacgatgaggagtgactgatgtgaagtactagctgttttactattgtttatccttttaccttttatttttagggctagtttggaaaccctatttttcaaagagattttcattttcctaacgtcccgtttaaatcattagaattgaatttcattctaatactagtaattttggcatatatcaattaagctaattcagttttatgcaaaatata

SEQ ID NO: 101312 - DNA, 3838 bp, Zea Mays
caaaatggcccgggccagcctgcaagaaaaaacttagggttgcaagaaaaaccccagctcctttccttgtattgtcggaaatcactgtctcccctccctaccttcgcaagtttgcgcctaaaccctagctcgcttcccaatggcgccgaagaagcgcaaggccgatcccgccgagtccgccgacgctgcggaggcagccgccggcaaccaccgccaggagccagcgccctcggagcccaagccccgcgccaccatctacttccccatcaccgacgacccgccggagcccgccgccgaggaggacgaggaggatggcgctggcgaagacgaggacgacgtggaggacatcggcaagctgctcgagccactgtcgcgggagcagctcgtcgcgctgctccgcacggcggcggagacgagccccgctacgatggcggccgtgcgccgcgccgtggagtcggaccccgccagcaggaagctctttgtccacggcctcggctggggcgccagcgccgaggacctccgctccgccttctcatgcttcggcgagctcgaggactgccgcgtcatctctgacaagcagtccggcagatccaagggctatgggttcgtcctcttccgctcccgccgctctgcactccgcgccctcagccgcccccagctccaaatcgggggccgtcttgctttctgccacctcgccgcctcaggccccgcgcccccagcttctcagtctcagaaccctagctccaacccaaacaccaatgccaactctaactccaataccaccaccaatgcttctggctcatcatcgtcgcaacctgacaatatgccgcgcaagatatttgttggtaatgtgcatgctgatgtggacgtggaccgcctatataactattttgcacaattcggtgagattgaagagggtccgtttggctttgacaagaacactggcaaaccaaaaggattcgcattgtttgtttacaagtctgtggagagtgctcgccgtgctttggaggagccaatgaagaattttgatggcaagacgctcaatgtgcagaaagccatagatgggaggaccaagggctcatctggaacgaatacaaatgctaactccaatcccactactgcatctgtggctgctgctgcagctgctgcgcagatgactgctcctgccactgccgccattagcccatatgatccatcggcatatggtgccactgcggttcctgacatgagttttgcacaacaagccgctatgctgggatttggtgcacagcaacaggcattcgctcaacccaatgcaatgcttgccatgatagcggcaatgcagaacccagctgcactagggatgacaccagccatgtttgctgctatgaacccagccttcgccgctgctgctttaggtgcaggcgggcagcaggcacagacagctggtcttacgggctttggagctcagggttttgggacgcaggcatttggagctggaggtgcagttttcccaaatgcagcaggtgttcaagcagcaacagctgcatatcaaggaggtggggctcctcctggttttcaagggccacctggatttcaggttggccaagcaactacccagacaagcactgcagtggcagcagctggttatcaggctggggcagctgggcagggccaggtgcctggtgctcagattggaggcactggttttcagggtggatattgacagaactagtttggcatctgcgggtcgtggttcgttcatgtggttttgcattcggatggcttttaagtctatattggtgccaaattgttgcggaaggcttcctgctcttgaattttacaaccggatttgaatcagatgtgtttgtagcagtatttgaaggaggaactttcttcaaggattatgttgttttattgcctaatatatagtgctattgcgacttcattatgtactttgtggatgtgtactgggtttcatgtacctaaatatccttattttgactagttgtctgttacttggtcttatcaaccatgtcaaatggttttgttgggcacaatcggagacattttaactgcagttgctgtgctgtttggaggtatgggtatttatggcttttgctttaagcctggaaatttcttctgacgttggattcgatgaccatgactttaagatcttaaatgagttgcagctttgttgcacttttaagtttatttttaaatttgctcagtgtttaacattagccgtgcaaaatagcttgttagttaagtgttttatataatcccatacgtaaaagagatggtttggtctgtgggatggttgacatatggtatctccgggaatttattgttcataccttgaaatattttggagctctttcttgtgtcaaccttattgtgactctggtcatgccctgacactttataactggattactaattactttagcatcttcattttctcaactaccccactttatgttgatttttccatgaattgcctatgcgaggatatactgttcatatatgcacaatcagaatttggaaaaaactgttttttcgatcttcctattagactcaataggacactaaagtctaaaggtcatattactagaatttattcttactgcttgtagattactgcgctgttgaccttagtagtgttaaatcatcgtgtgaatcatgaattaggcaaggtaaaactgtcaggtggatgaatattaataatttttaattcttttgcatgcaaccatgctgtcgttttattttcaagacatgaaagtagtagtattgtgaaattattatgtccatttcatcaacagagttattattactactgatgatcttatatcactgctcattgttgtcttatgcctgctgtgtttgaaataatacagttgacacttggcactgactaattagtcaaacattgcttgcaaaattgcaatttctaaaacgcagtactagttccactagagtcgaaagcacacttggaggtaattagtgtgcagaggcggcatctgatcagcagtggcaggggaatcccaagtcctctgttccttctgacttctaatgtgctgtatggccctggccagcctaggttatcttctggttggcatttctgttatttaattttcttattaggttcaaatactaacggcaccctctgttttgggcccttcactatcacatcctctctcttctgaaactgtcggaatggtaatttaactgttgagtaaaaattaagagtcatttatcaagtgatttccgctgaatttgggttgcttgtctctcgtgagacttgagaagtagtgaaccaagtgattgatttgctggagtccagtaactaagacatactcgacaaacgtgcagtggtgcactgacactgcccttcagtttgtcaagtggtcatcaaagcagaacggggccaagcacccatggttgctgggccctggttccgcccctgaacagtgccaaactggccaactttagtttaaaaatatattcgataaatttctgactattaatttgcagagaaccatagcctgccaaaattttgcaggtggtagaccattctatttttcagttatcttctgtgggtaaatgtcaccacagttggtagctagcagttctaaatggttattgactattgatagtttctgggatttgataatccatatttcccgcacagaacaattgttcatttgttatttggtcgcttctagttttttctttcccggacttcaacaaagtgccttgagaacatttgttcagtttttttgggtcgcctgcatttttggcctcactgtcaacagagctacttgttctgataattacactcttttgtgatcgaatggca

SEQ ID NO: 101313 - DNA, 2104 bp, Zea Mays
tcctttccttgtattgtcggaaatcactgtctcccctccctaccttcgcaagtttgcgcctaaaccctagctcgcttcccaatggcgccgaagaagcgcaaggccgatcccgccgagtccgccgacgctgcggaggcagccgccggcaaccaccgccaggagccagcgccctcggagcccaagccccgcgccaccatctacttccccatcaccgacgacccgccggagcccgccgccgaggaggacgaggaggatggcgctggcgaagacgaggacgacgtggaggacatcggcaagctgctcgagccactgtcgcgggagcagctcgtcgcgctgctccgcacggcggcggagacgagccccgctacgatggcggccgtgcgccgcgccgtggagtcggaccccgccagcaggaagctctttgtccacggcctcggctggggcgccagcgccgaggacctccgctccgccttctcatgcttcggcgagctcgaggactgccgcgtcatctctgacaagcagtccggcagatccaagggctatgggttcgtcctcttccgctcccgccgctctgcactccgcgccctcagccgcccccagctccaaatcgggggccgtcttgctttctgccacctcgccgcctcaggccccgcgcccccagcttctcagtctcagaaccctagctccaacccaaacaccaatgccaactctaactccaataccaccaccaatgcttctggctcatcatcgtcgcaacctgacaatatgccgcgcaagatatttgttggtaatgtgcatgctgatgtggacgtggaccgcctatataactattttgcacaattcggtgagattgaagagggtccgtttggctttgacaagaacactggcaaaccaaaaggattcgcattgtttgtttacaagtctgtggagagtgctcgccgtgctttggaggagccaatgaagaattttgatggcaagacgctcaatgtgcagaaagccatagatgggaggaccaagggctcatctggaacgaatacaaatgctaactccaatcccactactgcatctgtggctgctgctgcagctgctgcgcagatgactgctcctgccactgccgccattagcccatatgatccatcggcatatggtgccactgcggttcctgacatgagttttgcacaacaagccgctatgctgggatttggtgcacagcaacaggcattcgctcaacccaatgcaatgcttgccatgatagcggcaatgcagaacccagctgcactagggatgacaccagccatgtttgctgctatgaacccagccttcgccgctgctgctttaggtgcaggcgggcagcaggcacagacagctggtcttacgggctttggagctcagggttttgggacgcaggcatttggagctggaggtgcagttttcccaaatgcagcaggtgttcaagcagcaacagctgcatatcaaggaggtggggctcctcctggttttcaagggccacctggatttcaggttggccaagcaactacccagacaagcactgcagtggcagcagctggttatcaggctggggcagctgggcagggccaggtgcctggtgctcagattggaggcactggttttcagggtggatattgacagaactagtttggcatctgcgggtcgtggttcgttcatgtggttttgcattcggatggcttttaagtctatattggtgccaaattgttgcggaaggcttcctgctcttgaattttacaaccggatttgaatcagatgtgtttgtagcagtatttgaaggaggaactttcttcaaggattatgttgttttattgcctaatatatagtgctattgcgacttcattatgtactttgtggatgtgtactgggtttcatgtacctaaatatccttattttgactagttgtctgttacttggtcttatcaaccatgtcaaatggttttgttgggcacaatcggagacattttaactgcagttgctgtgctgtttggaggtatgggtatttatggcttttgctttaagcctggaaatttcttctgacgttggattcgatgaccatgactttaagatcttaaat

SEQ ID NO: 101314 - DNA, 2215 bp, Zea Mays
caaaatggcccgggccagcctgcaagaaaaaacttagggttgcaagaaaaaccccagctcctttccttgtattgtcggaaatcactgtctcccctccctaccttcgcaagtttgcgcctaaaccctagctcgcttcccaatggcgccgaagaagcgcaaggccgatcccgccgagtccgccgacgctgcggaggcagccgccggcaaccaccgccaggagccagcgccctcggagcccaagccccgcgccaccatctacttccccatcaccgacgacccgccggagcccgccgccgaggaggacgaggaggatggcgctggcgaagacgaggacgacgtggaggacatcggcaagctgctcgagccactgtcgcgggagcagctcgtcgcgctgctccgcacggcggcggagacgagccccgctacgatggcggccgtgcgccgcgccgtggagtcggaccccgccagcaggaagctctttgtccacggcctcggctggggcgccagcgccgaggacctccgctccgccttctcatgcttcggcgagctcgaggactgccgcgtcatctctgacaagcagtccggcagatccaagggctatgggttcgtcctcttccgctcccgccgctctgcactccgcgccctcagccgcccccagctccaaatcgggggccgtcttgctttctgccacctcgccgcctcaggccccgcgcccccagcttctcagtctcagaaccctagctccaacccaaacaccaatgccaactctaactccaataccaccaccaatgcttctggctcatcatcgtcgcaacctgacaatatgccgcgcaagatatttgttggtaatgtgcatgctgatgtggacgtggaccgcctatataactattttgcacaattcggtgagattgaagagggtccgtttggctttgacaagaacactggcaaaccaaaaggattcgcattgtttgtttacaagtctgtggagagtgctcgccgtgctttggaggagccaatgaagaattttgatggcaagacgctcaatgtgcagaaagccatagatgggaggaccaagggctcatctggaacgaatacaaatgctaactccaatcccactactgcatctgtggctgctgctgcagctgctgcgcagatgactgctcctgccactgccgccattagcccatatgatccatcggcatatggtgccactgcggttcctgacatgagttttgcacaacaagccgctatgctgggatttggtgcacagcaacaggcattcgctcaacccaatgcaatgcttgccatgatagcggcaatgcagaacccagctgcactagggatgacaccagccatgtttgctgctatgaacccagccttcgccgctgctgctttaggtgcaggcgggcagcaggcacagacagctggtcttacgggctttggagctcagggttttgggacgcaggcatttggagctggaggtgcagttttcccaaatgcagcaggtgttcaagcagcaacagctgcatatcaaggaggtggggctcctcctggttttcaagggccacctggatttcaggttggccaagcaactacccagacaagcactgcagtggcagcagctggttatcaggctggggcagctgggcagggccaggtgcctggtgctcagattggaggcactggttttcagggtggatattgacagaactaggtatatcaactctcatcactgttttatgacccacctttgctattattgcttcgatttctttcattctctatgcattctttgttatttgttgatcttgttcttgcagtcatctgattattttctttgtatcttagtttggcatctgcgggtcgtggttcgttcatgtggttttgcattcggatggcttttaagtctatattggtgccaaattgttgcggaaggcttcctgctcttgaattttacaaccggatttgaatcagatgtgtttgtagcagtatttgaaggaggaactttcttcaaggattatgttgttttattgcctaatatatagtgctattgcgacttcattatgtactttgtggatgtgtactgggtttcatgtacctaaatatccttattttgactagttgtctgttacttggtcttatcaaccatgtcaaatggttttgttgggcacaatcggagacattttaactgcagttgctgtgctgtttggaggta

SEQ ID NO: 101315 - DNA, 102 bp, Zea Mays
cgaaaaggttgttacactcacagctttagaagtattcgtatgttgttgtattcagcaggatggagcttccactgaagttgttattatcagcctgactataag

SEQ ID NO: 101316 - DNA, 111 bp, Zea Mays
cagaaccatataccgttccttgttggagacagtcttactcattctgttataatttataattcatttgatttttttactatgtttgactgaattgtcttattcgtattttat

SEQ ID NO: 101317 - DNA, 1063 bp, Zea Mays
caggaaagcaatggaggcgcagacaatcatcaccgaagaactgagacggttcgaggcatggagggactcgctggagaccgttccgaccatcaagaagctgaggtcgtacgcggacaggatcagggcctcggagctcgagaagtgcctgcagaaagtagcacctgaggtgcgacggcagcgacagccgcacccttgacgagacgctcgagaacatgcacgccctcaaccggatgttcagcctcgacatggagaaggcgatcatcgagcagaagatcaaggccaagctccgacgtccagaagctcccggtgtctagagcggagcggacacggcaacagaggcaatggatgagcacggggaaaaggaagagaacaagtctcaagattcggctttggcggcggagcagcgcgaggagacggcggcggcggagggagaggacacgtctgaggaatccacggaccagcgcgaggacgggcacgggtataaagcggacgaatcggcgggcctgctgcccgaggacgacgtgggctctggagaagcctcggcggcgccacacttcgggcacccgtgctcgttgttgcgcgcctgcgccggattcctgggcctgcacggctgcggcggcgatcagaagccggcggcggctgccgttgctgcatctgcagctgaagccgccacggcggcggcggcgagctcgtcccaggatgaagaagacggcggcgtcgacatggcgaaggctaacggtttctacatgcatgaggtgatcacccgcgtatgggcggtcgcggtgaggaggccgcggccgcggccgccggatcacgcgagagaagggagcggtggcaatggaggcgtacaccactaggagtagactcgccgcgcatggttgtctaccttggctcgctcatagcctccgcctacataaatattttgcccgtcagagatctgcggccgtctactgtctacatgcacctttaaataaatccatggctatgaagcatgaatgtctgatgtaattcatgtaggcttctccgatgcggacttcaaataagacaaagtagttgtttctga

SEQ ID NO: 101318 - DNA, 1531 bp, Zea Mays
gtttgatcaaccttctctgttcagtctgtggtagtctttttgcccagctttttggttgctcaaagacgcagtttaggaaaggttccctaatgtgtgtattttttgtgattttgcagaaaagtggtattcccgcttccgagcttagggagcacctgttcatcttgcgaagcagtgatgccacacgccatctgtttgaggtgtcagctggccttgactctttggttctcggtgaaggacaaatccttgctcaggttaaacaagttgtgaggagtggacagaacagtggaggcttgggaaagaacatcgataggatgttcaaggatgcaatcactgctggaaagcgtgtccgcagcgagaccaacatatcatctggtgctgtttctgtcagttcagcggcggttgaactggccctgatgaagcttccgaagtctgaagcactgtcagctaggatgcttctgattggtgctggtaaaatgggaaagctagtgatcaaacatctggttgccaaaggatgcaagaaggttgttgtggtgaaccgctccgtggaaagggtggatgctattcgtgaggagatgaaagatatagagatcgtgtacaggcctctctcagacatgtatcaagctgctgctgaagctgatgtcgtgttcaccagcaccgcatctgaaacttcattgttcgcaaaagaacacgcagaggcactcccccctgtctctgatactatgggaggtgttcgcctgtttgtcgacatatctgtccccaggaatgtcagcgcatgtgtgtctgaagttggcgctgcacgagtgtacaatgtcgacgacttgaaagaggtggtggaagccaacaaggaggaccggctcaggaaagcaatggaggcgcagacaatcatcaccgaagaactgagacggttcgaggcatggagggactcgctggagaccgttccgaccatcaagaagctgaggtcgtacgcggacaggatcagggcctcggagctcgagaagtgcctgcagaaagtaggtgaggacgccctcaccaagaagatgaggagagccatcgaggagctgagcaccggcatcgttaacaagctcctccatggcccgctgcagcacctgaggtgcgacggcagcgacagccgcacccttgacgagacgctcgagaacatgcacgccctcaaccggatgttcagcctcgacatggagaaggcgatcatcgagcagaagatcaaggccaaggtggagaagacacaaaactgaggccaggaagcaatttttctaccaccattatctatatatatagcgtctccaatctcattccatttttttatcctttcactcagtgagcccttcccctgctcactgtgatcgttaactgtgtctgtgaattagagccatggcagcgtgttgtcaataacagcaatgtgtcccaattccccacagaagaaagactatatttatatgcatttattggagcaaatagtttacttatttattatggtggtagactaatctaaattttaattttctacgtttgtttc

SEQ ID NO: 101319 - DNA, 2192 bp, Zea Mays
accacgcccaacacgcgtcataaaaaatgggtacgcatcaataaagaggagcttgggaagttgccaaggcctccgatttcgctaatgcgacggtgaaatcccgcacctacctccttcctctctctccgaggaccctcgcaccaagaactgagcgggaagagaggtagagaggcaagcgcacgagagtttctgctcctctctcgcctcgcctccgtctcctttcctctctggttctctctctgcgattctcgtcgcattggttccgttccctcacgaaaggcggtagctttctgtcttccctgatctatctagataatggcgaccacgacgtcagcgaccaccgccgccgcagcagccgccaccaccgccaagccgcgggggtcgtcgtcggccctctgccagagggtggccggcggcggcaggcggcgctccggggtggtgcggtgcgacgccgccggcgtggaggcccaggcgcaggccgtggcaaaggctgccagcgtcgccgccctcgagcagttcaagatatccgccgaccggtacatgaaggaaaggagtaccatagctgtgataggcctcagtgtacacacagcaccagtggagatgcgtgaaaaacttgctgttgcagaggaactgtggccccgtgctattcaagaactcactagcctgaaccatattgaagaggctgctgttcttagtacctgtaatagaatggaaatttatgtggtggcgctatcatggaaccgtggtatcagagaagtagtggactggatgtcgaagaaaagtggtattcccgcttccgagcttagggagcacctgttcatcttgcgaagcagtgatgccacacgccatctgtttgaggtgtcagctggccttgactctttggttctcggtgaaggacaaatccttgctcaggttaaacaagttgtgaggagtggacagaacagtggaggcttgggaaagaacatcgataggatgttcaaggatgcaatcactgctggaaagcgtgtccgcagcgagaccaacatatcatctggtgctgtttctgtcagttcagcggcggttgaactggccctgatgaagcttccgaagtctgaagcactgtcagctaggatgcttctgattggtgctggtaaaatgggaaagctagtgatcaaacatctggttgccaaaggatgcaagaaggttgttgtggtgaaccgctccgtggaaagggtggatgctattcgtgaggagatgaaagatatagagatcgtgtacaggcctctctcagacatgtatcaagctgctgctgaagctgatgtcgtgttcaccagcaccgcatctgaaacttcattgttcgcaaaagaacacgcagaggcactcccccctgtctctgatactatgggaggtgttcgcctgtttgtcgacatatctgtccccaggaatgtcagcgcatgtgtgtctgaagttggcgctgcacgagtgtacaatgtcgacgacttgaaagaggtggtggaagccaacaaggaggaccggctcaggaaagcaatggaggcgcagacaatcatcaccgaagaactgagacggttcgaggcatggagggactcgctggagaccgttccgaccatcaagaagctgaggtcgtacgcggacaggatcagggcctcggagctcgagaagtgcctgcagaaagtaggtgaggacgccctcaccaagaagatgaggagagccatcgaggagctgagcaccggcatcgttaacaagctcctccatggcccgctgcagcacctgaggtgcgacggcagcgacagccgcacccttgacgagacgctcgagaacatgcacgccctcaaccggatgttcagcctcgacatggagaaggcgatcatcgagcagaagatcaaggccaaggtggagaagacacaaaactgaggccaggaagcaatttttctaccaccattatctatatatatagcgtctccaatctcattccatttttttatcctttcactcagtgagcccttcccctgctcactgtgatcgttaactgtgtctgtgaattagagccatggcagcgtgttgtcaataacagcaatgtgtcccaattccccacagaagaaagactatatttatatgcatttattggagcaaatagtttacttatttattatggtggtagactaatctaaattttaattttctacgtttgtttc

SEQ ID NO: 101320 - DNA, 1972 bp, Zea Mays
accacgcccaacacgcgtcataaaaaatgggtacgcatcaataaagaggagcttgggaagttgccaaggcctccgatttcgctaatgcgacgataatggcgaccacgacgtcagcgaccaccgccgccgcagcagccgccaccaccgccaagccgcgggggtcgtcgtcggccctctgccagagggtggccggcggcggcaggcggcgctccggggtggtgcggtgcgacgccgccggcgtggaggcccaggcgcaggccgtggcaaaggctgccagcgtcgccgccctcgagcagttcaagatatccgccgaccggtacatgaaggaaaggagtaccatagctgtgataggcctcagtgtacacacagcaccagtggagatgcgtgaaaaacttgctgttgcagaggaactgtggccccgtgctattcaagaactcactagcctgaaccatattgaagaggctgctgttcttagtacctgtaatagaatggaaatttatgtggtggcgctatcatggaaccgtggtatcagagaagtagtggactggatgtcgaagaaaagtggtattcccgcttccgagcttagggagcacctgttcatcttgcgaagcagtgatgccacacgccatctgtttgaggtgtcagctggccttgactctttggttctcggtgaaggacaaatccttgctcaggttaaacaagttgtgaggagtggacagaacagtggaggcttgggaaagaacatcgataggatgttcaaggatgcaatcactgctggaaagcgtgtccgcagcgagaccaacatatcatctggtgctgtttctgtcagttcagcggcggttgaactggccctgatgaagcttccgaagtctgaagcactgtcagctaggatgcttctgattggtgctggtaaaatgggaaagctagtgatcaaacatctggttgccaaaggatgcaagaaggttgttgtggtgaaccgctccgtggaaagggtggatgctattcgtgaggagatgaaagatatagagatcgtgtacaggcctctctcagacatgtatcaagctgctgctgaagctgatgtcgtgttcaccagcaccgcatctgaaacttcattgttcgcaaaagaacacgcagaggcactcccccctgtctctgatactatgggaggtgttcgcctgtttgtcgacatatctgtccccaggaatgtcagcgcatgtgtgtctgaagttggcgctgcacgagtgtacaatgtcgacgacttgaaagaggtggtggaagccaacaaggaggaccggctcaggaaagcaatggaggcgcagacaatcatcaccgaagaactgagacggttcgaggcatggagggactcgctggagaccgttccgaccatcaagaagctgaggtcgtacgcggacaggatcagggcctcggagctcgagaagtgcctgcagaaagtaggtgaggacgccctcaccaagaagatgaggagagccatcgaggagctgagcaccggcatcgttaacaagctcctccatggcccgctgcagcacctgaggtgcgacggcagcgacagccgcacccttgacgagacgctcgagaacatgcacgccctcaaccggatgttcagcctcgacatggagaaggcgatcatcgagcagaagatcaaggccaaggtggagaagacacaaaactgaggccaggaagcaatttttctaccaccattatctatatatatagcgtctccaatctcattccatttttttatcctttcactcagtgagcccttcccctgctcactgtgatcgttaactgtgtctgtgaattagagccatggcagcgtgttgtcaataacagcaatgtgtcccaattccccacagaagaaagactatatttatatgcatttattggagcaaatagtttacttatttattatggtggtagactaatctaaattttaattttctacgtttgtttc

SEQ ID NO: 101321 - DNA, 1749 bp, Zea Mays
accacgcccaacacgcgtcataaaaaatgggtacgcatcaataaagaggagcttgggaagttgccaaggcctccgatttcgctaatgcgacgggtacatgaaggaaaggagtaccatagctgtgataggcctcagtgtacacacagcaccagtggagatgcgtgaaaaacttgctgttgcagaggaactgtggccccgtgctattcaagaactcactagcctgaaccatattgaagaggctgctgttcttagtacctgtaatagaatggaaatttatgtggtggcgctatcatggaaccgtggtatcagagaagtagtggactggatgtcgaagaaaagtggtattcccgcttccgagcttagggagcacctgttcatcttgcgaagcagtgatgccacacgccatctgtttgaggtgtcagctggccttgactctttggttctcggtgaaggacaaatccttgctcaggttaaacaagttgtgaggagtggacagaacagtggaggcttgggaaagaacatcgataggatgttcaaggatgcaatcactgctggaaagcgtgtccgcagcgagaccaacatatcatctggtgctgtttctgtcagttcagcggcggttgaactggccctgatgaagcttccgaagtctgaagcactgtcagctaggatgcttctgattggtgctggtaaaatgggaaagctagtgatcaaacatctggttgccaaaggatgcaagaaggttgttgtggtgaaccgctccgtggaaagggtggatgctattcgtgaggagatgaaagatatagagatcgtgtacaggcctctctcagacatgtatcaagctgctgctgaagctgatgtcgtgttcaccagcaccgcatctgaaacttcattgttcgcaaaagaacacgcagaggcactcccccctgtctctgatactatgggaggtgttcgcctgtttgtcgacatatctgtccccaggaatgtcagcgcatgtgtgtctgaagttggcgctgcacgagtgtacaatgtcgacgacttgaaagaggtggtggaagccaacaaggaggaccggctcaggaaagcaatggaggcgcagacaatcatcaccgaagaactgagacggttcgaggcatggagggactcgctggagaccgttccgaccatcaagaagctgaggtcgtacgcggacaggatcagggcctcggagctcgagaagtgcctgcagaaagtaggtgaggacgccctcaccaagaagatgaggagagccatcgaggagctgagcaccggcatcgttaacaagctcctccatggcccgctgcagcacctgaggtgcgacggcagcgacagccgcacccttgacgagacgctcgagaacatgcacgccctcaaccggatgttcagcctcgacatggagaaggcgatcatcgagcagaagatcaaggccaaggtggagaagacacaaaactgaggccaggaagcaatttttctaccaccattatctatatatatagcgtctccaatctcattccatttttttatcctttcactcagtgagcccttcccctgctcactgtgatcgttaactgtgtctgtgaattagagccatggcagcgtgttgtcaataacagcaatgtgtcccaattccccacagaagaaagactatatttatatgcatttattggagcaaatagtttacttatttattatggtggtagactaatctaaattttaattttctacgtttgtttc

SEQ ID NO: 101322 - DNA, 177 bp, Zea Mays
atggagaggagcagggccgcaggcgtctgggcgtcgcgtccccaagctagagtgctggacctagggcgcggccgtgcgagacttgcgtcggggagaggagaatgtggcgccgccgctagagacggagagaccgagagggcttgcgaccttgcgtcggggataactggtcctggatag

SEQ ID NO: 101323 - DNA, 1918 bp, Zea Mays
caacaacaagatcgccaacggccccggctggcctgtccattcattcgttcacgccgatgctctgctacgagcctacgaatgggaacagctcgccatttcgacgagattatcatccgcccgtcttcacatgtatcgccgtggccgccgcagggctggacctcaactgcggcaccttcctggcgcagcacaccgtggcggccgtgcaagccggcaagctgtcggagtccgacgtcgaccgggccgtcaccaacaacctcgtcacgctcatgcgcctggggttcttcgacggcgacccgcgggagctgccgttcggcaacctcggacccagcgacgtgtgcacgccctccaaccaggagctggctcgcgaggccgcgcgccagggcatcgtgctgctcaagaacaccggcaagctcccgctctccgccacctccatcaagtccatggccgtcattggccccaatgccaacgccagcttcaccatgatcggcaactacgaaggcacgccatgcaagtacacgacgccgctgcagggcctgggcgcgaacgtggccaccgtgtaccagccggggtgcaccaacgtggggtgcagcggcaacagcctgcagctcgacgcggccaccaaggccgcggccagcgctgacgtgaccgtgctggtcgtcggcgccgaccagtccatcgagcgcgagagcctggaccggaccagcctcctgctgcccggccagcagccgcagctcgtgtccgcggtcgccaacgcgtccagcggcccgtgcatcctcgtcgtcatgtcgggcgggcccttcgacatctccttcgccaagtccagcgacaagatcgccgccattctttgggtcggctaccccggcgaagccggcggcgccgccatcgccgacgtcctcttcggataccacaacccaagtggaaggttgccggtgacgtggtaccccgagtcgttcaccaaggtcccgatgaccgacatgcgcatgcggccggacccgtcgaccggctaccccggccggacgtaccggttctacaccggcgacacggtgtacgcgttcggcgacggcctgagctacaccagcttcgcgcaccacctggtgtcggcgcccaagcagttggccctgcagctcgcggagggccacgcgtgcctgaccgagcagtgcccgtccgtggaggccgagggcgcgcactgcgagggcctggcgttcgacgtgcacctccgggtgcggaacgcgggcgagaggtccggcgggcacacggtgttcctgttctcgtcgccgccggcggtgcacaacgcgccggcgaagcacctgctgggcttcgagaaggtgtcgctggagcccgggcaggcgggcgtggtggcgttcaaggtggacgtgtgcaaggacctcagcgtcgtggacgagctgggcaacaggaaggtggcgctcggcagccacacgctgcacgtcggggacctcaagcacacgctcaacttgggagtctgatggccgagaggggaatggctaccaagtaccaacgtgaaggcagttggaatttggagggctggatgggtcggaggcagtcggaagagaaggttgtcagaattggttcggcaggtgtctaataaaggcttcctgttgggaaagaattggatccacgggcagctttttagtcatttgtttggaggcattggattcattggagggtcgatttgtgattgtaatcacgataaatgtaatggattggaaattcggaaggggccagatctctttttcatacaaatcacgtgatttagtgtacaattcttttgccactaaaattgcgcagggtttgctgccctgatgcagagctagtgcaagtattgattattaaggctagttattttaatctagtgtttatgagtaaattttctttataaaaagtatagactattcgcttc

SEQ ID NO: 101324 - DNA, 1871 bp, Zea Mays
cagcgcgcggcgtctatatatctcatgtttcacaagacatctctatctctgcaggtacatctcgtcagactgcgactccgtcgacgtgctgtacaacaaccagcactacaccaaaacccccgaggacgcagccgccatctcgatcaaagcagggctggacctcaactgcggcaccttcctggcgcagcacaccgtggcggccgtgcaagccggcaagctgtcggagtccgacgtcgaccgggccgtcaccaacaacctcgtcacgctcatgcgcctggggttcttcgacggcgacccgcgggagctgccgttcggcaacctcggacccagcgacgtgtgcacgccctccaaccaggagctggctcgcgaggccgcgcgccagggcatcgtgctgctcaagaacaccggcaagctcccgctctccgccacctccatcaagtccatggccgtcattggccccaatgccaacgccagcttcaccatgatcggcaactacgaaggcacgccatgcaagtacacgacgccgctgcagggcctgggcgcgaacgtggccaccgtgtaccagccggggtgcaccaacgtggggtgcagcggcaacagcctgcagctcgacgcggccaccaaggccgcggccagcgctgacgtgaccgtgctggtcgtcggcgccgaccagtccatcgagcgcgagagcctggaccggaccagcctcctgctgcccggccagcagccgcagctcgtgtccgcggtcgccaacgcgtccagcggcccgtgcatcctcgtcgtcatgtcgggcgggcccttcgacatctccttcgccaagtccagcgacaagatcgccgccattctttgggtcggctaccccggcgaagccggcggcgccgccatcgccgacgtcctcttcggataccacaacccaagtggaaggttgccggtgacgtggtaccccgagtcgttcaccaaggtcccgatgaccgacatgcgcatgcggccggacccgtcgaccggctaccccggccggacgtaccggttctacaccggcgacacggtgtacgcgttcggcgacggcctgagctacaccagcttcgcgcaccacctggtgtcggcgcccaagcagttggccctgcagctcgcggagggccacgcgtgcctgaccgagcagtgcccgtccgtggaggccgagggcgcgcactgcgagggcctggcgttcgacgtgcacctccgggtgcggaacgcgggcgagaggtccggcgggcacacggtgttcctgttctcgtcgccgccggcggtgcacaacgcgccggcgaagcacctgctgggcttcgagaaggtgtcgctggagcccgggcaggcgggcgtggtggcgttcaaggtggacgtgtgcaaggacctcagcgtcgtggacgagctgggcaacaggaaggtggcgctcggcagccacacgctgcacgtcggggacctcaagcacacgctcaacttgggagtctgatggccgagaggggaatggctaccaagtaccaacgtgaaggcagttggaatttggagggctggatgggtcggaggcagtcggaagagaaggttgtcagaattggttcggcaggtgtctaataaaggcttcctgttgggaaagaattggatccacgggcagctttttagtcatttgtttggaggcattggattcattggagggtcgatttgtgattgtaatcacgataaatgtaatggattggaaattcggaaggggccagatctctttttcatacaaatcacgtgatttagtgtacaattcttttgccactaaaattgcgcagggtttgctgccctgatgcagagctagtgcaagtattgattattaaggctagttattttaatct

SEQ ID NO: 101325 - DNA, 2827 bp, Zea Mays
gccgctgccagcgcctgtgctacgagcgggagcggggtggtgctggtggtgaccaagaatcaatctcattcgagaggtttggggaggtgcagcgagctagtagctgcctagctatataccatgtccgcgtcgtccccggcctcggccgcgctggcggccaccgtggcggcggcggcggcgctgctgctgctgctgctgctctgctgccccaatgtggcgcgcgcgcagacgccggcgttcgcgtgcgacgcgtcgaacgcgacgctggcgtcgtacgggttctgcaaccggtcggcggcggcggcggcgcgcgcggcggacctggtgtcgcggctgacgctggcggagaaggtggggttcctggtggacaagcaggcggcgctgccccggctgggcgtcccgctgtacgagtggtggtcggaggcgctgcacggcgtctcctacgtggggcccggcacccggttctcgccgctggtgcccggggccaccagcttcccgcagcccatcctcacggcggcgtcgttcaacgccacgctcttccgcgccatcggcgaggtggtgtcgaacgaggcgcgggcgatgcacaacgtggggctggcggggctcacgttctggagccccaacatcaacatcttccgcgacccgcggtggggccgcgggcaggagacccccggcgaggacccgctgctcaccagcaagtacgccgtcggctacgtcaccgggctgcagggcgcggtgtccggcgccggcgccctcaaggtcgccgcatgctgcaagcactacaccgcctacgacgtcgacaactggaagggcgtcgagcgctacaccttcgacgccgtggtgtcgcagcaggacctggacgacacgttccagcccccgttcaagagctgcgtggtggacggcaacgtggccagcgtcatgtgctcctacaaccaggtcaacgggaagcccacctgcgccgacaaggacctcctgtccggagtcatcagaggggactggaagctcaacgggtacatctcgtcagactgcgactccgtcgacgtgctgtacaacaaccagcactacaccaaaacccccgaggacgcagccgccatctcgatcaaagcagggctggacctcaactgcggcaccttcctggcgcagcacaccgtggcggccgtgcaagccggcaagctgtcggagtccgacgtcgaccgggccgtcaccaacaacctcgtcacgctcatgcgcctggggttcttcgacggcgacccgcgggagctgccgttcggcaacctcggacccagcgacgtgtgcacgccctccaaccaggagctggctcgcgaggccgcgcgccagggcatcgtgctgctcaagaacaccggcaagctcccgctctccgccacctccatcaagtccatggccgtcattggccccaatgccaacgccagcttcaccatgatcggcaactacgaaggcacgccatgcaagtacacgacgccgctgcagggcctgggcgcgaacgtggccaccgtgtaccagccggggtgcaccaacgtggggtgcagcggcaacagcctgcagctcgacgcggccaccaaggccgcggccagcgctgacgtgaccgtgctggtcgtcggcgccgaccagtccatcgagcgcgagagcctggaccggaccagcctcctgctgcccggccagcagccgcagctcgtgtccgcggtcgccaacgcgtccagcggcccgtgcatcctcgtcgtcatgtcgggcgggcccttcgacatctccttcgccaagtccagcgacaagatcgccgccattctttgggtcggctaccccggcgaagccggcggcgccgccatcgccgacgtcctcttcggataccacaacccaagtggaaggttgccggtgacgtggtaccccgagtcgttcaccaaggtcccgatgaccgacatgcgcatgcggccggacccgtcgaccggctaccccggccggacgtaccggttctacaccggcgacacggtgtacgcgttcggcgacggcctgagctacaccagcttcgcgcaccacctggtgtcggcgcccaagcagttggccctgcagctcgcggagggccacgcgtgcctgaccgagcagtgcccgtccgtggaggccgagggcgcgcactgcgagggcctggcgttcgacgtgcacctccgggtgcggaacgcgggcgagaggtccggcgggcacacggtgttcctgttctcgtcgccgccggcggtgcacaacgcgccggcgaagcacctgctgggcttcgagaaggtgtcgctggagcccgggcaggcgggcgtggtggcgttcaaggtggacgtgtgcaaggacctcagcgtcgtggacgagctgggcaacaggaaggtggcgctcggcagccacacgctgcacgtcggggacctcaagcacacgctcaacttgggagtctgatggccgagaggggaatggctaccaagtaccaacgtgaaggcagttggaatttggagggctggatgggtcggaggcagtcggaagagaaggttgtcagaattggttcggcaggtgtctaataaaggcttcctgttgggaaagaattggatccacgggcagctttttagtcatttgtttggaggcattggattcattggagggtcgatttgtgattgtaatcacgataaatgtaatggattggaaattcggaaggggccagatctctttttcatacaaatcacgtgatttagtgtacaattcttttgccactaaaattgcgcagggtttgctgccctgatgcagagctagtgcaagtattgattattaaggctagttattttaatct

SEQ ID NO: 101326 - DNA, 1534 bp, Zea Mays
gccgctgccagcgcctgtgctacgagcgggagcggggtggtgctggtggtgaccaagaatcaatctcattcgagaggtttggggaggtgcagcgagctagtagctgcctagctatataccatgtccgcgtcgtccccggcctcggccgcgctggcggccaccgtggcggcggcggcggcgctgctgctgctgctgctgctctgctgccccaatgtggcgcgcgcgcagacgccggcgttcgcgtgcgacgcgtcgaacgcgacgctggcgtcgtacgggttctgcaaccggtcggcggcggcggcggcgcgcgcggcggacctggtgtcgcggctgacgctggcggagaaggtggggttcctggtggacaagcaggcggcgctgccccggctgggcgtcccgctgtacgagtggtggtcggaggcgctgcacggcgtctcctacgtggggcccggcacccggttctcgccgctggtgcccggggccaccagcttcccgcagcccatcctcacggcggcgtcgttcaacgccacgctcttccgcgccatcggcgaggtggtgtcgaacgaggcgcgggcgatgcacaacgtggggctggcggggctcacgttctggagccccaacatcaacatcttccgcgacccgcggtggggccgcgggcaggagacccccggcgaggacccgctgctcaccagcaagtacgccgtcggctacgtcaccgggctgcagggcgcggtgtccggcgccggcgccctcaaggtcgccgcatgctgcaagcactacaccgcctacgacgtcgacaactggaagggcgtcgagcgctacaccttcgacgccgtggtgtcgcagcaggacctggacgacacgttccagcccccgttcaagagctgcgtggtggacggcaacgtggccagcgtcatgtgctcctacaaccaggtcaacgggaagcccacctgcgccgacaaggacctcctgtccggagtcatcagaggggactggaagctcaacgggtacatctcgtcagactgcgactccgtcgacgtgctgtacaacaaccagcactacaccaaaacccccgaggacgcagccgccatctcgatcaaagcagggctggacctcaactgcggcaccttcctggcgcagcacaccgtggcggccgtgcaagccggcaagctgtcggagtccgacgtcgaccgggccgtcaccaacaacctcgtcacgctcatgcgcctggggttcttcgacggcgacccgcgggagctgccgttcggcaacctcggacccagcgacgtgtgcacgccctccaaccaggagctggctcgcgaggccgcgcgccagggcatcgtgctgctcaagaacaccggcaagctcccgctctccgccacctccatcaagtccatggccgtcattggccccaatgccaacgccagcttcaccatgatcggcaactacgaaggtacttcgtgtaatatatgatgaccaaatcatccaacacgggaaaattcttgtgttaataagcaaggcaagagcacgc

SEQ ID NO: 101327 - DNA, 106 bp, Zea Mays
ctgctttttgtaagctcagctgaatcattagtgcacgctatcggtgggagtgggacgttagcggctacagacagctacggcgccaccgttcttattactaaatccc

SEQ ID NO: 101328 - DNA, 841 bp, Zea Mays
tgcgtggctgctgaatgggcatgcagcataaaggcagcaaaaaaaaaaaaaaaaggttgagacgggacgacacagagagaatcaatgactcgtattcccaaatcccaaaaggccaaaaaccatacgccgcccaaatgcaaaagctgaagagggcgggggggcgtccaggttcaatgcatgtacacgaccccccttccgtcttgatctgacctgtgggctgtggcctgtcgctgctgcctgcaactgcaatgcaggtcatctctttcaaaccccacacggccacacggcatgtttcaaagtcaggtccaaattccagcagctctgagctatagaaaaaacggcttgggggcgacggagagaggggtatttgcagtataagtacctttggatcgaagagcatcactcgaagatgcatcgaggactgttcttcttcttcctcaagctgtagcctgtgggaggagaggccggagaggcctcccatggagttcccccactcatcacttcttgttggtcccctgctagctgttcgttccctcagcaggtagctagagatgatcttgctttaattttgtgctgatctcttactcgtcgtgtacgctcatatgcatggggcgacggatttgtctctgatcgttcccatgccgcctcttgtatcttgacttggatctatatatcaatgcaaataaatcatcgatgggtgacaatcgatccaagcttcctcatgtgttttcttttttgaagttctttcactagctattcgatcggaatttcttgtctactgctgtatatgcttgtgattgatcgcctgcatataaatggaaatattgtgacttgtagttta

SEQ ID NO: 101329 - DNA, 1355 bp, Zea Mays
actaccctattccgatctcgaggacgccacgccacttttaacccccccacccccccttctgtcgtggtgcctcggcccaagtgctaacgcccaactgccaaggcggggaggggggatccggtgcgcgcgcgcgcggaaatgaacaccggctgattagtaggtgggagatcgaggtcgcgcccttgccccacacgccactaaaggccgcgccgacgggctcatcaggcgctctggacgggctcgcttctgccgctccgcgcttgtgcggtgggtgaagtgctgctgctggtgcgggaagcgtcgccaaacgtgcagaccttggtgggggagcgaggagtcgaaacaagggtaagaaccatgagtgaaacagggcacactgtacaagtcactaacctctcgagcagagtatctgaaagtgatctttatgagttcttttcgttctctggccctattgaacatgttgaacttatcagatcaggagaatacggtgctactgcttatgtgacattcaaggagcgctttgccttggaaactgcggtattgctcagtggggctactattgtggatcagccggtatgcataacttattggggacaacctgaggagacttttaatttctgggacaggccaacttgggaggttgaagaggaaattgaatacacgagttatcaatcatgccagtacaacactactccgcaggaagctcttacagtggctcaagatatcgtgaagacgatgctagcaaaggggtacgtgctcagcaaggacgctttggctaaggctagagcctttgatgagtcccgcggattaacagctgcagctgcagccaaggctgcagagctgagcaagagaattggtttaactgacagggtcagtgctggtgtcggtgcaatgcgatcggtcgatgagacatatcgcgtaacggagacgaccaagacggtagctactgccactggaagaactgcagctaaggtggtaaatggtatcgtcaccagcagctacttctctgcaggagccatgatgttgtctgatgctcttactagggctgccaaggccgcggctgatctggccgctcatggcagacagagttaagtgaaaaacaaaacatacaatccatcctttttcagttactaaacatgaggacgaacaccttaataggatgcttgaagtgttgttgttcgatgtatatttataacagacaacattgttgatttgttgtataaattaaaaggagacgtacactgcgtttgcactaataagtttgattattgcaaatggagtcgagtgatcgtgcagtcatgtttctgactttctgctcatttcatattctcgcatcgctgttgggtgctgccttc

SEQ ID NO: 101330 - DNA, 1350 bp, Zea Mays
actaccctattccgatctcgaggacgccacgccacttttaacccccccacccccccttctgtcgtggtgcctcggcccaagtgctaacgcccaactgccaaggcggggaggggggatccggtgcgcgcgcgcgcggaaatgaacaccggctgattagtaggtgggagatcgaggtcgcgcccttgccccacacgccactaaaggccgcgccgacgggctcatcaggcgctctggacgggctcgcttctgccgctccgcgcttgtgcggtgggtgaagtgctgctgctggtgcgggaagcgtcgccaaacgtgcagaccttggtgggggagcgaggagtcgaaacaaggaaccatgagtgaaacagggcacactgtacaagtcactaacctctcgagcagagtatctgaaagtgatctttatgagttcttttcgttctctggccctattgaacatgttgaacttatcagatcaggagaatacggtgctactgcttatgtgacattcaaggagcgctttgccttggaaactgcggtattgctcagtggggctactattgtggatcagccggtatgcataacttattggggacaacctgaggagacttttaatttctgggacaggccaacttgggaggttgaagaggaaattgaatacacgagttatcaatcatgccagtacaacactactccgcaggaagctcttacagtggctcaagatatcgtgaagacgatgctagcaaaggggtacgtgctcagcaaggacgctttggctaaggctagagcctttgatgagtcccgcggattaacagctgcagctgcagccaaggctgcagagctgagcaagagaattggtttaactgacagggtcagtgctggtgtcggtgcaatgcgatcggtcgatgagacatatcgcgtaacggagacgaccaagacggtagctactgccactggaagaactgcagctaaggtggtaaatggtatcgtcaccagcagctacttctctgcaggagccatgatgttgtctgatgctcttactagggctgccaaggccgcggctgatctggccgctcatggcagacagagttaagtgaaaaacaaaacatacaatccatcctttttcagttactaaacatgaggacgaacaccttaataggatgcttgaagtgttgttgttcgatgtatatttataacagacaacattgttgatttgttgtataaattaaaaggagacgtacactgcgtttgcactaataagtttgattattgcaaatggagtcgagtgatcgtgcagtcatgtttctgactttctgctcatttcatattctcgcatcgctgttgggtgctgccttc

SEQ ID NO: 101331 - DNA, 1319 bp, Zea Mays
actaccctattccgatctcgaggacgccacgccacttttaacccccccacccccccttctgtcgtggtgcctcggcccaagtgctaacgcccaactgccaaggcggggaggggggatccggtgcgcgcgcgcgcggaaatgaacaccggctgattagtaggtgggagatcgaggtcgcgcccttgccccacacgccactaaaggccgcgccgacgggctcatcaggcgctctggacgggctcgcttctgccgctccgcgcttgtgcggtgggtgaagtgctgctgctggtgcgggaagcgtcgccaaacgtgcagaccttggtgggggagcgaggagtcgaaacaagggtaagaaccatgagtgaaacagggcacactgtacaagtcactaacctctcgagcagagtatctgaaagtgatctttatgagttcttttcgttctctggccctattgaacatgttgaacttatcagatcaggagaatacggtgctactgcttatgtgacattcaaggagcgctttgccttggaaactgcggtattgctcagtggggctactattgtggatcagccggtatgcataacttattggggacaacctgaggagacttttaatttctgggacaggccaacttgggaggttgaagaggaaattgaatacacggaagctcttacagtggctcaagatatcgtgaagacgatgctagcaaaggggtacgtgctcagcaaggacgctttggctaaggctagagcctttgatgagtcccgcggattaacagctgcagctgcagccaaggctgcagagctgagcaagagaattggtttaactgacagggtcagtgctggtgtcggtgcaatgcgatcggtcgatgagacatatcgcgtaacggagacgaccaagacggtagctactgccactggaagaactgcagctaaggtggtaaatggtatcgtcaccagcagctacttctctgcaggagccatgatgttgtctgatgctcttactagggctgccaaggccgcggctgatctggccgctcatggcagacagagttaagtgaaaaacaaaacatacaatccatcctttttcagttactaaacatgaggacgaacaccttaataggatgcttgaagtgttgttgttcgatgtatatttataacagacaacattgttgatttgttgtataaattaaaaggagacgtacactgcgtttgcactaataagtttgattattgcaaatggagtcgagtgatcgtgcagtcatgtttctgactttctgctcatttcatattctcgcatcgctgttgggtgctgccttc

SEQ ID NO: 101332 - DNA, 1668 bp, Zea Mays
actaccctattccgatctcgaggacgccacgccacttttaacccccccacccccccttctgtcgtggtgcctcggcccaagtgctaacgcccaactgccaaggcggggaggggggatccggtgcgcgcgcgcgcggaaatgaacaccggctgattagtaggtgggagatcgaggtcgcgcccttgccccacacgccactaaaggccgcgccgacgggctcatcaggcgctctggacgggctcgcttctgccgctccgcgcttgtgcggtgggtgaagtgctgctgctggtgcgggaagcgtcgccaaacgtgcagaccttggtgggggagcgaggagtcgaaacaagggtaaggtaaggctccttcctcgctctccttgtgccctgtattgctgtcatttttttgggttcatttgtggttgcttcggtggtgatttgcctccggcgcatcggatttctatgccggttaatcggtttgtgcgaggagagcctggatcgatcggatcgtctgcctattgttcctttctttgttgactggtcagttacgctgtgccctagttttgttcaggacctgtacctgttcaatatagtttccgttgcataatctgtaacccttatgcaccctattttctccatctagtcttctttgtgctgaatcgggccaggtgtttgctacctacatttacagaaaaatgtttcgtttatttaggatgcttaatttagttgctgaggatatggatatgaagcctgctggatgaatggttaaggctttgtgaagaaatatatgatcaggagaatacggtgctactgcttatgtgacattcaaggagcgctttgccttggaaactgcggtattgctcagtggggctactattgtggatcagccggtatgcataacttattggggacaacctgaggagacttttaatttctgggacaggccaacttgggaggttgaagaggaaattgaatacacgagttatcaatcatgccagtacaacactactccgcaggaagctcttacagtggctcaagatatcgtgaagacgatgctagcaaaggggtacgtgctcagcaaggacgctttggctaaggctagagcctttgatgagtcccgcggattaacagctgcagctgcagccaaggctgcagagctgagcaagagaattggtttaactgacagggtcagtgctggtgtcggtgcaatgcgatcggtcgatgagacatatcgcgtaacggagacgaccaagacggtagctactgccactggaagaactgcagctaaggtggtaaatggtatcgtcaccagcagctacttctctgcaggagccatgatgttgtctgatgctcttactagggctgccaaggccgcggctgatctggccgctcatggcagacagagttaagtgaaaaacaaaacatacaatccatcctttttcagttactaaacatgaggacgaacaccttaataggatgcttgaagtgttgttgttcgatgtatatttataacagacaacattgttgatttgttgtataaattaaaaggagacgtacactgcgtttgcactaataagtttgattattgcaaatggagtcgagtgatcgtgcagtcatgtttctgactttctgctcatttcatattctcgcatcgctgttgggtgctgccttc

SEQ ID NO: 101333 - DNA, 4419 bp, Zea Mays
atcgcagcgccgaacacaaaagctcaccaccaccaccaaaaacctccactgcacgtcacagataccgagggcgcttccgaatttctccctctccctcactttgcagaccgccagccctaccggaggccaggaggcaagcaaaagcggcgacatcttcacagatgccgcagggcgcggcggctgcggcctgagagtgagagcgcgctgtcgaggtccgactccgggtcaggcgggggagcgcattgcgatggcggagtcggcggcgacggacggcaaggcggataaggtggcgaacggaggagggggaggcggcgatgcggcgggggaggggaagaagaggggggaccaggccgtggcgttccacgagcttttctcgttcgccgacaagtgggacctgatgctcatggccgcgggcagcctgggcgcgctggctcacggcgccgccatgccgttcttcttcctgctcttcggcgacctcatcaacggtttcggcaagaaccagaccgacctccgcaccatgaccgacgaggtcgccaagtatgcgctctacttcgtctacctggggctggtggtctgcgtctcttcatacgcagagatcgcgtgctggatgtacaccggggagcgccaggtgatcgcgctccggaaggcgtacctggacgccgtgctgcggcaggacgtggggttcttcgacacggacgcgcgcacgggtgacatcgtcttcggcgtctccaccgacacgctgctcgtgcaggatgccatcggcgagaaggtcgggaacttcatgcactacatcgccaccttcctggccgggctggtcgtcggcttcgtctcggcgtggcggcttgcgctgctcagtgtggccgtcatcccggccatcgccttcgccggcggcctgtacgcgtacacgctcactgggctcacttccaaaagccgggagtcctataccaatgctggtgtcgtcgccgagcaggcaattgcacaagtaagaacagtgtactcttttgtcggagagagcaaagctctcaattcctattctgaagcaattcagaacacactgaagcttggttacaaagctgggatggccaaaggtcttggaattggatgtacttatgggatagcttgcatgtcatgggcactggtattttggtatgccggggtcttcatcaggaatgggcagtccgatggtggaaaggcttttaccgcgatcttttctgcaattgtcggtggcatgagtcttggccaggctttctcaaaccttggagccttcagtaaaggaaagattgccggttacaaactgttggaggtcattcgccagaaaccctccatagtcaatgatcataaggatggaaagtggttggctgaggtccacggaaacatagaattcaaggaagtcactttcagttatccatcaaggcctgatgttataatctttcgggatttctctcttttcttccctgctggtaaaactgttgcagtcgttggaggcagtgggtctggaaagagcactgttgtggctttgatagaaaggttctatgatcctaatgaaggccaggttttgctagacaatgttgacataaagacactccagttgaggtggctgagagaccagattggtctggtaaaccaagaacctgctctttttgcgacaacaatcctagagaatatactgtatggaaagcctgatgcaactattgcagaagttgaggctgcaacgactgcatccaatgctcatagttttatctctcttcttccgaatggttacaacacaatggtaggtgagcgaggcatccagctctctggtggtcagaaacaacgtattgcgatcgctcgtgctatgctgaagaacccaaagattctgctccttgacgaggctaccagtgcattagatgcagactcagaaagcattgtgcaagaagctttagaccgtttgatggttgggaggacgactgtagttgttgcccaccgtctgtccactataagaaacgtgaacatgatcgctgtgatccaacaaggtcaagttgttgagactgggacgcatgatgaactccttgcgaaaggaacctctggagcatatgcctcccttattcgttttcaggaaacggcacgtaatagggatcttggaggtgcatctagccgcaggtcacggtcaattcacttgacaagctcactttccaccaaatctctcagcctcaggtctggaagtctaaggaacctcagctatcagtacagtactggagcagatgggcgcatcgagatgatctctaatgctgataatgaccgcaaatacccagcaccacgtggctacttcttcaagcttctgaaactgaatgcacctgaatggccttatgcagtattgggggccattggttctgtcctctcaggatttattggcccaacttttgccatcgttatgggtgaaatgctcgacgtgttctactacagggaccccaatgagatggagaagaaaaccaagctatatgtgttcatctatattggcacaggcatatacgccgtcgttgcttatcttgtgcagcattacttcttcagcatcatgggagagaatcttacaaccagggtcaggcggatgatgttgtctgcaatacttaggaatgaagttggttggtttgacgaagaagaaaacaattcaagtctcgtggctgcgcatctagctgttgatgcagctgatgtgaagtcggccatagctgagagaatatcggtcatcctgcagaacatgacttcccttatgacttctttcgtcgttggatttatcattgaatggagagtggcaatacttattctggccactttccctctgcttgtgcttgccaactttgctcagcaactttcaatgaagggcttcgctggtgacactgcaaaggcacatgccaagagcagtatggttgctggtgaaggagtgagcaatatccgcaccgtggcggccttcaacgctcaaagcaagatcttgtcactcttcagccatgaactgcgtgtcccagagcagcaaatcctccgccgcagccagacatcaggtcttctgtttggcctgtcacagctctgcttatactcctcggaagcgctcattctctggtatggttctcatcttgtgcggtcacatgggtccaccttctccaaggtcatcaaggtttttgttgtccttgtggtgaccgccaactccgtagccgagacggtaagcctggccccggagatcatccgtggaggtgaatccatccgatccatctttggcatcctcaacagagcaacaagaatcgagcctgacgatccagagtcagagagggtcaccaccatccgaggtgacattgagttgcggcatgtcgacttttcgtatccagcacgcccggacatccaaatcttcaaggacttcaacctgaaaatccaagctgggcgcagccaggcgctagtcggagccagcggctcagggaagagcaccatcattgctctcatcgagcggttctacgacccgtgcggagggaaagtggccatcgatggcaaggacatccggacgctgaacttgaagtccctgcggcgcaagatcggcctggtgcagcaggagccagtcctcttcgcgtcgagcatcctggaaaacatcgcgtacggcaaggaaggcgcgagcgaggaggaggtggtcgaggcggcgaagacggcgaacgtgcacggcttcgtgagccagctgcccgatgggtacaggaccgcggtcggcgagcggggcatgcagctgtcgggcgggcagaagcagcggatcgccatcgccagggcggtgctcaaggacccggccatcctgctgctggacgaggcgacgagcgcgctggacgcggagtcggagtgcgtgctgcaggaggcgctggagcggctgatgaaggggcggaccaccgtcctggtggcgcaccggctgtcgacgatccgaggggtggaccgcatcgcggtcgtgcaggacgggcgggtcgtggagcacggcagccactccgacctcctggcccggccggagggcgcgtactcgcggctgctgcagttgcagcaccaccgtgtgtgacgacgacgagcctctcctccctctgatgataaaaatcttcggtttggaggcctgggcgaggtggcgggttcttcttcggtttcttgggttggttgggcggtggtcctgtcgtgcggatgtagatactaggccaaaccgtgctgtgttcttatgcataaacttggaacatgtgtgatctgtatcttctccctgggatgggatgtactaccatgaaatgcaactcttttggtccacctcgcctcatctgtcctctcaatctctagcagttaggttatcgccgagctcctcctacgatgatggaagacgagagaaaagaaaatgaattccgctgacagaagggtatggcttgccattaaaaattgaaaaaaaaa

SEQ ID NO: 101334 - DNA, 2377 bp, Zea Mays
ttttttttccctcatacatgtaagtgtggtctaatcaattaaatgttaatttcttcattttttccatccacaggtaggtgagcgaggcatccagctctctggtggtcagaaacaacgtattgcgatcgctcgtgctatgctgaagaacccaaagattctgctccttgacgaggctaccagtgcattagatgcagactcagaaagcattgtgcaagaagctttagaccgtttgatggttgggaggacgactgtagttgttgcccaccgtctgtccactataagaaacgtgaacatgatcgctgtgatccaacaaggtcaagttgttgagactgggacgcatgatgaactccttgcgaaaggaacctctggagcatatgcctcccttattcgttttcaggaaacggcacgtaatagggatcttggaggtgcatctagccgcaggtcacggtcaattcacttgacaagctcactttccaccaaatctctcagcctcaggtctggaagtctaaggaacctcagctatcagtacagtactggagcagatgggcgcatcgagatgatctctaatgctgataatgaccgcaaatacccagcaccacgtggctacttcttcaagcttctgaaactgaatgcacctgaatggccttatgcagtattgggggccattggttctgtcctctcaggatttattggcccaacttttgccatcgttatgggtgaaatgctcgacgtgttctactacagggaccccaatgagatggagaagaaaaccaagctatatgtgttcatctatattggcacaggcatatacgccgtcgttgcttatcttgtgcagcattacttcttcagcatcatgggagagaatcttacaaccagggtcaggcggatgatgttgtctgcaatacttaggaatgaagttggttggtttgacgaagaagaaaacaattcaagtctcgtggctgcgcatctagctgttgatgcagctgatgtgaagtcggccatagctgagagaatatcggtcatcctgcagaacatgacttcccttatgacttctttcgtcgttggatttatcattgaatggagagtggcaatacttattctggccactttccctctgcttgtgcttgccaactttgctcagcaactttcaatgaagggcttcgctggtgacactgcaaaggcacatgccaagagcagtatggttgctggtgaaggagtgagcaatatccgcaccgtggcggccttcaacgctcaaagcaagatcttgtcactcttcagccatgaactgcgtgtcccagagcagcaaatcctccgccgcagccagacatcaggtcttctgtttggcctgtcacagctctgcttatactcctcggaagcgctcattctctggtatggttctcatcttgtgcggtcacatgggtccaccttctccaaggtcatcaaggtttttgttgtccttgtggtgaccgccaactccgtagccgagacggtaagcctggccccggagatcatccgtggaggtgaatccatccgatccatctttggcatcctcaacagagcaacaagaatcgagcctgacgatccagagtcagagagggtcaccaccatccgaggtgacattgagttgcggcatgtcgacttttcgtatccagcacgcccggacatccaaatcttcaaggacttcaacctgaaaatccaagctgggcgcagccaggcgctagtcggagccagcggctcagggaagagcaccatcattgctctcatcgagcggttctacgacccgtgcggagggaaagtggccatcgatggcaaggacatccggacgctgaacttgaagtccctgcggcgcaagatcggcctggtgcagcaggagccagtcctcttcgcgtcgagcatcctggaaaacatcgcgtacggcaaggaaggcgcgagcgaggaggaggtggtcgaggcggcgaagacggcgaacgtgcacggcttcgtgagccagctgcccgatgggtacaggaccgcggtcggcgagcggggcatgcagctgtcgggcgggcagaagcagcggatcgccatcgccagggcggtgctcaaggacccggccatcctgctgctggacgaggcgacgagcgcgctggacgcggagtcggagtgcgtgctgcaggaggcgctggagcggctgatgaaggggcggaccaccgtcctggtggcgcaccggctgtcgacgatccgaggggtggaccgcatcgcggtcgtgcaggacgggcgggtcgtggagcacggcagccactccgacctcctggcccggccggagggcgcgtactcgcggctgctgcagttgcagcaccaccgtgtgtgacgacgacgagcctctcctccctctgat

SEQ ID NO: 101335 - DNA, 3673 bp, Zea Mays
gttaacaataactccgtacttccatgtttgtctggttcccgtgtcgacgaatccggcaagctagttcgccggcgcccatgccggccggctgccggcggcgtggcctgctgcttcagtacacaatggcgttgcagtcatccacgctatcgattcttgcacaccgactgaagccgcattctttcgttccccagagatcgcgtgctggatgtacaccggggagcgccaggtgatcgcgctccggaaggcgtacctggacgccgtgctgcggcaggacgtggggttcttcgacacggacgcgcgcacgggtgacatcgtcttcggcgtctccaccgacacgctgctcgtgcaggatgccatcggcgagaaggtcgggaacttcatgcactacatcgccaccttcctggccgggctggtcgtcggcttcgtctcggcgtggcggcttgcgctgctcagtgtggccgtcatcccggccatcgccttcgccggcggcctgtacgcgtacacgctcactgggctcacttccaaaagccgggagtcctataccaatgctggtgtcgtcgccgagcaggcaattgcacaagtaagaacagtgtactcttttgtcggagagagcaaagctctcaattcctattctgaagcaattcagaacacactgaagcttggttacaaagctgggatggccaaaggtcttggaattggatgtacttatgggatagcttgcatgtcatgggcactggtattttggtatgccggggtcttcatcaggaatgggcagtccgatggtggaaaggcttttaccgcgatcttttctgcaattgtcggtggcatgagtcttggccaggctttctcaaaccttggagccttcagtaaaggaaagattgccggttacaaactgttggaggtcattcgccagaaaccctccatagtcaatgatcataaggatggaaagtggttggctgaggtccacggaaacatagaattcaaggaagtcactttcagttatccatcaaggcctgatgttataatctttcgggatttctctcttttcttccctgctggtaaaactgttgcagtcgttggaggcagtgggtctggaaagagcactgttgtggctttgatagaaaggttctatgatcctaatgaaggccaggttttgctagacaatgttgacataaagacactccagttgaggtggctgagagaccagattggtctggtaaaccaagaacctgctctttttgcgacaacaatcctagagaatatactgtatggaaagcctgatgcaactattgcagaagttgaggctgcaacgactgcatccaatgctcatagttttatctctcttcttccgaatggttacaacacaatggtaggtgagcgaggcatccagctctctggtggtcagaaacaacgtattgcgatcgctcgtgctatgctgaagaacccaaagattctgctccttgacgaggctaccagtgcattagatgcagactcagaaagcattgtgcaagaagctttagaccgtttgatggttgggaggacgactgtagttgttgcccaccgtctgtccactataagaaacgtgaacatgatcgctgtgatccaacaaggtcaagttgttgagactgggacgcatgatgaactccttgcgaaaggaacctctggagcatatgcctcccttattcgttttcaggaaacggcacgtaatagggatcttggaggtgcatctagccgcaggtcacggtcaattcacttgacaagctcactttccaccaaatctctcagcctcaggtctggaagtctaaggaacctcagctatcagtacagtactggagcagatgggcgcatcgagatgatctctaatgctgataatgaccgcaaatacccagcaccacgtggctacttcttcaagcttctgaaactgaatgcacctgaatggccttatgcagtattgggggccattggttctgtcctctcaggatttattggcccaacttttgccatcgttatgggtgaaatgctcgacgtgttctactacagggaccccaatgagatggagaagaaaaccaagctatatgtgttcatctatattggcacaggcatatacgccgtcgttgcttatcttgtgcagcattacttcttcagcatcatgggagagaatcttacaaccagggtcaggcggatgatgttgtctgcaatacttaggaatgaagttggttggtttgacgaagaagaaaacaattcaagtctcgtggctgcgcatctagctgttgatgcagctgatgtgaagtcggccatagctgagagaatatcggtcatcctgcagaacatgacttcccttatgacttctttcgtcgttggatttatcattgaatggagagtggcaatacttattctggccactttccctctgcttgtgcttgccaactttgctcagcaactttcaatgaagggcttcgctggtgacactgcaaaggcacatgccaagagcagtatggttgctggtgaaggagtgagcaatatccgcaccgtggcggccttcaacgctcaaagcaagatcttgtcactcttcagccatgaactgcgtgtcccagagcagcaaatcctccgccgcagccagacatcaggtcttctgtttggcctgtcacagctctgcttatactcctcggaagcgctcattctctggtatggttctcatcttgtgcggtcacatgggtccaccttctccaaggtcatcaaggtttttgttgtccttgtggtgaccgccaactccgtagccgagacggtaagcctggccccggagatcatccgtggaggtgaatccatccgatccatctttggcatcctcaacagagcaacaagaatcgagcctgacgatccagagtcagagagggtcaccaccatccgaggtgacattgagttgcggcatgtcgacttttcgtatccagcacgcccggacatccaaatcttcaaggacttcaacctgaaaatccaagctgggcgcagccaggcgctagtcggagccagcggctcagggaagagcaccatcattgctctcatcgagcggttctacgacccgtgcggagggaaagtggccatcgatggcaaggacatccggacgctgaacttgaagtccctgcggcgcaagatcggcctggtgcagcaggagccagtcctcttcgcgtcgagcatcctggaaaacatcgcgtacggcaaggaaggcgcgagcgaggaggaggtggtcgaggcggcgaagacggcgaacgtgcacggcttcgtgagccagctgcccgatgggtacaggaccgcggtcggcgagcggggcatgcagctgtcgggcgggcagaagcagcggatcgccatcgccagggcggtgctcaaggacccggccatcctgctgctggacgaggcgacgagcgcgctggacgcggagtcggagtgcgtgctgcaggaggcgctggagcggctgatgaaggggcggaccaccgtcctggtggcgcaccggctgtcgacgatccgaggggtggaccgcatcgcggtcgtgcaggacgggcgggtcgtggagcacggcagccactccgacctcctggcccggccggagggcgcgtactcgcggctgctgcagttgcagcaccaccgtgtgtgacgacgacgagcctctcctccctctgat

SEQ ID NO: 101336 - DNA, 2106 bp, Zea Mays
aaggaatgccatcagccacatcgccctctccagctctcattaaaaaacctcttgcctgggggcggagctttcgaagctcgcccattgcctcccagtctcccaccctcgcaaccatcaccgccgcccaccgttcccaccgccgcggcctttatttctcccccttccatgccccgctcgcctccgccacctccccctcctcccgcccctaggtgactgtgactccctccggcgcctgaatctccatctcgctccccacccgccgcctccgccgcgagatctccggctgcccgcgccatggtcgccgcctccggccttgcgctgccgcgggtggccgcaccctgcccggcgcgcccgcggggtggtctccgccccgccttgctccgattcgcgccgcccgtggcactgccaccgcaccagctccggtgctgcgcgtccaccgtcgatgacggcttggtgtccgcagcggcctccaagccccgcctccccagggtggttggtatgggttcaaagcttgtcggatgtggatcagccatcccaacacttggcgtttcaaatgatgacctttcaaaaatagttgagacgtcagatgaatggattgcagctcgaactgggattcgtaacaggcgagttctttcaggagatgaaacattgcgggggctctcaataaaagcagctcaaagggcacttgaaatggccaaagtaaaagctgaagatgttgaccttgttctcctttgtacatctactccagatgatttgtttggaggtgccactcaggtgctgacggacgtggggtgcacaaaggcttttggatttgatattacagctgcttgcagtgggtttatagttggcttaatcacagctactcgttttatcaaaggtggaggttttcagaatatcctagtagttggtgctgatgctctttcaaaatatgtggattggacagacagaggtacatgcatcctttttggtgatgctgctggtgctgtgttggtacaggcatgcagcgctgatgaagatggcttgctaggtttttgtgttcaaagtgatggcaatgggcaaaaacacctaaatgccgcaacggcaatcgatgagtcaatcttgtccaataccatggtgttcctggatttccgccaaagaaggcaacctactcatgcattcagatgaacggaaaggaagttttccgctttgctgtccgatgtgtgccacagtccattgagaaggcactccaagaagctggtttgcccgcctccagtatagactggttgttgttacatcaagctaatcagcggattattgatgcggctgccagccgattagatatcccgtccgacaaggttatttcaaatcttgccaactatggcaataccagtgcggcatccatcccgttagctttggatgaggctgttcgcagcggcaaggtgaaggctggcgatattattgcggcgtcaggttttggtgctggacttacctggggttcagctattgtcaagtggggctaattattcaacgtgaaccggaacaacacatcaatgagatagcttcaagctttcaaaggccttgggaggcctacatctgttggttctttccagtgtttttctgtgcaacatttttctttcgcatgtgccagttttccttgcacatgaaaatgcagtgcgccattttaccgtaatccatctgttccttaggctcattacacagttgagagagattgtaatgtagttggcagtagtttgagtggtggatgtaatgtaagttcttgaattttgcatggagataaatttggtggggttaaaagatgagatcacactgtaaagctaattggccttttgtctgggaactgtactgagcggtttccgatcttgtggccccaggcaataagcatgttacaaggagaattggaccgtggacgtatgctgtaggtcaattcttagtaattttgatctgtttttattatacaccattcttcgtgtatttttttttcaagtggccttggtttgtgcgttgttagatgttttgtgtttcagctatccaatcgaggtatagcaggaatgtagatgacataattgctttgacggtatcttgaatttccaggtctataaagtatat

SEQ ID NO: 101337 - DNA, 1691 bp, Zea Mays
agaaaagcccatgtcgtcgtcaagcccgaggcgaaggtggagcccagctctgcttgacccaacgagctcgctcgcgcactccggagtccactactgctcccactcccacctgtcgccgtcgccaacgctaccgtccagctccccgaaacccgcaaaaaaaccaccaccacctccccactacccccgcgctgcgcgcgcgctcgcctcccgaggatggtcgcctccggccgcaagcgctcccgtggcgcggccgttcctgcgccatcatctccatcgcggccgccgtctccccagtcgccgccgcagctgacatcgctgctggcgctgctcgcgtcgtccgtcaccctggcgctacggttcgcgtccgaccgcgacctcctgctgcgcccgtcccagacgctggcgctggacccgctcctcctgtccgcggcgcgcgccgtgtcccgcctcctggcgcagctcccgctccacctccagacgctcactctcacctccctctcgctgtccccgcccacgccgtcgccgcagctgccttcctcctggttcctccgcctcctctcctgcccgtccctcccggactccgcctggcgcgacgcgttccgcatgtccaagcccgccttcttccagctcctccacgccctcgcgctcccggcgcccgccgcctcgtcctcctcggccctcgcgctgccgcctgaccacaagctcggcgccgcgctgttccgcctcgcccacgccgcgcccgcccgcgccgtggcgcgccgcttcgggctcccgtcccccgccgtcgccgcgcgcgcgttctacgaggtgtgccgcgcgatcgccgagcgcctggccgtgctgctcgacctggttgcgcccgaccggatcgcgcgcgccgtgccgggtttctgcgcgctctcgctgcccaactgctgcggcgcgctcgggtacgcgcggttcggggaggcggccacagcgcaggcgctggtcgacgccgacggccgcttcctcgacgtctccgtcgggtgggacccggagatggcgccggcggagatcctcccgcggacgaagttgtacacctcccagtccctggtgctcgccaacgcgcctcagggtgagctcatcggtggctccgtgccgcgctacttcttggggcctgcttgctgccctctgctcccctggcttgtgacaccgtacaggcatgtggtggatgccattgccgctgatgatgacttatccaaagaaagcatctttaaccatgtgcacgcgcacgggcagcaggtggtgaagaatgcctttggccatgtgcgggcacggtggcgccttctggaggaatgctggaagggcgagtgccaagaggcactgccttatgttgtggttgctggttgtctgctccacaattttctcctccaatgcggcgagccggcgaccgaagtgattcaacggaacgctgatgatgatcggtttgtggactttgagggtgacaaggatagggagggggagagaatcagggatgttcttgctgcacatctgagcttggtaagccgaaatcagtgaagactgtgtgtgtgtgtgcatagtagtctctagtccccagcatctgtaatgctgatgtatgtatgtatcgtatgtcatcttctacgtaagctgctttaatctaatgctctactgttttcagttcactccacctgctaactttctgtgtggca

SEQ ID NO: 101338 - DNA, 195 bp, Zea Mays
atggagtccaccaagctctccgcgctgctggtgctcgccatgctcgcgctctcctcgtccccgctcgctctcgcgtgggagaaggcggaaccggagtgccactcgtgcgagtccggctcgccaccctcgaccggcggcgtccccctgcctcccgtcagcataccgtcagtcccgctgccacgaatctctagatta

SEQ ID NO: 101339 - DNA, 1544 bp, Zea Mays
cccaccgagccaccggagcaccagccaccagtgcaccaccatcgcagggagttagggacacacaccggctgccgcggcccgccatgtctcactgctgcccctgcgcgagtgcctcctcctccaccgcgcccttcttcctcccttctatccccgactcctcttcctgcaggagcggcagcggtggcgccttcagcgctgctgttggtcggagcaagctgcggtgcggcggcgggccgaggcgcgggcaagcgacagtcgcggcaggcagcaaggacggcgggagcggcggcacggctggaggggagaagggagaagacgacgccccggcgttcaatccgttcgggttcgtgacggacaacccctccagccgcagcgccatccagctgcccgcggttcccgccgaggacggcaatgtcggccagatgctctacaggatcgaagacaagggcagggaatacggctcgtatgtcagagcaggagagtttcgatggttcgtcagggaaacagggtcacctgatgcacgacgtgggactattgtgttccttcacggagctcctactcagtcatttagttaccgggtggttatggctcagatggcagatgctggctaccactgctttgcacctgactggatcggatttgggttcagtgaaatgccacaacctggatatggattcgactttaaagaggacgaatttcacaaggcatttgatgatcttcttggtactctaaatatcaccgagcccttcttcttagttgtccagggctttcttgttggttcttatgggctgacgtgggcactcaataactcaagcaaagtccttaaattagcaatccttaacagtcctcttacagtttcttctccagtccctggattgtttcagcagctaaaatggccactctttggtgaatttacttgtcaaaatgctgttttggctgagcgtttcattgaagcaggtagcgcatatatgctgaaattggaaaaggctgatgtatacaggttaccgtatctatccagtggcgctcctggattcgctttgcttgaagctgccaggaagatcaatttccaagatgtactaagtagaatttccgccggattttcgtccaacggttgggaaaaaccaatactgcttgcatggggaatatctgacaagtacttaccgctctcgatagctgaggaattcaagcaagctaatcctggcgttgtaaaactagaggcgatagaaggagctggtcacatgccgcaagaggactggccggagaaggttgtgaaggcgctgacatccttcctgtaaacatgtgcaaagatcattatgtcatccgcacgggaactttcaaacatgcatgatgactgtcgtggcttcattacgtcctcctgtctaatttaattatgccttggattgcttagatttgtgactgtacaggtcaagatgtatattagcaaacgctttgcatttgtaaattgcgacgtggacgatatcagcgacgtgttagctcacgtcagagatggataacatgttgtattttcggattcagaattatgg

SEQ ID NO: 101340 - DNA, 1459 bp, Zea Mays
ccacaattattcgccgggccgggatccgcccaccgagccaccggagcaccagccaccagtgcaccaccatcgcagggagttagggacacacaccggctgccgcggcccgccatgtctcactgctgcccctgcgcgagtgcctcctcctccaccgcgcccttcttcctcccttctatccccgactcctcttcctgcaggagcggcagcggtggcgccttcagcgctgctgttggtcggagcaagctgcggtgcggcggcgggccgaggcgcgggcaagcgacagtcgcggcaggcagcaaggacggcgggagcggcggcacggctggaggggagaagggagaagacgacgccccggcgttcaatccgttcgggttcgtgacggacaacccctccagccgcagcgccatccagctgcccgcggttcccgccgaggacggcaatgtcggccagatgctctacaggatcgaagacaagggcagggaatacggctcgtatgtcagagcaggagagtttcgatggttcgtcagggaaacagggtcacctgatgcacgacgtgggactattgtgttccttcacggagctcctactcagtcatttagttaccgggtggttatggctcagatggcagatgctggctaccactgctttgcacctgactggatcggatttgggttcagtgaaatgccacaacctggatatggattcgactttaaagatggccactctttggtgaatttacttgtcaaaatgctgttttggctgagcgtttcattgaagcagatatatgctgaaattggaaaaggctgatgtatacaggttaccgtatctatccagtggcgctcctggattcgctttgcttgaagctgccaggaagatcaatttccaagatgtactaagtagaatttccgccggattttcgtccaacggttgggaaaaaccaatactgcttgcatggggaatatctgacaagtacttaccgctctcgatagctgaggaattcaagcaagctaatcctggcgttgtaaaactagaggcgatagaaggagctggtcacatgccgcaagaggactggccggagaaggttgtgaaggcgctgacatccttcctgtaaacatgtgcaaagatcattatgtcatccgcacgggaactttcaaacatgcatgatgactgtcgtggcttcattacgtcctcctgtctaatttaattatgccttggattgcttagatttgtgactgtacaggtcaagatgtatattagcaaacgctttgcatttgtaaattgcgacgtggacgatatcagcgacgtgttagctcacgtcagagatggataacatgttgtagataatggaaaccaagttccggatttgtccccaaaataagggtacaaccagacatatgttgggggccttcgtcctccgaaggtcctcaaaaacatgatttgacaatgttttccaagtgaa

SEQ ID NO: 101341 - DNA, 889 bp, Zea Mays
ccacaattattcgccgggccgggatccgcccaccgagccaccggagcaccagccaccagtgcaccaccatcgcagggagttagggacacacaccggctgccgcggcccgccatgtctcactgctgcccctgcgcgagtgcctcctcctccaccgcgcccttcttcctcccttctatccccgactcctcttcctgcaggagcggcagcggtggcgccttcagcgctgctgttggtcggagcaagctgcggtgcggcggcgggccgaggcgcgggcaagcgacagtcgcggcaggcagcaaggacggcgggagcggcggcacggctggaggggagaagggagaagacgacgccccggcgttcaatccgttcgggttcgtgacggacaacccctccagccgcagcgccatccagctgcccgcggttcccgccgaggacggcaatgtcggccagatgctctacaggatcgaagacaagggcagggaatacggctcgtatgtcagagcaggagagtttcgatggttcgtcagggaaacagggtcacctgatgcacgacgtgggactattgtgttccttcacggagctcctactcagtcatttagttaccgggtggttatggctcagatggcagatgctggctaccactgctttgcacctgactggatcggatttgggttcagtgaaatgccacaacctggatatggattcgactttaaaggtcaggaaaatgtgtattaaactaatgtcccgtttggatcactagaattgaattccattctaataatagtaatttaggcatatatcaattaagctaattcactttttatacaaaatatatttgcatactattattagcaagatgttctagatatttatgtgctatatttttact

SEQ ID NO: 101342 - DNA, 414 bp, Zea Mays
atggcgcaacagccgatggagcactgctccgcggtggcaagatacccgaggtcggcgaggagtaccaccaccgcgtttccggagggcaccagcgtggggaggacggctgcgacaacctccattctccgtcacggcagagatcacgcggtggtccggtgggcgtcggcggtggaagcccagcggcatagtgacggctggaggccggcgtttgttgccttgctggagggcggcaacagccagaccaggcaagtgaagtcttgctggatggctggaggcagcacgtcaagcaggcgacgccgcgacggtagggcccagggccagcggcatgctggcggccgtgtggaggaggggtgctgtggagccagggggagattcaggatcaggatcgggatcgggatgagacggagatcttga

SEQ ID NO: 101343 - DNA, 977 bp, Zea Mays
tttggtcttggccacgctcgctagctcccttgcttgcttactttgctcagctagctagctagcgagagggccagagagcttcgccatggcggcgtcccactcgcccaaggtcgcgagggaggtcgccgccgccacctgcgccgtcgacgccaacaccacgttcgtgcaggccgacccggccacgttccgcgcgctcgtgcagaagctcacgggcgccgcgacggacgatgcggcagcggcggcggcggtgaccgtcgcgcacgcgccaccgcccccgccgaggcggcccaagctccaggagaggcggcgcgcggcgccggccaggctggagctggagctggcgcggccgcagccggcgtcgccgtccccgtcgtcgtcgttcttctactaccaccaccaccacgctcacggcgcccacgcccaccaccactgccacgggcccatgcattcgccggtctcgcccatggacgcctacatagcgctggcggtctccgcgtcgccgtcgctgtcgtcgtcctcgtccatgtcgccgcactcgtcgtcgtgcggcggcggcggggccgtggtggtgataagcagggaggaggaggaggagcgggaggagaaggccatcgcgtccaagggcttctacctgcacgcgtcgcccaggggcggcgacgaccagcccaagcttctgccgctgttccccgtacgtccactcaaatcaactccggcgagctgagggctgaggctagctagctagccgtgtgcgttgaccactgcacaaacatgcgtttccggtaattccagtgatgtaaccgcgcgtctatatatttgcgctagaagaactagatgatgatgatccatggatagatgatgcgacgtcgtacgcttgttaattaatttttagctaggcctttactgctttatagttagtagatggctaattaatcatctgaatgtaatgacgcgcgtggcgtgaatgaagtgtgtctccc

SEQ ID NO: 101344 - DNA, 2881 bp, Zea Mays
ccaccgcgcaactgcttccgtcctctgccaccggggcacgccgaaagctcgcctcgcaagcgcgcggccgcgccagcacaccacgcctcgcttcgtttacccgttgcttgccgccgaatcgaccacgctggcgaccaggccagcgccatcgcatcgtccccggaccgctccggtcgcgcccgccaggcctcggggctcgggtagaccaccaccaaaacagaaccttccctccggaccgaaaccgccgcttcccctccccgctctttctgtgaggagggaagcgaggcggatgccgaggcgacggggctcgcgcaccgcactcgtgtgcccgccgcccggggaccaggcgacgtggtgactggtgaggtgaggcaagcgcgcggttttaaattccccgcacgtccttctcgccgtagttttcagtccggaggtacatcaagggaggaacaaacgtgagggctgcctgcctccggacatgggctccagcttcaagtaccgagctggcctctgcctcatcgtcgccgtcgtgctgatttgggtcatatccgcggaggtcacgcaggggatattcacaaagtacaaacatccttttgcagttacttacttgggggcctcccttatggtcatatacctccctttgtcatttctaaaggattctggaaacaccagtgcttcataaattgcaagcaaaacttcctttggtggtggtgcccctttgaagaatgacgaatttcggaagactttagtgctaaattgcactgatgtgagcattcctgtagtgaaagagacaaaaccactcatatatggaatcactgaaatgaatgatggtgttttgaaggacaagcaactttcgactaaggagattgcaacttatggattgtatctttgccccttatggtttgtgacagagtatttatcgaatgcagcgcttgcaagaactagtgttgccagtaccaccgtactgtcttcaacttcagggctcttcactcttttcattggtgttttacttggccaagactccataagtgcttcgaaagttattgctgttttcattagcatggctggcgttgtaatgacaactatgggacagacttgggcatctgatgaatcagaagtaggcaaatctggggctacacaaaggactcttctaggtgatatgtttggttttatgtcggcaatcgcgtatggtctatttactgtgctgcttaaaaaattttgtggggaggaaggagaaaaggttgatgtccaaaaactgtttggttatcttggactttttacccttgttgctctctggtggattgtctggccattaaccgcactaggcattgagccaaagttttcgatgcctcactctgctaaagtggatgaagtggtggtggcaaatagcctaattggaagtgtactatcagattacttctgggccctttctgttgtttggactactcccttggtggccacgctaggcatgtctctcacaattccactggcgatggttgcggatatgatcattcacggccgtcactattcagcagtgtatattctttgttctgtccaggtattttcaggctttgtcatcgcgagccttgcagatcggctttcacgttctctagggctattatagtttcataaaacgaagcaggttcttgttagagtgtacatctggaagtttaaaggtcgggttggttagacaaaatacttgaggaaacacgggttgggatttgggaaatgccagtaattcgtttcccttttgctcctttaaacataggagcggtgaattttgccgcggcgaatagtaaaggccagcagacgaagaagaaaccgtatattgtagcaaccctttgcaactgtatattctcctactacaaattgagcgacagtgtaaactgccgtcgttctggccttgtcgatccgtgtcgattgcaaatttgcaaatgtcacttttatatccttgtcgatccgtgttcatggcaattgcgcgagttaacaaagaatgaatgggcaaaaaaaaaaaaaaaaaaaaaaaaaacggagctacaaattgcagcgaattgaatgggcaagttgtcatactcctatgcaaagtgtgcgacaatgcaaactgaaaagtgaaaatgacttactgcacaagcaacgtcaaattcaaagtgtacatgctactagcagcttagcgagcaactgaagttctcatagtcgccatgtcggagcgagatgcgatagacggcgaaggcggcactctgtccggggtcgcgcagcagcggcgtggtgaccctgtcgacctcgaccacctcaaaaccatgctcccgcagcacgtccatgcagtccagcacgctgtcccgcacctcgctcgccgcccaccccgcggtgccgccgccgccctcgtccgtccaccacataccccgcagcgtggccgccatcgccggcatgtcctcgggatcgtagaagacgtcggacaagagcacgacgcccaccctcccgtcgccgtcgtcgagcgggagcaggtcgccccagcggagctcgcgcacgcgggcccgcgcggcgctgaggccgttggcgtccgcgttggccctgaggcccggcagcagcgcggccacgtccgtgagcacgcagcgcgcggcgccgaggcaggccacggcggcgatgcccgggagccccgtgccggcgccgagctccacgacggtggcgccacggaggcggcgcctggcgcgggggtccgcggcgaggtgcgcggccaggaccagggacgactcccacagccaggagccggtgaggacgcggcccgtggccgggtcgctcgtgccgtcgcgctccaccaccgccagcgcgcgcccggccacggctacgtgcaggacctgcgggcacagcgcgtccattcccgttcccg

SEQ ID NO: 101345 - DNA, 1412 bp, Zea Mays
ccaccgcgcaactgcttccgtcctctgccaccggggcacgccgaaagctcgcctcgcaagcgcgcggccgcgccagcacaccacgcctcgcttcgtttacccgttgcttgccgccgaatcgaccacgctggcgaccaggccagcgccatcgcatcgtccccggaccgctccggtcgcgcccgccaggcctcggggctcgggtagaccaccaccaaaacagaaccttccctccggaccgaaaccgccgcttcccctccccgctctttctgtgaggagggaagcgaggcggatgccgaggcgacggggctcgcgcaccgcactcgtgtgcccgccgcccggggaccaggcgacgtggtgactggtgaggtgaggcaagcgcgcggttttaaattccccgcacgtccttctcgccgtagttttcagtccggaggtacatcaagggaggaacaaacgtgagggctgcctgcctccggacatgggctccagcttcaagtaccgagctggcctctgcctcatcgtcgccgtcgtgctgatttgggtcatatccgcggaggtcacgcaggggatattcacaaagtacaaacatccttttgcagttacttacttgggggcctcccttatggtcatatacctccctttgtcatttctaaaggattctggaaacaccagtgcttcataaattgcaagcaaaacttcctttggtggtggtgcccctttgaagaatgacgaatttcggaagactttagtgctaaattgcactgatgtgagcattcctgtagtgaaagagacaaaaccactcatatatggaatcactgaaatgaatgatggtgttttgaaggacaagcaactttcgactaaggagattgcaacttatggattgtatctttgccccttatggtttgtgacagagtatttatcgaatgcagcgcttgcaagaactagtgttgccagtaccaccgtactgtcttcaacttcagggctcttcactcttttcattggtgttttacttggccaagactccataagtgcttcgaaagttattgctgttttcattagcatggctggcgttgtaatgacaactatgggacagacttgggcatctgatgaatcagaagtaggcaaatctggggctacacaaaggactcttctaggtgatatgtttggttttatgtcggcaatcgcgtatggtctatttactgtgctgcttaaaaaattttgtggggaggaaggagaaaaggttgatgtccaaaaactgtttggttatcttggactttttacccttgttgctctctggtggattggtattttttgtttcccttttcgaaattaatataacaggagtatacaatttcgtaatttatgatcgtattctggtatttcttaattgtgcatgcctttcatggttattttat

SEQ ID NO: 101346 - DNA, 1417 bp, Zea Mays
ccaatacaaatactcgcccagcaaacagagagacagggaagggaagccaagaaaaccacgccaccgccaaaagcagctgcagataccactgctgctgcgcctgcctgcacagcccccagcaggagagagagagagagagaaagagggggaggcggcagcggcagccagcaaaggcggcggcttgcggcttgagctgttgatgatgcagggcgagtaccggtcttccatcgaggagtcggctgcggccgctgttgccgcagccgcagccatggctcctctggcggccgcggcggtgaagatggaggcggagcaggcggcgatggcggcgccgcagctgggggcggcgcaccagcagacgcagccgcggcggcagtaccgcggcgtgcgcatgcgcaagtggggcaagtgggtggcggagatccgggagccgcacaagcgcacgcgcatctggctggggtcctacgccacggccgtggcggcggcgcgcgcctacgacacggccgtgttctacctgcgcgggcggtcggcgcggctcaacttccccgaggagatcccctcgttcgggctggcggatggcgtggacgtgggggagcacgcgcgcgacccggccgccgccgccgccggcggcggcggcggctgcacgctgtccgcggcgtccatacggaagaaggccatcgaggtggggtcccgcgtggacgcgctccagaccggcatggtggtcccgccgccgcaccaccgcgagcgccataggcaccacaaccacctgccgcagctgcgggtgcacgcggaggagcagcaggaggaagaggagcagaagccgcagcggcctgcgtggagcgggcgcgtcaagaacccggatctgaaccgtgcgccgagccccgagagctccgacgccgagtgacaagcgagcgagagagctgagcagcaggcaccgcaaggcgaggttcaacgacgacgtccgttatcggttattcccaatcccacgacgcagcatgccgttgtcgtctccgtccgaccgtccccacgtacgtacgtacgtacacgacgatccagctgacccggccgcctgcctatcctatcctatccgtcctcgacgaccggatggtcggcgggcgggagggcggtgcggcgagggttttggccttttgggtacgttgtggataagcacgaaggcagcaggccagcagcagcaggggcggcgtggcgggcgggcaggcaggggcagggcaggcggagacggagggaggcggccacaagcggcggtctttccaaaatgtcaaaaaggacagctgtaacagcgataagaaaaacaagtcatcatcaccctctctcactactagttctactactagcagtatgattattcgaatcggccttgcttgacagcgattaatatctttgccgcctgagttgcacc

SEQ ID NO: 101347 - DNA, 997 bp, Zea Mays
caagcaaggtatctgtctccccgttttatggcttgttgatcaggccgtcttcgctcgctgaccaccaccgcctcgctcgtcgagcatatagccatgccatggcaagcacaggctcagagggatagataggtccagtgcaagcgcgcaggcatcgtcatccagggagggtggtggcccgtggtccacatcgatgcgatgccggttcacgttgcgctcctcgccgtgccggcggtggccgctgggttcctgcaggcgttccagttcgcgttcctgctgtggcccttcaacctggcgctgccgctggcgcgccacctgccgcacgcgtgcatcgcgttccgcggggtcgcgtccttgtacggagccgagctgcggcggtacgcgggcgccgccgcccgggccgccgtgcccgtgctgcagccgccgagccaccaccggtacgcctcgctccgcgccgtgcagcagcgggcgcacggggatgccgtcgtcgcgcacgccatggtcgcgctcgtcgacatctcctactgatgccggccgcttgcatcgcgactccgggcgcacttccgggcgattcctcagccttttagcatgccgtcccgagtgtaaataaaacaatatatacctgttcttcctccctaccttcgtcagctgaggtgtctagtttgtttcttcaccatggacctgtggcgagcttcagtgtgtacaagaccggaattcgagttgcttgatgtgcctcctgttgaagtcgtgactactagtactagtatcttgaactacattgcgataggcatagaccatgtcaattctgtacagtatgtcatttgaagctactaatcagcgaacggtcgtaaaaaaacagcgaactatcagataatacgtaacttatccttttaggaaaaaaaacaaacatctattagaaagaaacaaaacagaggtacaacatgaaaatacaatcaagagagctattatccagagactgtacttaaaaataaataaagaa

SEQ ID NO: 101348 - DNA, 878 bp, Zea Mays
gtgccctttcgccttacttaacccgcgaggacacgccgcatttcgcaggcgcgatcgagctcaccaagcgcggatattggcccgtcagcagaacaagtgcgctgcacgcgacgcgatcgaccggccggccgggcagacagacattatctcaattcccactagctagctagctgctgcaggaggcaagagacgacgacagacagccagccgccaccgtgcggtgccaaggcgagctccggtccgcgacctgttgtgcgccgccgctgctggcttctcttccgcctcgacgcgcgacgatcgatggggttccccctgctcgcgttcgtggcggcgaggggcctcatgcaggtgttcaacctctcggcgccgctcaacctccgcctgccgctcgcgcgccacctgccggaggccttcgccgtcctcttcggcgtgctcgcgtcccacgccgcgtggctcagcgacgccctggcgcgcggcgccgcctggcgccacaccgggaaccggggcggcgtcgacgagtatgtccgctacgccatgctcagcatctccgactgagacgcgcgcatccacggcggacgacaaccaccatctccgactccgtccctgcgcgatcgagaaggcgctagctatcaagctgcggtccgtcgtgcatgctcgtggtggcaactgcatgccgcccctcgctagattagcttaggatctctctccccctccccctttgtaacacattgcttgctcgctcctttggtttcttcttgttcgtagcatgcgtgatttttggtagcatcggaaagatctgtgagattgttgtaacatgcaaccgtggaccgtggttaatttgtaaatacaggtgaattttgttcgagctagtgaaagtt

SEQ ID NO: 101349 - DNA, 2077 bp, Zea Mays
tagcccacacagtcgggtaagaataaaaaaggtcgccctcatccaatccaatccaacctgtccacttccgctccacaaccccacgaccaataaaaaaccaacggaaaatatcgtacagctgactggtccagtagattagatgcgaatgaatttaaaaaaacaaggggatcacggaatctgggcccaccgctccctcgcccacttgtattaaaaggaagggcctccatctcaactctcatccatctgctctgctccggtccgttccgctccttcctccccctatctagctagccttcccgttcctgcatcgcggcggagatgggcgcctccaccacgccgctcgcgtcggcggcggcgctgcttctgctgctgctcgcgccgctcgccgcggcggcggacagcatgtcgatcgtctcctacggcgagcggagcgaggaggaggcgcggcggatgtacgccgagtggatggcggcgcacggccggacctacaacgccgtcggcgaggaggagcgcaggttcgaggtgttcagggacaacctccgctacgtcgacgcccacaacgccgccgccgacgcgggcgtccactccttccgcctcgggctcaaccgcttcgccgacctcaccaacgacgagtaccgcgccacctacctcggcgtcaggagcaggccgcagagggagaggaggctcggtgacaggtacctggccggcgacaacgaggacctgccggagtccgtcgactggcgggccaagggcgccgtcgcggaggtcaaggaccagggcagctgcgggagttgctgggctttctcaacaatagcggctgtggaaggcatcaaccagattgttactggcgacatgatctccttgtctgagcaggagcttgttgactgtgacacttcatacaaccaggggtgcaatggaggtttgatggactatgcgtttgagttcatcatcaacaacggcggaatcgacaccgaggaggattacccttacaagggcacggacggacggtgtgatgtcaacaggaaaaacgccaaggttgttactatcgacagctatgaagatgtaccagcgaacagtgagaaaagtctgcagaaggcagttgcgaaccagcccatcagtgttgcaattgaggctggtggcagagcatttcagctctacaactcgggtatcttcacaggaacctgtggaaacagcgttggaccatggtgtcacggccgtcggctacggcacagagaacggcaaggactactggatcgtgaagaactcttggggcagcagctggggcgagtccggctacgtcaggatggagcgcaacatcaaggcgtccagcggcaagtgtggtatcgccgttgagccgtcgtaccctctgaagaagggcgccaaccccccgaaccctgggccgaccccgccttcccccaccccgccgcccaccgtctgcgacaactactactcgtgccccgacagcaccacctgctgctgcatctatgagtacggcaagtactgcttcgcctggggctgctgcccgctcgagggcgccacctgctgcgacgaccactacagctgctgcccccatgactaccccgtctgcaacgtcaagcagggaacctgcctcatgggcaaggacagcccactgtcactgtcagtgaaggctacgaagcgcaccctggccaagccgcactgggctttccctggcaacacagctgctgacggcatgaagagcagcgcatgagaaaaacgcagcatggcattaggccgccaacagccagcatgattagagcccccctgcatgcagaatgatcacccggtcccgtagttcacgacgaaagcatggctgggcggccgctgtttacggatttacttatatcactatagtaggtactcctcctgtacataagcctgaaaaaaaatgggttcagttgtttatggaactctgccaaatttgcttttgcatgccatgtaaaaatccagctagctcttgccaagcttcccctgcgcagttcaacaggactgcgattgatattcggtgtaatggaagtatttatcggaacaatcagcaatgttatgctatattcatttc

SEQ ID NO: 101350 - DNA, 963 bp, Zea Mays
atgccacattgtcttggtcatgtgtttggtgtttccctaaggttaggccgccacaaattcttaggcatgcgccacaccactcgccacaccaaaaattcgccacaactgcggcgtccaaatcgagcgcctcaaccctacgccagacgctgccgcaaaaatctgctcgtcgctgccacagggggggagggagaaggcgagggacggtcacctggtaggagctgcgcggcggcaaagacgaggccatggtgggattactggtggggattaggggttatagctgctagatttttcttgtgcgcggtgggggaggtggagctttcttggtcgcatggaactggagttgttccgttggtctggatccgtcgctcctgcgcatgggacttgttgcaagctgagggcactaggagacccttgctgatcaagatgggttcaaagaagatgtatcttgagtattgcaataactataatcattacctacgaaggagaagggtgcttgttttcactaccatccgcattgttttattgtggtataagttgcaactgaatagattgaataagaagcacaccaaatacggttctttgttacaaagagatttggaaagggaaaggcggctggaccgtttgtaccatgggaccgaagccaactgcattagtgagttgcgtatgcgcaaatttgtttttcacaggttatgtggtcatttaaggacccatgggcttttagtggactctatcaatgtctcaattgaagaacaggtagccatgtttatgaaatttgttggccatagatggacaaatagatctgttggttttgaattcttgcgatctggagagacagttagtaggtactttaacgctgttttagatgctttatgtgtcctatcacgtgacctcattaccatgagaaccacggagacacatccaaagatatctaatagctcgggaaggtttttatccatactttga

SEQ ID NO: 101351 - DNA, 392 bp, Zea Mays
gttttattgtttcaacttgtacttagctgatatgttttgcacttgttttaggctcaaccaggtactcttttgtggatggaagggtggtgttgttggctggctgttttggtgtgaattccttaggtggttgcctgttattttgctcagtggccaggtgatgtttatggcggtggtgatgcctcattcttttgcacgtcttctaagctgatcaataaggcttaaggagatggatggtgctgctcatagctgaatgtttagcaccattatatatacatatttgtgtgtgtattgtaatagcaactacctcagactgtttcgaatctattttagacctattaatcagctgtaatgaacatgttgtggagctattatgaactgattattagcttatc

SEQ ID NO: 101352 - DNA, 612 bp, Zea Mays
atggacccgctgcaggcgtcgtcgaacacatcgaagcactcggcgaggcatgcctccgactgcctggcgcccatcttgcgtgccgccacggccaggaacgccgcgagggcgcgaggccgatgtcgccggtgcccgcggcgacgcccgcgtcctccaggaagtgccacgcctccgcctcgtccacgttctggcccagggagcgcagcgccgtcacgagctcgcccgtggcgatgcgacctgcaagcctaccggccgggagcaacaaagaagcacgcacgcacatatgagttgagtgaggctcggagtgcgcgcgcggtggataggagttcgatgggatggcgacttgccgtcgtcgtcagtgtcgaacaggtcgaagattttcttgcactcgtccacctgttccggcgtcagcttctccgccatgttgctcacccgagccaacctcagccgcttcctcttgctatggatgctctcgatgaacagtgcagagctttcttttattctgattcgatttcgtcagatcaaaagagtaaacagcaaattccgatctggcaggccactggccaccttttccttgtccttgttggtcatcagaaaacaacgagacaatga

SEQ ID NO: 101353 - DNA, 447 bp, Zea Mays
atgcaccacctctcaaaaaacctcctagcgcatctaagaatggaccctaaggaaaaaggaaggatgcagagtttaaaacagataatattatacataagatcacagtcaggacatctaaagatagtcattacaaaacattacaatgaacgccgactaagaatgggtggacggaccaccggcgagtggtcccaggctccaggggtcgatcaggaggaacttcacattgacccggcccacgatcgaccgggcgtggggatggacctgcacctcaatggcacccagctcctcgtcacttcaaccggcggcgaagccttccgcgatcacaccagagtcgatttcatcgaaatgggagaccatctgtcccagggcaaggatgctcccgtgatatgctccctcgacgaccacgtgctccacatgatcggacagcgctcgcagccgattgattag

SEQ ID NO: 101354 - DNA, 1811 bp, Zea Mays
caatgctataaatactgtgcatgatctccttcgtcttctggtcacccgacatcgcgtgaaccttatcgcgagctttctctacggcgaactcgatgccgtacagaaagcccacgtacggcccctatagcgatgagctccaggaaaacgatagccacgattactatggtttggtctcgacgatggattctggagcaagcaagtatcacacagggtttattccagtcttcactgcttatatcacaaagaggatgaaccactatttgcatggagaaaaactgaatgcaccagcaagtcaccaagtattacgtaccagcggtaggtcctcgccggcgacatgtctaagaatcagcctcctcgcgacatgtccaagaagccggccgccgccggcggcggcggcggcggcagcgaggacctcaagaagaccgacctctccggcgacgaccctgccgccggcgagatccccgagaagcagccgcctggcaacggaggcgacaaaatggaggaggccgcccaagggcaccaagaagccggaagtcgccgccggcgaggacccgaagaaccagccgcttggcgacgttcgtgaggatgctggtaaccccgaacaacaggcggccggcttcttggacatgtcgcgaagaggctgcttcttagacagtgcgttaattctccaacaccagagggtggaggaaggtgcgctccattggcaagagcgtcagtgcaagcctcggagttgccaaggtggtggaaggaggcgtggaagtgaaacaagcagagcctgtctggatgaaaggcattctgatttggtgctcgtgacaacattgctcgagttcttttgtcttagtgattgagatgctttgttcaagaaaactgagagaaatgagcagctgaatttaatcgtcggtagttctgtgcaagtcaggtggaactttgaactttaattcttctgccactatgtgatatggtgaatactcttctgcttgtaagaaaattctggagttgaaatttgttgcctgctgatgttctctggcctggagtttcagtccttgtagaattctgcctgttttcttctgcagggccagaactcagaatgatgatgatttttcgtttcttcatggttaggtgcagtagatgtgtatggtaaggcacttttgctagagctgtggtgcagtagcatttttgaagttttgtggctggtgtgctaggttataatttttgccctttatgtttgacatgctacttggggcattttgtgtgtcattttctcctgtgttacttacaagtttgtttcacattttgaaacaattttcctttgtttcactttcctgtggttagtttgacatgcatcaaattcacaagttagcttcacaaaataaaagcaagttagagtcacatgtgttatatcacctcatctttgttactgtgtctcttgtaattgattggaaggtggtttatattgtgtaattgataggtgccaaaagaaccaaccatggagcatttgctgccgccgtgctcccctccccttctccctagttcatttcatctgctataacatcagcaacgcatgacaacgtgaatgccacaaagccaacactaccagcaagaactagcacattgtgcacgtagctcttccttctgaaccttgcaagctcttccatatcacgccttcaacaaaaagagcaatgaaagatatggatgcatgttagctaatcgagttgggaaactacaaatatcatccattgctaaggagaaaagctatggcttacctcttcctttcatccaaccattgagagaaggatccagcctgctcttca

SEQ ID NO: 101355 - DNA, 756 bp, Zea Mays
atgccgtacagaaagcccacgtacggcccctatagcgatgagctccaggaaaacgatagccacgattactatggtttggtctcgacgatggattctggagcaagcaagtatcacacagggtttattccagtcttcactgcttatatcacaaagaggatgaaccactatttgcatggagaaaaactgaatgcaccagcaagtcaccaagtattacgtaccagcggtaggtcctcgccggcgacatgtctaagaatcagcctcctcgcgacatgtccaagaagccggccgccgccggcggcggcggcggcggcagcgaggacctcaagaagaccgacctctccggcgacgaccctgccgccggcgagatccccgagaagcagccgcctggcaacggaggcgacaaaatggaggaggccgcccaagggcaccaagaagccggaagtcgccgccggcgaggacccgaagaaccagccgcttggcgacgttcgtgaggatgctggtaaccccgaacaacaggcggccggcttcttggacatgtcgcgaagaggctgcttcttagacagtgcgttaattctccaacaccagagggtggaggaaggtgcgctccattggcaagagcgtcagtgcaagcctcggagttgccaaggtggtggaaggaggcgtggaagtgaaacaagcagagcctgtctggatgaaaggcattctgatttggtgctcgtgacaacattgctcgagttcttttgtcttagtgattga

SEQ ID NO: 101356 - DNA, 993 bp, Zea Mays
atggacaacggcaccatcctctccggtgaggctgctatgaaccacgccgccgtcagccccggtacggccatctcgggcttcacgcgcctcctcaaccaaaagctcaaggacgatttggtgaagagcgagatgaagctttcgccatcgtacaagttctccgagagggagggacgggccgccatccaaatccaagccgccggcggcggccaggtcatagagttgtgccccctagatctcgccgacatcctcttctccgagctgaagcacagggcggaggctcacctgggctgtgagctctcggctgctatcatcgccatgccgcatcacctcaactacaacggaaggcaggacgtcgtcaatatggcaaggtacgatgctggcttccgccgggccgccaaggccatcgaccgacagatcgcggcggccgtggcgcatcaccgccacacggagcaaggtgacgacttcacggcgcggatcatcgactacatggcggagctcatcaaggagccgcaccagtgggacatcaggcaggacgcggaggcgctgcgcaggctaagggtgtcctgcgagcacgccaagaaggcattgagcgaccaggaagagacgatggtgcagatacatgtcaccggtgtcgagtcatcggcgcccctcgcgggccaagctggaggagctcaaccaggacctgttcgacagggtcatgcgacttgtggatggggagtgggtggctgccccggccccacgacgagagccgcaaggacatggtcgatgagatcgtcctcgtcggtagcggcgcgaggatgcccaagctccatcagctcgtcgaggactacttccatggcaggcagccaaacagccgcaagggagtggaaccagaggacgccatcgttcgaggcaccgccattctttcccgtcctaaggcggcgtgctacctggaggagtgctttgactttctttacggcaaggacggacttcctctgggatgtcatgtcttga

SEQ ID NO: 101357 - DNA, 683 bp, Zea Mays
aaagaaagaaagaaagaaagaaaggaaggaaggaaggaaggaaaaagaacagagtgagaaggggctcgatcctcgagcacaaaatctgcaggcaagcaaagatggccggtgtaggagctgtagccgccgccatgttcatgttcctcctggtcgcgctctccgcaccccacacggcgtcctctctccgccctggcgccagcctcggcacgtgccgcgccagcgggtacctcccgggccgctccggcaactgcgagaagagcaacgacccggactgctgcgaggacggcaagatgtacccgcagtaccgctgctcgccgccggtcacggcgagcaccagggccgtgctgacgctcaacagcttcgagaagggcaaggacggcggcggcccctcggagtgcgacaacgcgtaccacagcgaccaggagaaggtggtggcgctctccacgggctggttcagcaacatggcgcgctgcggccaccggatcaagatcagcgccgccaacggcaactccgtgtacgccaaggtggtggacgagtgcgactccgtgcacggctgcgacgacgagcacaacttcgagccgccgtgcgacaacaacatcgtcgacgcctcgccggcggtgtgggacgccctgggactcgaccagaacgtcggcatggtggacatcacctggtccgagcagtga

SEQ ID NO: 101358 - DNA, 1592 bp, Zea Mays
gcgccaaccctcaagcatcaagccatggagacggcagccgcacctaccctggcgccgcacgtgctggttgtccccttccccgcgcagggccacgcgctgccgctcctcgatttcgccggcctgctcgccgcgcggggcctccgcctcaccgtcgtcacctcgcccgccaacctcccgctgctctcgccattcctcgcggcgcaccccggtgccgtcacaccgctgaccctcccgttcccctccagctcgtctatccccccgggtgtcgagagcaccaggggctgccccccggagtacttccccgtcttcatccacgcactcaccgcgctccgcgagccggtccgcgcgtgggccaggtcacgctcgccgtctgacgacggccccatcgtcgccgtcgtcgccgacttcttctgcgggtgggcgcagccgctcgcccgcgacctcggcgccgcgggcatagtgttctcgccgtccggcgtccttggcgccgccgtccctcactcgctcttccggcgcctggtgaggcggcctgctgctgccgaggagtccagcgtggtcacgttcccggcgatccccggagaaccggtgtaccagtggagggaggtctccatgctttacaggtggttcgtggaaggcggggaagaagacgagcaggcccgcgagccggtgaggcgtaacttcctgtggaacgtggaggagagctgggggttcgtgttcaacacgctccgggcgctggaggggaggtacctggagcagccgctcgaggacctcggcttcaggcgcatgtgggcggtgggccccgtggcgcctgacgcggacgccgccggcgcgcgcggcggggagaccgccgtcgcggccgccagcctcggcgcgtggctggacccgttcccggaaggctcggtcgtgtacgtgtcgttcgggagccaggcggtgctgaccccgggcgtggcggcggcgctggccgaggcgcttgagcgcagcgccgtgccgttcgtctgggtcgtgggcgccgggagcagcggcgtggtccccaaagggttcgaggtgcgcgcggcgtcggcgggccgcggggtggtggtgcgcgggtgggcgccgcagctggcgacgctgcggcacccggcggtggggtggttcatgacgcactgcggctggaactcggtgctggagtccgccgcagcgggggtggccatgctaacatggccgatgacggcggaccagttcgtgaacgcgcgcttgctcgtggacgaggcgcgcgtggcggtgcccgcgtgcgcgggcgggttcggcgtcgcgccggacccgggcgagctggcgaccgtgctggccgacgtggtaggggagaaggggcgcgacgtgagggcccgcgccaaggagctcgcggcggaggccgcgcgggcggtgatggaaggcggcagctcctacgctgatttggacggattagtgcaggagattcggaatcttcgttgagttcgagcggatcgtcgggacaaaattctgtgccgggcaccctgtcagctgtgcagttaatgaattggtccccgtcctggtcgagaataatcacacaacaaaaaagtttggtttatttttaaagc

SEQ ID NO: 101359 - DNA, 895 bp, Zea Mays
accagaaacccataagttcttttttattaagaggagagcaagtgtgcatcaattgttaaatcaaatctcctgataagtgtaaaacttcatagcaacatacgtatatatacctataagatgcaaaatggaatataaactattgtgttctcaaagcacctcgtatttcagagtaaatctccctgcttgcccccaccgcagtccacagaactcacgttttctttgcaaatcaaatgcaatcgccagccagatgtcgattgcggcagtcaggtcatcgtccctggccctgtcagcgaggtcgtgctgtagcctcaggaggagcgctaattccagccccttcaagcctgtcacgtcccaactcagtaaggcgtctacatccgcttccttgggcgggcaccgcacggcctcgtcgtctttgtcatcgccatccttcgctggcgcgaaggggtcgtcagccgcaaagaaggcaaccaaggagttgcggttctggcagagctggaggcccacccgtctccattgtcgccatcctccgctggcgcgactccccagcagcacgggagcccagaaggtggagtccaccgagctttggatcttgctggcctgcgatagcgacgacgtggaccaccgcacggcggaggtgggcttggacggcttggacgcagtgttctccttcccaacgacggtggaggtggtgtggcttgggtgcggtgttctccttcacgacagcggcagaggtggcacccgcaggctgccgtggacgagcacggggctggtcctacgtcagggagccctcgtccttcctcggcgattagggcgaggcagaggaggaggtggtgatttgtgtggcgagatgagcgagggatgctcgtggagggaaggatccaatcgggggtgctga

SEQ ID NO: 101360 - DNA, 176 bp, Zea Mays
ggtttatcatttgtcaggttcacaaaacaagttcacaaaaccagattcagatttcacaaaaacaagttcacatattcacaactttagattttacaggtttacaaatagaggttcacaaaacaagttcaaaaaaatacaaacatgttcacaaacgcataacaggaggtcttcttttg

SEQ ID NO: 101361 - DNA, 1282 bp, Zea Mays
taccaagcggacccgcaggtcagaatcttctctcttgacaaggagcaagcctaatcccagaaccccacggtcgtgagaccctagctgccgtcgccgccgccgctgaccggcgacggcgatctagatgggggcgtcggcctccgtgctctcgttcccaacggccgccgcgttcccagcagccgccaccgccgtcgccggggccgccggctgcttcgcgctcggctacctcctggccttcacccgcctcccgcgccacgccgccggcccaggttcgggagggacctccgatgacgattccgaggatgactcggaagaagatgatgacgaaaactccggccgcagtcgcgcggcgaagcgggcgggagggcagaagagggccgggctccggctgctctactgggcacggaacgtggtgaccaagtccgactctgccagggaggcggaaaggtcccggtctcaggccgcggccagtcccctggagatcgagaaccttgctgagataatagaagatttcaaaatggtgttggttgtgaggaatgatctgaagatggggaaggggaagattgccgcacagtgcagtcatgcaactcttgggctattcaaaaaactccaacagagagctccaaaatcactaagaaggtgggagcggtgtgggcaagttaaagtggttgtgaaaatagaaagcgaggaagacatgctagttttacaagggagagcaaagtctttaaatctgccaactcacataaccatagacgctggaagaacacagattgctccaaattcaaggacagtcatggctattctggggccagctgatatggttgatgatgttactggcggtctgaagcttttgtagaaaaccaccttgtcagcattttcaacttgggtcttcatagagcagtgctgggactttgcaggccacagtggtctctgcacttgtactgatgtgcggcagaagaatgaaccttggccccgttggttgacctgagtttcttgtccatgaatttatttggaaggagagcttgcattcttttttcacttgtaccgaccgttatctttggagttgtgatgttagcagttcgaattctggtgttgacaacttatagaccatcatttcttctgtaacatagataagaaaatactatttgactattgtccatttccccttttttattttctttttaataattcgtgcagtagtggacacaatactgagttgctttggagaagtcatcttgattgcggcagtgcaccgggaatcataggccctgtttgtttcggc

SEQ ID NO: 101362 - DNA, 1353 bp, Zea Mays
taccaagcggacccgcaggtcagaatcttctctcttgacaaggagcaagcctaatcccagaaccccacggtcgtgagaccctagctgccgtcgccgccgccgctgaccggcgacggcgatctagatgggggcgtcggcctccgtgctctcgttcccaacggccgccgcgttcccagcagccgccaccgccgtcgccggggccgccggctgcttcgcgctcggctacctcctggccttcacccgcctcccgcgccacgccgccggcccaggttcgggagggacctccgatgacgattccgaggatgactcggaagaagatgatgacgaaaactccggccgcagtcgcgcggcgaagcgggcgggagggcagaagagggccgggctccggctgctctactgggcacggaacgtggtgaccaagtccgactctgccagggaggcggaaaggtcccggtctcaggccgcggccagtcccctggagatcgagaaccttgctgagataatagaagatttcaaaatggtgttggttgtgaggaatgatctgaagatggggaaggggaagattgccgcacagtgcagtcatgcaactcttgggctattcaaaaaactccaacagagagctccaaaatcactaagaaggtgggagcggtgtgggcaagttaaagtggttgtgaaaatagaaagcgaggaagacatgctagttttacaagggagagcaaagtctttaaatctgccaactcacataaccatagacgctggaagaacacagattgctccaagtgagttttcaaagttatggattgtaacattctctttcttattctggttttctgttgatttgaaaattttcttttctctaaacattatgtagattcaaggacagtcatggctattctggggccagctgatatggttgatgatgttactggcggtctgaagcttttgtagaaaaccaccttgtcagcattttcaacttgggtcttcatagagcagtgctgggactttgcaggccacagtggtctctgcacttgtactgatgtgcggcagaagaatgaaccttggccccgttggttgacctgagtttcttgtccatgaatttatttggaaggagagcttgcattcttttttcacttgtaccgaccgttatctttggagttgtgatgttagcagttcgaattctggtgttgacaacttatagaccatcatttcttctgtaacatagataagaaaatactatttgactattgtccatttccccttttttattttctttttaataattcgtgcagtagtggacacaatactgagttgctttggagaagtcatcttgattgcggcagtgcaccgggaatc

SEQ ID NO: 101363 - DNA, 2135 bp, Zea Mays
tgaccggtgaccgctcagtcagcttcagcagctcgagcaggatggccgttgcgctcgccacgtccccactcgcgcacaacgcccttgccccgcccccgatctccgcctcccagtcctcgctgctgctgctgctccagcgccgcgcgtccccgtctccctctccctccctctccccctccggtcacgcctcatcgcggccgtcgcgaccaaggagcctgagctcggcggcggtggatcgggggccggcgacggtgctggaggaggtggcggtggcagcggcagcgacccgaggggaggaggtcaggaaggggcggggaggcagagaaaatggggcatgaactgtccatgtcgcagaaactcagtctcgcctacgccgcgctcgtcggagctggtggtgtaatgggatatatgaagagtggaagccagaaatcctcagccctggtcctgtacttcgtccacactcaactccctgttagacctgtctttgcatcgtcgattggtttaggtatatctggccgcgcttcgtaggtgaaggggtcgcgcttcaaatagaccggcaaaaggttccctgctgatgtcgtgtcccgtggttcccgggtgttgatcggagggtactacagtatgcattttttttttctgtttcttcatgcagttttgctcgcctttggtgtctttaagggactgcttcttttttactcctctgtggatgatttgttgactgtacccacaggttagttcgtcttctgggtaataacagatagcattcgagctgattgatagccgcgggcaatcgtatgatgccacgacagaaaacatggtgcggcattccattacaagtgaacaacgatcaatcaatgtaacaaagtcaacaggcgtagcagtacggtatgcggtattgaggaatccacttcagaatacaacctagcacgcgacaacaaagcaacgacagtaaaatagaggtgttaaggtccccattattagtgcggttccacgctgctgctaccacatacagtatataataacataaataccaatataataaaaccaacagcacgtccctgtcccttcctccccacagcgtcagccagcctttcaccgttcagacttcagacttcgcggctccccaacctttcaagatactgggccttgcgccctgcttgccgtccgcagtcatctccattcccgctgactccatgccatcgaacgacttggcggggctgtacggagctttgctcacgaccctgtttcgtgccatcatttatgtaatcacttgaaatcagtagatccacgataaaaaaaaagttatactaagaaacaattctaaactcagttctaagataaggcaaaaacaggcatctaaagcttacatcagaaaaaaaaatggtgctagtttgcaaccttgagactggatctttaagtggccagcttttccaaatagaacaggataatacacaggaacatcccgattctcagatatgttattttcctaacaggggaaaaacatggtatttggagcagctaaatgggggtaatgttggtttttgtatctactgctggtcccagaactctgtcttgtgttaatatcgatttgcagattttttttttaaaaaaaaaatctcaagggagttacatgatccaaggctatttgcagctatatgttgtattatggaagcaggctctctaccaatctttctgtgaagaaattatagattttttttagggatgtcattgagcacttgtcagcagaaagtgcaatcatttaaatgctataacagcaaattttattttatttttaccctgcctggaggacaaaaaacagaatacggtacaaaatatactgttgactactgtggtgccaatagtcggggaaaaaattagtgtggtaccacatacagcagtttataactaaagttttaaacatgtagattgtagaataaggggcctaacaataagattcagaatttcagagccctgttgctatcatctatcatgctaacctgtcacgacgtttctcaaggaagcgctggagagagtgcctcctggcaatggggagatctggccaacagatcaagatagtttaaagacgtgttggacaatgtcaacactggaaaaggtattccatttctggattttta

SEQ ID NO: 101364 - DNA, 1117 bp, Zea Mays
tgaccggtgaccgctcagtcagcttcagcagctcgagcaggatggccgttgcgctcgccacgtccccactcgcgcacaacgcccttgccccgcccccgatctccgcctcccagtcctcgctgctgctgctgctccagcgccgcgcgtccccgtctccctctccctccctctccccctccggtcacgcctcatcgcggccgtcgcgaccaaggagcctgagctcggcggcggtggatcgggggccggcgacggtgctggaggaggtggcggtggcagcggcagcgacccgaggggaggaggtcaggaaggggcggggaggcagagaaaatggggcatgaactgtccatgtcgcagaaactcagtctcgcctacgccgcgctcgtcggagctggtggtgtaatgggatatatgaagagtggaagccagaaatcctcagccctggtcctgtacttcgtccacactcaactccctgttagacctgtctttgcatcgtcgattggtttaggtatatctggccgcgcttcgtaggtgaaggggtcgcgcttcaaatagaccggcaaaaggttccctgctgatgtcgtgtcccgtggttcccgggtgttgatcggagggtactacagtatgcattttttttttctgtttcttcatgcagttttgctcgcctttggtgtctttaagggactgcttcttttttactcctctgtggatgatttgttgactgtacccacaggttagttcgtcttctgggtaataacagatagcattcgagctgattgatagccgcgggcaatcgtatgatgccacgacagaaaacatggtgcggcattccattacaagtgaacaacgatcaatcaatgtaacaaagtcaacaggcgtagcagtacggtatgcggtattgaggaatccacttcagaatacaacctagcacgcgacaacaaagcaacgacagtaaaatagaggtgttaaggtccccattattagtgcggttccacgctgctgctaccacatacagtatataataacataaataccaatataataaaaccaacagcacgtccctgtcccttcctccccacagcgtcagccagcctttcaccgttcagacttcagacttcgc

SEQ ID NO: 101365 - DNA, 892 bp, Zea Mays
cttgaaggtccaaccgacggaccagagctacggccgccagacaactggggcccggagcggacgggcggtgcagcacggcgcgggtgctcccgcctacacctttccggtggtgacgccggccgggctacgcgagcacggccgtggtgggcgagaagggagcactcgagatgagctgccgtctgccgagggcagagggcatcgcaccggtggagggatcagggagacaggatcgggcagggcgatggcctgcgggcaatcagcaggctgcggcggcagggatcgagtcactgcgagcggtgttgtgcctcatggaggcggcggtgtgccggtgtcggcaggagcggagacgacggaccaacgtggttcatctttgtttgctgctttggctgatgaaattaaacattacatccctggagagcacttagcattagagctcaataattcggttcttttcttctgcaaggcaaaaatgatggaagatgttgtctgcacatgtaagtgtatgagagagcaaaatatcagacccacatctcatactttttgtcatatgttgtgtggttattcttcaatggacatgcatagggaggtcaccatgttgtggggagaaataaagcgcagacatgaatatggagagctagatttgtttagggacttgcttgatagcttggttttgaattttcttaaaggtggatattttccgagggtgatggagatcattagctacatgtcaaaacataacatttactgtgacaagtggaaatacgggtgtgccttcctgaagctacacaagaacctgtacatgaatttgaattcattgcatgacaaaacagaagctcaaagtaaaaggattgaagatgtccgagcttttaggttgtgggcaagcattaattag

SEQ ID NO: 101366 - DNA, 3334 bp, Zea Mays
cttgagagagaagcatcgaaatattaatagaagaaaattgcctcatacctgcttcgtttgccaagtcctggcggcgatcagagctcacgtcccagcatctgcgcacgccggtggctaggggccatcacagtggtatcaaagctctctgatcctcggtggggcgcctgagggtcgtgtcctctttggcggcgattccgttccagcgacctaggttctcgcggtgcaagcgtttcttctccgtcggctccaacgtcttcggttcttcatcggcgtttcccctcctccccagcttactcgtctacctcgcgtcgacatcatcccatgacgcggttgtgcttctcgacacggaactcctcctgcagtcgggatcggaacaggaccagggcggtccttgacaggaggtgtgcgaggtacaaacaaccaactcgattcattctgttcgcgatggaagagtggaggaaggaggatgcagggcgttgggatagggtgatgaaccggttggatcgtttgattcagaagtcggaagtggtggatgacgtccagcaaacaatcccgattcagtcgaggttagcagcagaggtggcaaccgaatggactgtgttggcacgtcaaatgaaggaaaccaaggctagggatatggagatgtggcctgaaaacagggttggttggatccacggtctggtgaacgaggatgtcagtatgggcttgctgcaccgggtgttggaggtatggcccctctggtgtttgatgaaatgcctcacaacagcagtgaggcggtggttgtcctgttccctgaagattcagattccttggtgttcagtgaactagtgggtctaaaagtggcatgggatgaggagatgcaatctgaaactcacatgcatgaaggtttattgaagcagcttgctcgaggtggagaagatttagaagaatcggctagcaaggatgcttatgttgaagatgaagctagtaggcctgactcaccgagtgaggcaactgcggtggttaagaatggtggaagcatggaggagcttcttcctgctagggctgacagtgtgctagaggatagcctggagaaggagcagaatgctgaagatcaggctgctgttagtaaagtggaagaggttggcacagcggctgaaaatgctgatgttattggagctggcggtattttctcccaagttttggctttggaatcaaccgctgaatttaatggtgcagggagctctgaggctgtgaagcagatcttgaaggagttggcagaatgcttctctaatggtagtatctctcgagagttcatcagtagcagggttgggcagatcatatttgatgaatctgatgctgatgaagatgaagatgatgagggggaggagaaagtatttggttcatcagacccttatttgcagcatgatttcagccctgctcggtcaaattcttttagccttttaaagctcgtagttacggcttaccctacagaagagaggaccggtgaagagctggagattggacttggacagaagatggcagttgcaatcattggcaagcttcttgcagactcggtgttgtcattagagcaaatagtttggagtagactcgatagtgtatccatctactggcctgaagtgctgttgatgattggtccatatggaggtcttgttcaatacaagtatggtgaacccacaaaacatattcctgagtgtgatggtgtgagaatcctctttaactcaagtatgagagttatacaccgagcctcagtcttgactacatcatttgttggcattggaagcaagattctagcagcatttctatacgatgttcatgatcaatgtgccaggcagaacaaagacagtgttcgatatggaataactggactgacacaatggtggctcaaggcttttagccaaggaaacagtgatatggcagttccgtcacagccaaacgatatgttgccaatagtgatcattcacagtccatatgggactgtgttctcagcctcacagtattcttcactcggttgtttctcttttaatgtgttctatgggtatgaaaccttggtgtgggcagccatagtgctcaaggggaatagagatccaaggatggttgcttggactcaacatatgactgctgccagttccatgtttaaagagccactggtcagggctcagcagctcattgagggtgtcgaggagcgcatattgttcaacaatgacacactcaagcttgccacaccattttttggtgttctcaaccatcttatttctgcaaccatgagtggtgtggtgtgctgccttcctttattgggacagcggaattctgattttcagaagcctgctgttaatctgatttccttttcgcatttccatttttttcaactcatctcacgaggtaccaagcagttctgtaatccaatagagtgtgactccacaaacatgatgtctgctgctaaccctcgccacggttgctacttcacggcgccggttatgatccatgggaaaatgagcactaagtggatgagcaaaagttgaatgtgcaaaacaagaaattcactggtgttgtccaactaatttggatcctggaagtacataattcctatgtgacagtttctgctgctcagaattttttgcaaaaactagctattcacagtcaagatgcagcacgtttctcagttcaacagggtgctatttggatacatcaccaaatctgggtgggcagcacctcagcacttagaactaagctgatttcagtcttgtatgactcagcagttggggaacatttggaaggggctcggttcacatcaatgttaagggagcagttggcaacagctcaaaacagaatgaagttgaaggctgatcgtcaccgaactgaacgccagtttcaagtgttgctcaagctccaaacgtacgcgcaacatacagtggtcactcgactgtgtccaaagcttgtgttcttttttttttggccttacaagattgtggagcatgtgggagaagttgcatacgtttggatttgcctcagtctgctcaggatgtgctgcctctgaaattttggaccgcagatcggtgaaaaagggcaattgtacagttccacaagtgctgttcaggtggagtctcattccgcaggatgcagctacctaggaggactaccatgtgcttcaccatcgctaaccacatgcccttgcttggggtcaagcaagctctgcagggggggcagatgtcacacctgatgaagcagtgacagaggtagtagaagctgaagtctgaagaggagccattgtcgtgcgatattaggtgtgtgtttctttttttgttgtaaatcgtgtgggctgtgttggacttgt

SEQ ID NO: 101367 - DNA, 1794 bp, Zea Mays
atggcccctctggtgtttgatgaaatgcctcacaacagcagtgaggcggtggttgtcctgttccctgaagattcagattccttggtgttcagtgaactagtgggtctaaaagtggcatgggatgaggagatgcaatctgaaactcacatgcatgaaggtttattgaagcagcttgctcgaggtggagaagatttagaagaatcggctagcaaggatgcttatgttgaagatgaagctagtaggcctgactcaccgagtgaggcaactgcggtggttaagaatggtggaagcatggaggagcttcttcctgctagggctgacagtgtgctagaggatagcctggagaaggagcagaatgctgaagatcaggctgctgttagtaaagtggaagaggttggcacagcggctgaaaatgctgatgttattggagctggcggtattttctcccaagttttggctttggaatcaaccgctgaatttaatggtgcagggagctctgaggctgtgaagcagatcttgaaggagttggcagaatgcttctctaatggtagtatctctcgagagttcatcagtagcagggttgggcagatcatatttgatgaatctgatgctgatgaagatgaagatgatgagggggaggagaaagtatttggttcatcagacccttatttgcagcatgatttcagccctgctcggtcaaattcttttagccttttaaagctcgtagttacggcttaccctacagaagagaggaccggtgaagagctggagattggacttggacagaagatggcagttgcaatcattggcaagcttcttgcagactcggtgttgtcattagagcaaatagtttggagtagactcgatagtgtatccatctactggcctgaagtgctgttgatgattggtccatatggaggtcttgttcaatacaagtatggtgaacccacaaaacatattcctgagtgtgatggtgtgagaatcctctttaactcaagtatgagagttatacaccgagcctcagtcttgactacatcatttgttggcattggaagcaagattctagcagcatttctatacgatgttcatgatcaatgtgccaggcagaacaaagacagtgttcgatatggaataactggactgacacaatggtggctcaaggcttttagccaaggaaacagtgatatggcagttccgtcacagccaaacgatatgttgccaatagtgatcattcacagtccatatgggactgtgttctcagcctcacagtattcttcactcggttgtttctcttttaatgtgttctatgggtatgaaaccttggtgtgggcagccatagtgctcaaggggaatagagatccaaggatggttgcttggactcaacatatgactgctgccagttccatgtttaaagagccactggtcagggctcagcagctcattgagggtgtcgaggagcgcatattgttcaacaatgacacactcaagcttgccacaccattttttggtgttctcaaccatcttatttctgcaaccatgagtggtgtggtgtgctgccttcctttattgggacagcggaattctgattttcagaagcctgctgttaatctgatttccttttcgcatttccatttttttcaactcatctcacgaggtaccaagcagttctgtaatccaatagagtgtgactccacaaacatgatgtctgctgctaaccctcgccacggttgctacttcacggcgccggttatgatccatgggaaaatgagcactaagtggatgagcaaaagttga

SEQ ID NO: 101368 - DNA, 2331 bp, Zea Mays
caaaatcgcctcacgcttccgtttcgaatccttcgtcgcctcacgctcacgctcacgctgcttgctcctcctcccccccatccctccgcccctcccatggcgtccctcttcggggctcgccgccggcgatcgccggagtacgacggcgaggacgatagatccggcggagggagggccaagcgccggcgcctgtcgccggaggaggcggcggcgtcgccggcggagccgggcgcggcgacggggactagccacggctggctctccggcttcgtctccggagcgaagagggccatttcttccgttttgctgtcctcttcgcccgaggagaccggctcgggggaggacggggaggtggaggaggaggacgacgacgtatacgaagagggcatcgacttgaatgaaaatgaagatattcatgatattcacggggaaatagttccttatagcgagtcaaaacttgctattgagcaaatggttatgaaggaaacattctcaagggatgaatgtgataggatggtagagctaataaaatcaagagttagagattctactcctgaaacccatgagtatggaaagcaagaagaaatcccaagtaggaatgcaggcattgcacatgacttcacaggaacatgccgctccttgagccgtgataggaatttcactgaatcggtcccattctctagtatgagaatgagacctggtcattcttctccaggctttccactccaagcatcacctcagctatgcactgcagcagttagggaagcaaaaaaatggttggaagagaaaaggcagggactgggcgtaaaacctgaagacaatggatcatgcacattaaatacagatatatttagttctcgtgatgactctgacaagggttctccagttgatttggcgaaatcatacatgcggtcattacctccttggcaatccccattcttaggccatcaaaagtttgacacatcaccctccaaatactctatctcgtcaacaaaggtaactacaaaggaggactacctttccagcttttggacaaaattggaggaatcacgaatagctcgcattggatcatctggagattctgctgttgcttctaaattatggaattatggttccaattccagattatttgagaatgacacttccatattctcattgggcaccgatgagaaagttggagatcctaccaaaactcataatggctctgagaaagttgcagcaacagaaccactcggtagatgctccttacttattacaccaactgaagatagaactgatggtattactgagcctgtggaccttgcaaagaataatgagaatgcaccccaagaataccaagctgcatctgaaattatccctgataaagttgcagagggtaatgatgtgtcttccacaggaattactaaggatactactggccatagtgcagatggtaaagctctcacttcagaaccgcatataggggaaacacatgtcaactcagcttcagaatccataccaaatgacgcagctcccccaacccagagcaaaatgaatgggtcgaccaagaaatcattagtcaacggtgttttggatcaaccaaatgccaactcagggctagaatcttcgggaaatgattatcctagctacactaactcgagcagtgctatgccacccgcgagtaccgagttaattgggtctgcagctgctgttatagatgttgattctgctgagaatggcccaggtacgaaaccagaacaaccggctaagggagcctcgagagcatcgaaatccaaggttgttccacgaggacagaagagggtgttgcgaagcgcaacaagaggaagagcgacgtaggggcattgctgcgctacattgttgtgtactaatatatgttgacggcccagaagggcaacatgatccctaggttaactagagctagcgccgactggtcgtttccacgtacgatgcactgcgcatcagcctgtatccatgttgtattatcgtagggcttgtaatgaccacatgccctggttagagttgatcattaggaccagtagctgcttgatttgtgtctcggtgatctagctttgggtagtttgtgcagttggaaggagacagtttgttggttgtattgtattgcagcgcacagctagcaagtgttgttgtagccatcaggtacgtgttgtgtagtgaatccaggtccagggacagagctgttcctctgtatggtggaccctgaccctttgttttgtgccatggggcctttctgtgttgtgcttacatgagctggagctgctttatttttctttttttatacgattaatacgctgctgatgagtcttttttttt

SEQ ID NO: 101369 - DNA, 1269 bp, Zea Mays
atggagcgcgcgcggctgcaggccttggagatgcagccacgtcctggagatgggcgccgtgaaccggttcctggacgacatactgcgggagaagcccgcgcggttcacgccggagaacctccgcgagttcacccgcaactacgcggagcggctcgggtccggcggattcggcgtggtgtaccgcggcgcgttcccgaacggggtgcaggtggccgtcaagatcctcaacagcacgctggaccggcgcgccgaggagcagttcatggcggaggtgggcaccgcggggcgcacctaccacatcaacctcgtccgcctctacggcttctgcttcgacgccacgaccaaggcgctggtgtacgagtacctcgagaagggctcgctggaccgcgtgctcttcgacctcgagggcgacgcgctcggcttcgacgcgctgtccggcatcgtggccggcacggcgcgcggggtgcggtacctgcacgaggagtgccagcaccggatcatccactacgacatcaagcccggcaacgtgctgctcaccgcggactacacccccaaggtggccgacttcggcctcgccaggctctgcaaccgcgacagcacccacctcacgatgaccggcgcgcggggcacgcccgggtacgcggcgccggagctgtggctgccgctgcccgtcacgcacaggtgcgacgtgtacagcttcggcatgctggtgttcgagatcctcgggaggcggcgcaacctggagctgcagcaccccgccgtgaccgtgagccaggagtggtaccccaggtgggtgtggcagaggttcgaccaggggaagttcggcgacgtcatggcagcgtcggggatccacgccaaggacggggagaaggcggagcggatgtgcaaggtggcgctctggtgcgtgcagtaccagccggaggcgaggccgtccatgagcagcgtcgtcaggatgctggaaggagaggaggagattgcgcggcccgtcaatccgttcacgtacatggcgagcgtgcacatggtttccagctccagcagcggcgacggcgacggcggtagcgctgccgcctccagctattcgtccaaagaactacggggaggcaccaggagtgccgctaataatcagggcagatgaacacatgcgttccttttctttgtcgtaatgcattgataccatcagttggttgaatagtgctgcttacttcagctatgatccacttggcttgcaattcaagatgtttgcaacatggaaatcatagaatgtcattt

SEQ ID NO: 101370 - DNA, 1963 bp, Zea Mays
cataagtcgtctttctccttgaccagccattagcgtcgatcgatgatttagcacggagaggctcaaggctgtccacacaggttagcttttcttcttcctctagttaacctcctccgttttgaagctcttgttgtcggccgggcttcgtcggcttgttgattcagccagtcactcagtcatctgctgtagcctggattgttcgatcgttcttggagctcgcagctggagcgagagagtaatctcatgcccgctcttcttctgtagattgatggaatgatcagtaacctttatccatccatccatccatccagggattttaatttgttcagagaactaaaatttgattcctggtttttgactcagcgtagactctaaacaagcttacagcccggatgcgtcgccgacatggtgaatgcagtggctacaatcagtatgatacatctctctggcaccgtgttcttaactcgcggtagtagtagtaataatgaccggctaggctaattggctgtttcatttcgatgttcctcagtatctacagtagcctcaactgcgacagtggtagtaatcgtcgccctcatcagaaggtgccgcgtcgtgaggaagaagatgaagaagaaaatcgtgaagaaagtcctggaggagattgagaaaaagaaccgcgagatgcaggccagcaacgccgtggaagatgtggcgatcgaggtcgggccagtggagacgtttctcaaccagatcctcaacgagaagccgatgcgtttcagctccgagcagctggcggcctgcacccggaactactcgtcggagctagggtccggcggctacggcgtggtctacaagggcgagctgccgaacggcctgctggtggccgcgaaagtcctcaaggtgtcgtccatgaacaggaaggtccaggaggcgttcatggcggagatcggcaccatcggccggacgtaccacgtgcacctcgtccgcctctacggcttctgcttcgacgcgagcaccaaagcgctagtgtacgagttcctggagaacggctcgctggagaagtacctttacggcggtgacgagggcagcacgacgagcacgaggctggagtgggggacgctgcacggcatcgccgtcggcacggccaaggggatcaggtacctgcacgaggagtgccagcagcggatcgtgcactacgacatcaagccggccaacatcctcctcacggccgactacaccccgaaggtggcggacttcgggctggcgcggctgggagagcgcgagaacacgcacatgtcgctgaccggcggcggccgcgggacgcctgggtacgcggcgccggagctgtggatggcgatgccggcgtcggagaagtgcgacgtgtacagcttcgggatggtgctgttcgagatcctgggacggcgccggaactacgacccctgccttgagggcgagagcaaggagtggttcccgagatgggtgtgggagaagtacgagcagggtgagatcgagcacgtcgtgtcctgctcctgcgacgggatcgtcggaggggcggacagggagaaggcggagatcatgtgcaaggtggcgctgtggtgcgtgcagttccagccgtcggcgcggccgacgatgagcagcgtggtgcggatgctggagggggagatgcccattgtcccgcccgtgaacccgttccattatctcatggaaagcggcggcggctcaactagctcgggattgtggagcggcacataccagagcagcagcagagacaccgccggcgcagagttgtcgcctgtcggatagctctgctgccaggtcaatcggcgtcgacgcgccgtgatcgaagatgttgagcggactcgtggggggtcgtgttgatgaaacagagtttgtagtcctgtagtacacattagttaatgctttaaaaaacaatgaaggccgtggtttgtaaattagcatcgtgttttggaggactatataa

SEQ ID NO: 101371 - DNA, 1691 bp, Zea Mays
gcacggagaggctcaaggctgtccacacagcctggattgttcgatcgttcttggagctcgcagctggagcgagagagtaatctcatgcccgctcttcttctgtagattgatggaatgatcagtaacctttatccatccatccatccatccagggattttaatttgttcagagaactaaaatttgattcctggtttttgactcagcgtagactctaaacaagcttacagcccggatgcgtcgccgacatggtgaatgcagtggctacaatcatatctacagtagcctcaactgcgacagtggtagtaatcgtcgccctcatcagaaggtgccgcgtcgtgaggaagaagatgaagaagaaaatcgtgaagaaagtcctggaggagattgagaaaaagaaccgcgagatgcaggccagcaacgccgtggaagatgtggcgatcgaggtcgggccagtggagacgtttctcaaccagatcctcaacgagaagccgatgcgtttcagctccgagcagctggcggcctgcacccggaactactcgtcggagctagggtccggcggctacggcgtggtctacaagggcgagctgccgaacggcctgctggtggccgcgaaagtcctcaaggtgtcgtccatgaacaggaaggtccaggaggcgttcatggcggagatcggcaccatcggccggacgtaccacgtgcacctcgtccgcctctacggcttctgcttcgacgcgagcaccaaagcgctagtgtacgagttcctggagaacggctcgctggagaagtacctttacggcggtgacgagggcagcacgacgagcacgaggctggagtgggggacgctgcacggcatcgccgtcggcacggccaaggggatcaggtacctgcacgaggagtgccagcagcggatcgtgcactacgacatcaagccggccaacatcctcctcacggccgactacaccccgaaggtggcggacttcgggctggcgcggctgggagagcgcgagaacacgcacatgtcgctgaccggcggcggccgcgggacgcctgggtacgcggcgccggagctgtggatggcgatgccggcgtcggagaagtgcgacgtgtacagcttcgggatggtgctgttcgagatcctgggacggcgccggaactacgacccctgccttgagggcgagagcaaggagtggttcccgagatgggtgtgggagaagtacgagcagggtgagatcgagcacgtcgtgtcctgctcctgcgacgggatcgtcggaggggcggacagggagaaggcggagatcatgtgcaaggtggcgctgtggtgcgtgcagttccagccgtcggcgcggccgacgatgagcagcgtggtgcggatgctggagggggagatgcccattgtcccgcccgtgaacccgttccattatctcatggaaagcggcggcggctcaactagctcgggattgtggagcggcacataccagagcagcagcagagacaccgccggcgcagagttgtcgcctgtcggatagctctgctgccaggtcaatcggcgtcgacgcgccgtgatcgaagatgttgagcggactcgtggggggtcgtgttgatgaaacagagtttgtagtcctgtagtacacattagttaatgctttaaaaaacaatgaaggccgtggtttgtaaattagcatcgtgtttt

SEQ ID NO: 101372 - DNA, 1686 bp, Zea Mays
cataagtcgtctttctccttgaccagccattagcgtcgatcgatgatttagcacggagaggctcaaggctgtccacacaggttagcttttcttcttcctctagttaacctcctccgttttgaagctcttgttgtcggccgggcttcgtcggcttgttgattcagccagtcactcagtcatctgctgtagcctggattgttcgatcgttcttggagctcgcagctggagcgagagagtaatctcatgcccgctcttcttctgtagattgatggaatgatcagtaacctttatccatccatccatccatccagggattttaatttgttcagagaactaaaatttgattcctggtttttgactcagcgtagactctaaacaagcttacagcccggatgcgtcgccgacatggtgaatgcagtggctacaatcatatctacagtagcctcaactgcgacagtggtagtaatcgtcgccctcatcagaaggtgccgcgtcgtgaggaagaagatgaagaagaaaatcgtgaagaaagtcctggaggagattgagaaaaagaaccgcgagatgcaggccagcaacgccgtggaagatgtggcgatcgaggtcgggccagtggagacgtttctcaaccagatcctcaacgagaagccgatgcgtttcagctccgagcagctggcggcctgcacccggaactactcgtcggagctagggtccggcggctacggcgtggtctacaagggcgagctgccgaacggcctgctggtggccgcgaaagtcctcaaggtgtcgtccatgaacaggaaggtccaggaggcgttcatggcggagatcggcaccatcggccggacgtaccacgtgcacctcgtccgcctctacggcttctgcttcgacgcgagcaccaaagcgctagtgtacgagttcctggagaacggctcgctggagaagtacctttacggcggtgacgagggcagcacgacgagcacgaggctggagtgggggacgctgcacggcatcgccgtcggcacggccaaggggatcaggtacctgcacgaggagtgccagcagcggatcgtgcactacgacatcaagccggccaacatcctcctcacggccgactacaccccgaaggtggcggacttcgggctggcgcggctgggagagcgcgagaacacgcacatgtcgctgaccggcggcggccgcgggacgcctgggtacgcggcgccggagctgtggatggcgatgccggcgtcggagaagtgcgacgtgtacagcttcgggatggtgctgttcgagatcctgggacggcgccggaactacgacccctgccttgagggcgagagcaaggagtggttcccgagatgggtgtgggagaagtacgagcagggtgagatcgagcacgtcgtgtcctgctcctgcgacgggatcgtcggaggggcggacagggagaaggcggagatcatgtgcaaggtggcgctgtggtgcgtgcagttccagccgtcggcgcggccgacgatgagcagcgtggtgcggatgctggagggggagatgcccattgtcccgcccgtgaacccgttccattatctcatggaaagcggcggcggctcaactagctcgggattgtggagcggcacataccagagcagcagcagagacaccgccggcgcagagttgtcgcctgtcggatag

SEQ ID NO: 101373 - DNA, 366 bp, Zea Mays
ataccagccctggcctccttagggtcagcaagcatgccaaccatggcggcgtcgatggcgtcctggttctcggtcctcgacgccctcgcggccagcagcagcacgtggtccttgtcgacgcccttgcagaacacctcgacgaggttcttgtcgacgctgagcttgttgagggtgagcgtgccggtcttgtcgctgcagagcacgtccatcccggccatctcctcgatggcggtcatcctcttggtgatggcgccctgctgcgacagcttgtgcgagccgatggccatggtgaccgagagcacggtgggcatggcgatcgggatgccgccgatcaggagcaccagcaggttctcgatcccgctgcgg

SEQ ID NO: 101374 - DNA, 1443 bp, Zea Mays
acgcgcacttccaccggtgggcgcgcaacgcagcgcagggagcgtgggcacggaggggatcgtttcgtattggcatcactgttgcgacggcatggtaccagtagacaagacacaagctacacattctgctgccagcatcaatcaagtcagaagagagcaataatgctttcggttgcattatttcttcgcctcgcgagaccaccggctagttaggcgagtaaaaccattacaacacgcgcacacacttgacaataacaagagggaaaaaaaagaagaagaagctccctagctaagctagaaagacgggtatatatctggtggcaatggtcacctcacctagggctgctctgcatgctcggggtcaggatcagccacacgtacgtacgtacacgcttctattgtctccaatcacatcaccggaaaattttcttctttttttctgtaacaatcacatgactccgtcgtcgcaagaacaacaagggtggcatggcaaaggtgttttcgtcgacatcacagcacacatctcacaccgtgtagttctgctggatggtgtcgatgtccaggcccttgagcttgaccaccgactccacgtggcccttgagggtgttgagctcccgcagcctcgcgatctcggcgcgcctcttggcctgctccgcgatctcggacagctcgcggtagctgttcttgtcgtggaacagcgtgctggtggcggcctccggcggctggagcccgtgcagcgtcctctgcgcggtggcccactgcgcctccctctcctcccgcccgtagtccttcttggtggtgaaggcggtctgcacacgcacgaggttgtcccatgccctgccgctgagcacgaaacggatgaagaacttgatcaggtccagagggaagtagaacacgatgctgtagagccagaccacaccggcccagccccagccgatacccttgatcctggcgaagccccagttggcgtagacagcgaggaaggtcgcgacctgcacccgaaaagagcaggcacggattaggcatgcttccacgaattgaactaccaccaccattcgtcagctcacagtcatgcagtccggtatacttacaagctgggcgagcaggaacgcggtgaccaggagcaggccagggcgctccacgaaggaccagctccgggaccgggtgacgaagatcagagcctggctcacgatactcacttggaggtacagcgcggacatcatctcatgctcactgtccctgatcgacctcacaccgaatttgtcctgcgcgatgacacggctaaagaagtcggtcttgtgcatagcccagaagaaaatgacagtcatcagagcgaggtagcttccaagcacgatgcccgtggcaaagatctccttcagcttccagctgtccggcaacggagacggcttaactctgtccttagagatggtcatgatagtgcct

SEQ ID NO: 101375 - DNA, 102 bp, Zea Mays
gtgagactatctccagtagacttcttatcacgctccttatttcacttcctatttcaaactacactctgcaaacattacaatatacagtgcaaaacacagtac

SEQ ID NO: 101376 - DNA, 1522 bp, Zea Mays
agcacagcactagtgtgcctgtccttgccgccgtcctcccctccgtcccctacgactccatttccgtgtgctcgtgtgtgtcctcccctcccagctagtgcacagatcgaccgacccaccgaccgaccgatcgatccatcgaacataagccaggtagcagcaagccggggcggagaagatgatgaacctatcggctgccgctgccgccgccgccaacgcctgcgatgagttcccctacgcgccgcccaacgcggccgctcccccttctctgttcccaatcatggagcaggagagcagcatccacagggagcatcagcagcagcagctgggcctgggctacaaccccgagcccaactccctggcactgctgcccccgtccgacgccgcccaccacaccactatcgccgccggcccccacgacatcctccagttctaccctgcttccgcctcgcactacctcgccgcctccaacccctacggccacttcgccgggagctcctccttccaccagtcgtcgtcgtcgtcgtcgtcgtactactaccctccgccgccgcaggccgcgcccgagtactacttccccaccctcgtcagctccgccgaggagaacatggccagcttcgccgccacgcagctcggcctcaacctcggctaccgcacctacttcccgccgagaggcgggtacacgtacggccaccacccgccgcgctgccaggccgagggctgcaaggccgacctctccggcgccaagcgctaccaccgccgccacaaggtgtgcgaccaccactccaaggcgccggtcgtcgtcaccgccggaggcatgcaccagaggttctgccagcagtgcagcagattccatctgctggatgagttcgacgatgccaagaagagctgtaggaaacggctagcggaccacaaccggcgccgacgcaagtcaaagccatcggatgctgatgccggagacaagaaaagagcacatgcgaacaaagcagctcctgctaaagacaaagcaggaagtagcagcaagcacatgcacattgcagggttgggtacacagatcctggggagcacactcttgtccaaagaacaagatcaagccatggatcttggagaagtggtgaaagaagcagtggatcccaaggggaaggcatcaatgctacagcatcacggcattcatcagcaacaacatcacggaatccatcagcaacatcacggcttccccttccattcatcgtcagcaggctctagtgacaccacatcaaatatagctcaagtgcaagagccaagcttagggttccaccatcagcaccatcaacacagcaacgtcttgcagctcggtcaggctatgtttgatctcgacttcgatcactagtcaatatgtgatgcactctctctctctctctctctcacccacccctccctccctctttctttgtttgtgcgcataatccgaatgtttttccctttttaaattatctgtgtccattgctgtaatgtggacatagtaatgatagtgtatgctttg

SEQ ID NO: 101377 - DNA, 777 bp, Zea Mays
cttgcgcgccaggccatgcagtcgccgtcgccgccgacgaaggtgggaccaccgccgctgccaccgccgccgctgccggccgtggacgcggccgtcatcatgggcgtgctcacggccgtgctgctggcgctcttcctcttcctcatctacgccaagcactgcaagcagcgcggccccggcgagcggcccggcggcctgggcctcggcttcgcgccctcctcgtgcgaccgctgccgctcggggctcagcagctccgcggtgggcgcgcttccggcggtccggttcggcgacggtgacgtcgacgtgggccgcgccaccgagtgcgcggtgtgcctgggcgccttcgacgccgccgagctgctccgcgtcctgcccgcctgccgccacgccttccacgccgagtgcatcgacacctggctgctggcgcactccacgtgccccgtctgccgccgccgcgtcaccgggggccacgtggacgactccgagccggaggactcggcggcgacgcggcagcacggccggcgctcggcggacgacgcggaggtacaagtggttgtgcaccgcgcgtgggaccagcggtagtccaccgaaggcttggtgggccgggccgcgtacctcgaggccgccaggcatcggagggacgacctcggcgtcctggtggtcaccgccgacgggtcctgctaggtagctggctgcgctcgtctgctgctccgagatcgatggagcttctgaatcctaggtagctcacgctcgttcacctatcggtcccgtgcatgt

SEQ ID NO: 101378 - DNA, 1962 bp, Zea Mays
catttcaaacacagaacgaacgaacgaatccctctccacggatcaaaaaccgaatccaacgctgcctagggtttggtccgcctttcacttacccaccccgcgacgcccacccatggccgccgccgccgccgccgccgccgccgccgatgtgcccgccgaggccgccgccatcgcgcggcgcctggcctcctgcaacaccggcacccgggagcgcgctgtccgctacctcctctccgacttcctgccggcctccgcgcggcgcctttccgccaccgacctcatcaagctctggaagggcctcttcttctgcttctggcatgccgacaagccgctctaccagagctccgtcgccacgcgccttgcctccgccgtctccgccccgccgtcccccaccgacggcgccgccttccttgccgcctacctcaccacgctccgccgcgagtgggcacacatcgacgtccaccgcctcgacaagttctacctcctcaaccgccggttcctccaccacgccttcctgctcctcagcgccaactccttcgcccccgtcgtcacctcccaggtcgtgtccgtcctgtcggataaggccctgctcccggaagccgacagcgccgccgccggcacctcccggggcctcgggtaccacgtcgccgaggcattcctagacgagctcttgcctgtgctccccgttaccctggagacggtggacgccctgctggctccgttcttcatcgtgttggcgaagtcgaccgatcgggtgatggtgagtaaggtgaagacatgcgtgtttgagaggttactggagagtggcagtcgtttgcttgagatggtgaagaaaggggaggaggtggacaagggtagcgctgaggagaagctcgggaaatttgggttactgtttggatttagcaagaggttcctggatattggtgcgaatgcagcgacggtgcaatggaaccggaaggtgctctttgggttgagggatgcatttgtgaagattgagaaggctttgcagctatctggtctcgagatccctgtgccacagtttgaggctgctgagctgtccgtgcaaccaaatgcgggcgatgaaaaggcacaaaagaagaaaaagacgaagaatgttgcattggctgaaggtgagatgggggatgccaaggatttgaagcgtgagaagaaggtaaagaaagacaagaaggtgaagaaagagaagaagaaaaagaggaaggtggaggttgttgatgaagggaacaccaccgataagagtactgatgctcctgtagatgatcagcagatcggtgatggtgctgatggcattacatttgatgagacattaaagtccaatcttcagaagcagtttgagatggctgcagcagaagctggtatggtcaaagggggcagcagctcaagcgcttcaccagtgacaccagtcagtgggaaagtggcaacaaagaggaagcgctcaaagtctgccgataagctgtctgaagcttctgatgggggtgatggcagcgaaggtaatcttcttgcccaggatggagagaagagtggtaagaaggtgaggttctcgatgaagaataatttagtttggaaacctcacaatcctttgccaccgcagtgtttgaggctgccaccttcggctactccaaggggaagtgctctaaaaaagggcgtaaagccaggtcccataacaccgacaccattgaggaaggcgaagcctaaggcaaaatctgcaaagaaggtcttgaagaagcaaccttcatctgctgtgaagcgcttgcggaagttgcagagtttttcagcatgagcttttgtatcttttttgttctgggcttatcattacttagttcttatcctttttgtaggttagttttatactaagttgacttctctgccagttcataatttgatggattgcttaatgatttgtgttgtcaccttgcttttatgataatcatgtggtgattgcaa

SEQ ID NO: 101379 - DNA, 1158 bp, Zea Mays
cgagaacctcagctaccccctgcagctccgagcttttactttgactccactctaccgctcctccagcctcctgttgtcttgtgttgtgttgtctcccactgcaacaatccgcccggctagctacctcctcctccgcctgctagtgtgctctacctagctcgatcagcttgccggccgcccggcgccccgcgtccccatccatcgatcgcccgccaccagccgccgccgccgccgctgctgctgtgcgctgcgcctggcggcgcgtcggcgcctgcccgcagcatgagaagcaggcggtggtcccgcgccgcggtgctcgcgtggctagtgctggtcgcggccgccgcgtgcgtcgccgacgagtcgcgcgcggtgcccgccgccaggaaccggaccgggaccgggaccgcggccgtcagtgtcaggcagcagcagcagcagcggggcgcgttcgacgtcgtggtcgccggcctcgtcagcatcgggctcggccgccggtggcgcgccggcggcatggtggacgaggacaagcgccgcgtgcccacggggcccaacccgctgcacaaccgatgagctagcgggctagcgccgccaccgcgcgcgccgcgcgtgccttgccttgccttgcctgcctaggcgcgcgcggcctagctagctatacctacccttatcgatcgacgatcgagctgcatgcggcggccatcgccgctgcgcgtgcgacgcccggcgggctcgccggtggtctggtctctctcgctcgcgcgcgcgcccgcggcgcatggcgaggcggaggagaagaacgagaaggagaagtgaggagcgtgttagtattttttttaccactattcccttctgcttcgctttcttctcttttcccccctgctagtatttgttttttctctctctctttctctctctcgtctctgcttgtagctctctctctcttttttaccccgcttgtattgattggcttgccaagcgagcagcgagcagctgttctgttgattgaaagagatagatatatgagagtatagtgcttcttgtttgaatttgcctgtattcgtatacacgttactgccgattctgcatcttgttgtttccgtatgactatgccgatgtagaattaaagtgtttatttccatctgatctactactgca

SEQ ID NO: 101380 - DNA, 2646 bp, Zea Mays
caacgacagcgagccctatcccctcagcaaaagccagatgcctgttgccgtcgcggccactggatgccaagtactttttatatacgccgtccgcgcccacgacccccgagacccgcctcccctcgtcgtctcgtctcgcctcgcgtcgtctgcgctcgcggctcgtcacaggtctcggcgggagaggggcggcggccggtccgtgtccgtgtccgtcgacggttggttcgggaatggcgcaggcggtggtgccggcgatgcagtgccgggtcggagtgaaggcggcggcggggagggtgtggagcgccggcaggactaggaccggccgcggcggcgcctcgccggggttcaaggtcatggccgtcagcacgggcagcaccggggtggtgccgcgcctcgagcagctgctcaacatggacaccacgccctacaccgacaaggtcatcgccgagtacatctgggtcggaggatctggaatcgacatccgaagcaaatcaaggacgatttcgaaacccgtggaggatccctcggaactaccaaaatggaactacgatggatctagcacaggacaagccccgggagaagacagtgaagtcattctatacccccaggctatcttcaaggacccattccgaggtggcaacaacgttttggttatctgtgacacctacacgccacagggggaaccccttccaactaacaaacgccacagggctgcgcaaattttcagtgacccaaaggtcgctgaacaagtgccatggtttggcatagagcaagagtacactttgctccagaaagatgtaaattggcctcttggttggcctgttggaggcttccctggtccccagggtccatactactgtgccgtaggagccgacaaatcatttggccgtgacatatcagatgctcactacaaggcatgcctctacgctggaatcaacattagtggaacaaacggggaggtcatgcctggtcagtgggagtaccaagttggacctagtgttggtattgaagcaggagatcacatatggatttcgagatacattctcgagagaatcacagagcaagctggggttgtccttacccttgatccaaaaccaattcagggtgactggaacggagctggctgccacacaaattacagcacaaagaccatgcgcgaagacggcgggtttgaagagatcaagagagcaatcctgaacctttctctgcgccatgatctgcatattagtgcatacggagaaggaaatgaaagaagactgactgggaaacatgagactgcgagcatcggaacgttctcatggggtgtggcaaaccgcggctgctctatccgtgtggggcgggataccgaggcaaaagggaaaggttacctggaagaccgtcggccggcatcaaacatggacccgtacattgtgacggggctactggccgagaccacgatcctctggcagccatccctcgaggcggaggctcttgccgccaagaagctggcgctgaaggtgtgaagcagctgaaggatggttcaggcaccaatataaaccggtccgcgacaagattgatctttgtgtccatggcgtgggtcttgcgactctctgctcggcggtgccactctgtacaaaatcacggctgtctttgattcatcggatattcggatacgtttgtttgttactttttgcttggacacccaccatgtttggaacttttttgggctccgtttgggggctgaacgatggtcagtggaaattttaaaaattcgtcgtctcactggttcttgagttgtgaaattcaggctggcagatggcaccagccaccgacatagctacctcccctttttttttctaacggtgcctttcatggccatcttaacgacgattttgacgcgccagcggctgccattttgtgtgtgtggtgtgcgtgtgggtggatcagcttgcaactcgtactcttagtactatcaatctatcagcgagaagcaatcatgcagggcagaggcggagagcaagagcaacagaagcaaggcctagcttatttacagagacggccggcagcgctgcttgtacaatccaacggtacaaactacacagcaagtcgacaacacaaggacaaggctggcatagactgacgaacacaaccaggaaaggagaaaaaaaaacgtcctacggtctggggtgcctgtgcttcggcttcgtcgtcggcggagagccagcatgcatggccacgccgctgtagtccgcgctgtagatcagcccagcctcggcgtccgcgccctgacccgctgtccaccgcagctttgccttctcctcctcctcctcctcgggctgcttcacctccatagccaccgcttcctcaggttgctgcgtctgcttgctctggtgctggtaataacggtatgctgatgatgacgacagctggccaagttctcggcctttgcgaccaagaaggaccagctctgctggatgcttgccgagggaagacgacggaggagaagatgaagaggcggcacctgcgccagctgcaaaagtggctagaagaagaagaaggcctgaaacaagtgctgcacaggatggcttcatcgtgcgtgctgtgctgccgtcttggggccttgggctattgccaacgaggaagagcagaggctgcagagcgagc

SEQ ID NO: 101381 - DNA, 2651 bp, Zea Mays
caacgacagcgagccctatcccctcagcaaaagccagatgcctgttgccgtcgcggccactggatgccaagtactttttatatacgccgtccgcgcccacgacccccgagacccgcctcccctcgtcgtctcgtctcgcctcgcgtcgtctgcgctcgcggctcgtcacaggtgaggtctcggcgggagaggggcggcggccggtccgtgtccgtgtccgtcgacggttggttcgggaatggcgcaggcggtggtgccggcgatgcagtgccgggtcggagtgaaggcggcggcggggagggtgtggagcgccggcaggactaggaccggccgcggcggcgcctcgccggggttcaaggtcatggccgtcagcacgggcagcaccggggtggtgccgcgcctcgagcagctgctcaacatggacaccacgccctacaccgacaaggtcatcgccgagtacatctgggtcggaggatctggaatcgacatccgaagcaaatcaaggacgatttcgaaacccgtggaggatccctcggaactaccaaaatggaactacgatggatctagcacaggacaagccccgggagaagacagtgaagtcattctatacccccaggctatcttcaaggacccattccgaggtggcaacaacgttttggttatctgtgacacctacacgccacagggggaaccccttccaactaacaaacgccacagggctgcgcaaattttcagtgacccaaaggtcgctgaacaagtgccatggtttggcatagagcaagagtacactttgctccagaaagatgtaaattggcctcttggttggcctgttggaggcttccctggtccccagggtccatactactgtgccgtaggagccgacaaatcatttggccgtgacatatcagatgctcactacaaggcatgcctctacgctggaatcaacattagtggaacaaacggggaggtcatgcctggtcagtgggagtaccaagttggacctagtgttggtattgaagcaggagatcacatatggatttcgagatacattctcgagagaatcacagagcaagctggggttgtccttacccttgatccaaaaccaattcagggtgactggaacggagctggctgccacacaaattacagcacaaagaccatgcgcgaagacggcgggtttgaagagatcaagagagcaatcctgaacctttctctgcgccatgatctgcatattagtgcatacggagaaggaaatgaaagaagactgactgggaaacatgagactgcgagcatcggaacgttctcatggggtgtggcaaaccgcggctgctctatccgtgtggggcgggataccgaggcaaaagggaaaggttacctggaagaccgtcggccggcatcaaacatggacccgtacattgtgacggggctactggccgagaccacgatcctctggcagccatccctcgaggcggaggctcttgccgccaagaagctggcgctgaaggtgtgaagcagctgaaggatggttcaggcaccaatataaaccggtccgcgacaagattgatctttgtgtccatggcgtgggtcttgcgactctctgctcggcggtgccactctgtacaaaatcacggctgtctttgattcatcggatattcggatacgtttgtttgttactttttgcttggacacccaccatgtttggaacttttttgggctccgtttgggggctgaacgatggtcagtggaaattttaaaaattcgtcgtctcactggttcttgagttgtgaaattcaggctggcagatggcaccagccaccgacatagctacctcccctttttttttctaacggtgcctttcatggccatcttaacgacgattttgacgcgccagcggctgccattttgtgtgtgtggtgtgcgtgtgggtggatcagcttgcaactcgtactcttagtactatcaatctatcagcgagaagcaatcatgcagggcagaggcggagagcaagagcaacagaagcaaggcctagcttatttacagagacggccggcagcgctgcttgtacaatccaacggtacaaactacacagcaagtcgacaacacaaggacaaggctggcatagactgacgaacacaaccaggaaaggagaaaaaaaaacgtcctacggtctggggtgcctgtgcttcggcttcgtcgtcggcggagagccagcatgcatggccacgccgctgtagtccgcgctgtagatcagcccagcctcggcgtccgcgccctgacccgctgtccaccgcagctttgccttctcctcctcctcctcctcgggctgcttcacctccatagccaccgcttcctcaggttgctgcgtctgcttgctctggtgctggtaataacggtatgctgatgatgacgacagctggccaagttctcggcctttgcgaccaagaaggaccagctctgctggatgcttgccgagggaagacgacggaggagaagatgaagaggcggcacctgcgccagctgcaaaagtggctagaagaagaagaaggcctgaaacaagtgctgcacaggatggcttcatcgtgcgtgctgtgctgccgtcttggggccttgggctattgccaacgaggaagagcagaggctgcagagcgagc

SEQ ID NO: 101382 - DNA, 2941 bp, Zea Mays
caacgacagcgagccctatcccctcagcaaaagccagatgcctgttgccgtcgcggccactggatgccaagtactttttatatacgccgtccgcgcccacgacccccgagacccgcctcccctcgtcgtctcgtctcgcctcgcgtcgtctgcgctcgcggctcgtcacaggtgaggtctcggcgggagaggggcggcggccggtccgtgtccgtgtccgtcgacggttggttcgggaatggcgcaggcggtggtgccggcgatgcagtgccgggtcggagtgaaggcggcggcggggagggtgtggagcgccggcaggactaggaccggccgcggcggcgcctcgccggggttcaaggtcatggccgtcagcacgggcagcaccggggtggtgccgcgcctcgagcagctgctcaacatggacaccacgccctacaccgacaaggtcatcgccgagtacatctgggtcggaggatctggaatcgacatccgaagcaaatcaaggacgatttcgaaacccgtggaggatccctcggaactaccaaaatggaactacgatggatctagcacaggacaagccccgggagaagacagtgaagtcattctatacccccaggctatcttcaaggacccattccgaggtggcaacaacgttttggttatctgtgacacctacacgccacagggggaaccccttccaactaacaaacgccacagggctgcgcaaattttcagtgacccaaaggtcgctgaacaagtgccatggtttggcatagagcaagagtacactttgctccagaaagatgtaaattggcctcttggttggcctgttggaggcttccctggtccccagggtccatactactgtgccgtaggagccgacaaatcatttggccgtgacatatcagatgctcactacaaggcatgcctctacgctggaatcaacattagtggaacaaacggggaggtcatgcctggtcagtgggagtaccaagttggacctagtgttggtattgaagcaggagatcacatatggatttcgagatacattctcgagagaatcacagagcaagctggggttgtccttacccttgatccaaaaccaattcagggtgactggaacggagctggctgccacacaaattacagcacaaagaccatgcgcgaagacggcgggtttgaagagatcaagagagcaatcctgaacctttctctgcgccatgatctgcatattagtgcatacggagaaggaaatgaaagaagactgactgggaaacatgagactgcgagcatcggaacgttctcatggggtgtggcaaaccgcggctgctctatccgtgtggggcgggataccgaggcaaaagggaaagggcgtcagtaattttctactttgcatcctgtgagatgattcttgacgtaactctctactgttaaagcaagtgctggactgccgcaaaattctagggaaaaagtcgaacctatttttgtgccagtttcatattttgtaatccattttttaagtatccgtggcctgtgaccacgacaaacactagaatgcaggggacgtttgtagtgaaagaagagcattcttcaacacatcctttctttcagatatttaaattttgacgtggccctttctcacccttgtcttctctgacaggttacctggaagaccgtcggccggcatcaaacatggacccgtacattgtgacggggctactggccgagaccacgatcctctggcagccatccctcgaggcggaggctcttgccgccaagaagctggcgctgaaggtgtgaagcagctgaaggatggttcaggcaccaatataaaccggtccgcgacaagattgatctttgtgtccatggcgtgggtcttgcgactctctgctcggcggtgccactctgtacaaaatcacggctgtctttgattcatcggatattcggatacgtttgtttgttactttttgcttggacacccaccatgtttggaacttttttgggctccgtttgggggctgaacgatggtcagtggaaattttaaaaattcgtcgtctcactggttcttgagttgtgaaattcaggctggcagatggcaccagccaccgacatagctacctcccctttttttttctaacggtgcctttcatggccatcttaacgacgattttgacgcgccagcggctgccattttgtgtgtgtggtgtgcgtgtgggtggatcagcttgcaactcgtactcttagtactatcaatctatcagcgagaagcaatcatgcagggcagaggcggagagcaagagcaacagaagcaaggcctagcttatttacagagacggccggcagcgctgcttgtacaatccaacggtacaaactacacagcaagtcgacaacacaaggacaaggctggcatagactgacgaacacaaccaggaaaggagaaaaaaaaacgtcctacggtctggggtgcctgtgcttcggcttcgtcgtcggcggagagccagcatgcatggccacgccgctgtagtccgcgctgtagatcagcccagcctcggcgtccgcgccctgacccgctgtccaccgcagctttgccttctcctcctcctcctcctcgggctgcttcacctccatagccaccgcttcctcaggttgctgcgtctgcttgctctggtgctggtaataacggtatgctgatgatgacgacagctggccaagttctcggcctttgcgaccaagaaggaccagctctgctggatgcttgccgagggaagacgacggaggagaagatgaagaggcggcacctgcgccagctgcaaaagtggctagaagaagaagaaggcctgaaacaagtgctgcacaggatggcttcatcgtgcgtgctgtgctgccgtcttggggccttgggctattgccaacgaggaagagcagaggctgcagagcgagc

SEQ ID NO: 101383 - DNA, 2750 bp, Zea Mays
gactactgcgccaagctgagcgctgcgggtgaggggtcgcgcgcgccgccggctaccagggccggccggccgccccaccctgctatagctgtggatcagtggatgcgcgtccgcccctgtgtgtgtgtacccgccgaacgccatggataggagcgggaagatgagaaagaggaagaagcgcggtgacgaaagggccgccgccggtgcgccctcgccctcctccgcctctttcgacctccactttttccccgtcctccttgccgccgcccgaaccacacgccaatctagcagctcctgctccccggccgcgctcgctgcccgcctcctgcggcgtgtgctctcccactcgccgcagacgctctcccctctcccggcctccctcgtcgcgctcctccccctcctcctctcctccagctgctcttctgtcgccgcgctaagctgcgaggtgcttggcgcggcagcgctgcggtccattgaggctggcgagacgcttgcgtcccacagtggcatcgctagcggcctggcaaggacgctgggaagtagaaaccagcgagtcattgaggctgcttgtaattctatattggatctctcggcgtcttcagtcggtagggagcgacttgcaggctcacctgttctgccgaggacattgtggaatctgtttatggatttgcccatagccgaagcaccgagtgcccagaaagatctacagaagcaaataaaatcatgtgtttaatcattgacacattggttctcttggtgaattcttgtaagattggcaatttgcagaatgtacagcaggagctggcaaggaatgttctgtctttgttgtacaaaatctggaagaaaactcaacccttaagatcatcgactgattgcaacaagtggaagaataaacttcagagtaaagaatatgatatatccaaatctattttcaggctttcaactggtcttgcctttccagcctggccagagcctgatgtggtcaggaaaagtgtttttggcgaaacagtgtccgactttgaaacttttgtcctagcctactgggaaaagttgcccaatttgtacaggaggaaacaagccactaaaatggatagtcttgtgttcgtcgcactgcataatgcttttaatcttgggacaacacctgattctatcattgaatcattattacagggtcttgtttcttgccccgctatcgcttctgatgagcttgacataaattcatttctccatgaggttcatgattcactgggtgattctgtaaagtacaggcaagacattagagtcatgagaacacgagatccaaatgaccaaacctcaaggggatgtgtgacagaggagcattttttcgatgatggaacggtcttcacggatgaagatgcattcatcgaaaaatgtaagcacgccttcaagaacggttattcgatcgccttgcgtggcatggagtttcggtctgagaaggttgctgctatagcttctgcactggctgatctatttgggcagccttctgtaggagccaacatatacttctcgcccgcaggatctcaaggcctggcccgacactacgacgatcactgtgtacttgtttggcagctactcggtagcaagaaatggacggtttggcctaatccgaagccactgttgcctagactgtatgaacctttcgaccctttagatggcaatttagatgagagcagtgggagagtggaggtcttacatgaaggggacatgatgtacatccccagaggttatgttcatgaggctcgcactgatgtcagtggatcagaggtgaacgattgctcactccatttgacccttgctattgaggtcgaggcaccctttgagtgggaaggttttgctcatatcgcccttcattgctgggcagagaagcagcagcttagaggttcccaatctgtcgagttcgaggggaaagcaggagcttccttatccgctattgtgcttcatgtagccatcaggttgctctccgacagtgagcctgttttcaggaaggcgtgcatggtcgcagcaaaggcagcgacgtcgtccagttcctgtacatccacaacgactcacctggaggctcttcgaagcagccagaggtcaactttcgacgagatactgaggaagatcgatcagagctgcagcatcaaggaagcgctggagcgcatcgtgtcggcggtgagagagagagacgacggagccttccagtggatgagctggctccggcacctgccgcagcaaggaacagctgcaggctacatcatcgacttctgcaatgtcttgggcgccctcgaggcgctcgtggaggcgttcgactctgaccctggccaggccctggatggcctcacggccttcaagtcagggttttgccggcgcgtcgcgtacgaggacgcgtgcgaggcctttgggactttgctcgagatgtacagaatggctaggacccagtacatgagggggatgctggcgttgcacggtgcaggtgcacacgtgagctgaggctgagccgtggagaattcgccgtgacagagaaaggttttgcttttctggtggtggttgcgtggctaggctagtcttttctcctagcgaggaaaacctgacatgtatgtgctggacacttgtacggttgtgccatgtatcgttcgatggctgcttttgactgctggtaagattatccattggcatcgatctgtgacttgttccgttgttcgacaatcagttttcaattcagcagcactctggcttggccctttcca

SEQ ID NO: 101384 - DNA, 697 bp, Zea Mays
gactactgcgccaagctgagcgctgcgggtgaggggtcgcgcgcgccgccggctaccagggccggccggccgccccaccctgctatagctgtggatcagtggatgcgcgtccgcccctgtgtgtgtgtacccgccgaacgccatggataggagcgggaagatgagaaagaggaagaagcgcggtgacgaaagggccgccgccggtgcgccctcgccctcctccgcctctttcgacctccactttttccccgtcctccttgccgccgcccgaaccacacgccaatctagcagctcctgctccccggccgcgctcgctgcccgcctcctgcggcgtgtgctctcccactcgccgcagacgctctcccctctcccggcctccctcgtcgcgctcctccccctcctcctctcctccagctgctcttctgtcgccgcgctaagctgcgaggtgcttggcgcggcagcgctgcggtccattgaggctggcgagacgcttgcgtcccacagtggcatcgctagcggcctggcaaggacgctgggaagtagaaaccagcgagtcattgaggctgcttgtaattctatattggatctctcggcgtcttcagtcggtagggagcgacttgcaggctcacctgttctgccgaggacattgtaagcatccgcatcacgaactcttcgtttgtttttgtactgtacttta

SEQ ID NO: 101385 - DNA, 544 bp, Zea Mays
tagttgtaaacttggaaagccggcaccggacaaagttaaccacattggaaatcaaattctactggtacttcagtagcatacgctagtaagcgtcctagttcatttcttggccctcaaaatataagtcttttctatttgacattgggtgtaaatttggctctttatatgacgtacggtaaaaaatgacggtgtcaatttccatgtaaaaaaatgaaatttacactgggaagatttatattttgagtaccaagaaattgaactagtaactttactagtgtcaaataaggaattgtaatcaaggtggtgcagccctgggcagggtgagccagcgttgagaagattagagaaagttggcgatggtgacggagcggaatgaaatgagaaaggaagaagaagaagggcgcgggccaagcgctgtccttctcaataaaacgggtagtagggttgaacaaaatatttgtgggtcacgagcttgctcgattcgtggtcagtttggctcagcttaacttggtttattttaattatatcacgagctaagtaaata

SEQ ID NO: 101386 - DNA, 530 bp, Zea Mays
atgacgacgctgctggttccacagacgttgatgctaagtaatgaaagtgagcttcttactggtatggtgccttatactcatctgagagcagaggcacaggtgatggtctatgatgatgcttataaaagcaccgacagtgaattcttagaatctgacagtagtcaaaatcaatgtgggtaaactgcatcaattgttgtacttgttggtgaccgtctttttgtcgcaaatgttggtgactctagggctataatatgcagggaaggaaatgctattgttgtttcaaaagatcacaaacttgatcaaactgatgagcggcagacgcggcaccgtattgaagatgatggaggttttgcgatgtgggaaggtacgccagtcattgtattgtcttcaagttctatggaatatgattcttctcctaatatccatcctttgttctataggaacatggcatgttggtggtgtacttgctgtttctcgtgcttttggtgacaaactcttaaagcaatacatagttgtggatccagagatcc

SEQ ID NO: 101387 - DNA, 690 bp, Zea Mays
atagtaaaggtgctaaaaattgatagatcgtggtggtacaacgcatgcaaaaaatgccttaggacaaccaaaccacatggtgacacatacaagtgcaccaataattcctgtgacaccatcggatcgcctaccccaaggtcagctcttatatgtctctccatgttttttaaggtcctgctagacatcttctgtttttatctaaatatgttgactcatatgtgttccagtttaaacacactgtgagcatgatagacacagaccagctctacccctttcagttgcatattgcagtttgcaagggaacaataaagaaaaaaatggatggtggcagcacacttccaactacaccggcctcacagccatcatcgaccatactatctcaagcagggcaaggatcaggtgtcacacaaaacaagggggctgccttcatccgcgagccgtcgctaacaccggagagtcgcaaagtttcgtctagcgccaagacaaccccacatcagggagacaacctactgctaggaaaagaaattatccctgcttcgcctaacgtgcagacgccatcagaagcccacaacacccctggtgccaacactctccgcctgctgcctctaaaactggcaaattcgcagggtgacgcttacagtgtgctagatggatctacaaacaaacctgacaaaagtgaaacggaaaaag

SEQ ID NO: 101388 - DNA, 103 bp, Zea Mays
caaatgtcacctccttttgcagggaaacagcattcatgcccaaatctatcctccgttatgtcagcagtttagtgctctacttgatgagggaggggtatacaac

SEQ ID NO: 101389 - DNA, 99 bp, Zea Mays
cccatggtggttccttaattatgctagtttatttaagttagccagctatggactatgtatgtatggtgatgcaatggaggggcctgtctagcaaatcag

SEQ ID NO: 101390 - DNA, 196 bp, Zea Mays
atttctttttctacatatgctaacacagaaaactgcatattcatggcaatctggctttcatatatatgaacaagggtgccatgtcactcataccagttaatagtctcaagttactgtcaccacatatgtgtctatcattttctctgggtattggtgttcatctataatactatatatggttgcccacaatatttcg

SEQ ID NO: 101391 - DNA, 96 bp, Zea Mays
gtttgcattgaatgtgaatgtcatgtatagacactacagctgtcttttttcatgttacagaactgaaaagagagtcatgaaaagataacttatgcc

SEQ ID NO: 101392 - DNA, 96 bp, Zea Mays
agctagccaattctatcggcccacaagatttagctagctgtaccaataattttctagatagctatacatccatcttccattgattaacataaatat

SEQ ID NO: 101393 - DNA, 1061 bp, Zea Mays
acgcgcccacctcccaccgcaggaccctctgatcgaccacccttcccccggctctccctcctccgcgccgcgcccgttgatggccggcgggaagaggacgacggcgcgccaccaacacaaccacccaccgccgccgccgcctaaccctagccctaaccgtggccgcggggtcgccgacccgccgccggcctcggacgactcgccgtcgtcgaagcgcatgctggccttccacttcctccgcgcgctggcacggatccacagcaccacgccggcgccgcgccgcccgcgcaccatccgccgcgcggcctactcgtccatggcgcgcgccgccagcccgcgccgggcctggacgcaggcgctgctgctccgccgggcgcgctcgcgcggggtggccgtcgtcggctcgtccaggcgcgcggtcctgctgcggaggcgcgtctccgcctcggcgcctccaccgatgctccgcgccagcgccggggcgacgtcggcggcggcgccgccggtccagggcccgcctccgaggcaggccggggagccggccagggccgacgcgctccggcggatcgtccccggcggcgccggcatggagtactgcagcctactcgacgagaccgccgactacgtgctgcacctccgcgcgcaggtgcagctcatgcagagcctcgtcgacctcttctctccgcccaacccaaccagtaattaatcaataccgcatggtcaattgattcttccctcttgcaccgccgtcgccgcggtttgtgtctaaatcatcatcgcatatctcttgttcatgccacacatgcatgagatggatgcatgattaagataggagattattgttgaggagagagatcgattattattattgctgctagtgcatatgtttagtgggtgtataggttgggaacacacattcatggaggatggaaccacacaccgatcaattggagggagaagagattgttcgggtaattaattgtaatatatatatagagagacaattgagccacatacatatataagctattagtgcagtgcttgctgttgggtacttggtc

SEQ ID NO: 101394 - DNA, 2684 bp, Zea Mays
ttgtagtctgtggaatacaacaaaatagtagcacaactgagaccaggggaaagtgaagatgtaatactgttggcatgccaaaagcttctatcaattttcagttaccgccctgagcaaaaacatatttatatggcacaaaatggtttcctcccgctgatggaactccttgaaattcccagaaatcgtatattatgctctgttctgcagcttatcaacaacattgtaaaagatagtacatgcttcctagaaaatgcttgccttgttggccttattccagtggtgatgaattttgcagagccaaatcgtccaaaggatgttcgggtgcaagcatccttgtttcttcagcagctttgtcaagccagcaccctgacattgcaaatgtttgttgcatgccaagggatccctgttttggtaagctttatggagcctgactatgcaaaatacagggatatggttcatcttgcaattgacggcatttggcaggtcttcaagctccagcattcaactccaagaaacaacttctgtcgtatagcggcaaaaaatgggatgcttcctaggctggtgaatacactatatagcctgaacgaagcaacaagatttgcttcagtctcagggtcaggtgcttcagtaacacagaatggctcaaccccccgacgaagatctggccaattagacccttcagttcttgaaagttgcaaggcaaggctggatcatcatcattcatctggttctctgcaatctctacaaacagacgcagataagcaccatatattaatggactcgtcatctcctaggtttagtgataaaaccggcagtaacttggagaggaatgataacgacttggttattcggccacagaggcttagtgtttctgctggaaggacatctacagacagatcaccaaagcatgtagaactagtttcaaatggtcatattagcggtcaaaatgaccaggtccgacctctactgagtttgttggagaaagaaccaccttctcgacatatatctggacaacttgattacgtttgccacataactggattggaaaggcatgaaaccattttgccactattacatacatcgacagaaaggaaaacaaatggtgaacttgacttaatgatggattttgctgaggtctctagacatggaagagagaatggccatctggactcgagtataaaagtttcaaatagagttcatagtatgaaatatgcaccttcgacaagtgcctctaatgaaggagcatcaacttctggagctgcatcgcaaacagcatctggtgtgttatctggatcaggagtgctcaatttaagaccagggagtacaacatcatcaggcccattagctcagatgttctcttccatgagcgcagatgtggcacgcgaatatcttgaaaaagtagctgatcttcttttggagtttgcacaggcagacactgtggtaagatctctgatggccagccaaagccttcttacaaggctttttcagatgtttaacaagatagaacctcctattcttcttaagattcttaggtgcattaatcatttgtcgggtgatcctaattgtctcgagacacttcaacgcacagatgcaatcaaacatctgataccgattcttgagctttgtgatggacctctggtttttcaaatacatagtgaggtcctcaatgctttgttcaacctttgcaagattaataaaagaagacaggaacaggcagctgaaaatggaatcattcctcacttgatgaattttgtcatgtcagactcacctctgaggcagtatgccctgcctttgctgtgtgatatggctcatgcttctcgcaactctagagagcagttgagggctcatggaggactagatgcgtacttaaatctgttggaggatgatgtatgggcgtgcacggcattagattctattgctgtttgtttggctcacgataatgatcatagaaaagtggagcaggcactgttgaaaaaagaggcaattcaaaagttagtgaagttcttccaagactgcccagaacagtattttgtccatatattggactctttcttgaagataataatgaaatcttctaggctaaacacagcaatggccaccaatggcttgacagcattgctcattgcaaggcttaaccatcgagacgctattgcccgcctgactctgctgaaactcataaaggttgtctatgagcatcatcctcgaccaaaacaggtcatagtagagaatgacctccctcagaagctacaaaacctgattgaagaacgcaggggtggacaacggggcggccatcaagtgttggtcaaacaaatggccacctcattgctgaaggcgctgcacatcaacacagtattgtgattttgatgggtcatgtgttttcctctcaagttagtgtttacgttttcgctagaggaagaaaaggggcgtccttctctttttgcctccttttctgctgtggtggcttctcacgagcaccagactcatttgttgtacctgatccctccttttttgggagaaaggttcaacgttttggtgcaggataaaatgggcttgctatcctccagtgctgtgtatatctagcgtatgttagtgaagaaattgcaaattagacaatctaattaaaaaaatttaaaccatattgacattttgttccgtgtgttagtagattttccctagcctgaccc

SEQ ID NO: 101395 - DNA, 620 bp, Zea Mays
acgtccaggaaaaatatcgaaacaaggacgaaaaacacgaagaattacggaagagcaccccatcttcggtttctttcctccggacttcttcctgcttgcggcgtccgccaattcccttccctacccaaaccctagagcaaagctgaatggccctcgccacgagctcgcgagagactctgcgccgccgccggtgactgctgatccgcccgccgccgccgcgcccggtgctttgtcacgcaggaggcgacggtatggcgtcgaggcagcacaatgcacagttccacaaatccaagacgctcgacaacaaatacgtgaggatttctggcgcctctcgccacggatccgggggagaattcttgtttcgttgctgcgaattttggggttttctactctcactcactgcccctgcgcgggcgcgtgtgcagatgctcggagatgagatagggaagggggcgtacggccgcgtatacaaggggcttgacctggagaatggcgatttcgtggccatcaaacaggtctcgctggagaacattccgcaggaggatctcaacataataatggttttgttttgtcacattgttcacgagaaaaaaaatctgcagtttctacaccatgactaa

SEQ ID NO: 101396 - DNA, 563 bp, Zea Mays
acgtccaggaaaaatatcgaaacaaggacgaaaaacacgaagaattacggaagagcaccccatcttcggtttctttcctccggacttcttcctgcttgcggcgtccgccaattcccttccctacccaaaccctagagcaaagctgaatggccctcgccacgagctcgcgagagactctgcgccgccgccggtgactgctgatccgcccgccgccgccgcgcccggtgctttgtcacgcaggaggcgacggtatggcgtcgaggcagcacaatgcacagttccacaaatccaagacgctcgacaacaaatacatgctcggagatgagatagggaagggggcgtacggccgcgtatacaaggggcttgacctggagaatggcgatttcgtggccatcaaacaggtctcgctggagaacattccgcaggaggatctcaacataataatggtgatatttttttttcttttaacttatcatgcacaggaactgacgaccagcagacgtgaggaattgcgtgaaatgtggtttcgggcggagctgtgtgcctgtgtacacagcggctgc

SEQ ID NO: 101397 - DNA, 639 bp, Zea Mays
actgtttcaggcaaggccatagaaattaaagcggcggcgaagcaaagggacccggccggccggcgtccatgtcgaaggtgacggtgctcaaggtggacacctcctgcgccaaatgcaagcgcaaggtcctgcaggccgtcaccggcctccatggtgttgacaagatcgaggtggactcggagaagagcacgatgacggtgacgggcaccgtggacccggtggacgtgatcgtgcaggcgaggaaggccgggaagcgcgcgtccgtgctcaccatcggccctccggcgccgcccaagccggccgaggagaagaagcccgctgagcaggataagaagaaggcggaggagaagaagacggcggcggcgggagcggagaagaaggcgcccgagacgccggccacggtgttcgtccaccacgtcccgtcgtggcctccgtgccccaggtaccaggagagagtagtgtacgagcaggaccccccgccttgctccatcatgtaatgtaactatatacggatttgaccaggagtatacatgttcgtttggaacgtagaacgcaagaactttgtaagatcttgttcttttgtattctataaacttatagatgtgccagtgtcatggtctgctggcaccgggacagaca

SEQ ID NO: 101398 - DNA, 2295 bp, Zea Mays
gtccctttccccgggctgtggcactagtactagcaccagcatctcttcaggtctccaccaagcgcagacaccgcagcagcggcagcggcacgatctggtgacccccccgccgcgtcaagcctgctcctccggtgatcgccggactggcggggtaggaaccagcggagcgcagcccgcctccttccgctggtaagagtgacgcccgcccgctcctcccttcgctcgcttccttgctcttccgattctggcgtaccagtctcaccgcggcttggggatttgatgcggagctagttaaccagcagagctagtagcagatgcagatcacttgcttctctggtttgattttcggagtcaccatttctatttggttcgtgtgcctcagtgtctgacagcagcagatcctcgatggagatggatggggttctgcaagccgcggatgccaaggattgggtttacaagggggaaggcgccgcgaatcttatcctcagctacaccggctcgtcgccctccatgcttggcaaggtactgcggctcaagaagattctaaaaaacaagtcgcagcgggcaccaagttgtattgtattctcaagtcatgagcaactcctgtggggccatatcccagaactggttgagtcggtcaaacaagattgcttggctcaagcctatgcagtgcatgttatgagccaacacctgggtgccaatcatgtcgatggtggggtccgtgtacgtgtttctagggattttctggagcttgtcgaaaagaatgttcttagcagccgtcctgctgggagagtaaatgcaagttcaattgataacactgctgatgccgctcttctgatagcagaccactctttattttctggcaatcctaagggtagcagctgcatagctgtagagataaaggccaaatgtgggtttctgccatcatcagaatatatatcagaagataatactatcaagaaacaagtaacgagatataagatgcatcagcacctcaaattttatcagggtgaggttgattcccaatacattcttgcacacatttcagatatcgaagactagtgagtacaatcctcttgatctattttctgggtcaaaagagagaatatgcatggccatcaagtcccttttctcaactcctcagaacaacttaaggatttttgtcaatggatctttagcttttggtggcatgggaggtggtgcagatagtgttcatcctgctgacactcttaagtgtcttgaagatctcagcaagattagtggcctaaaactccctgacttcactgagctcctgtcagagacaatttttaggtctgaggtattaggcaacctgttggccactcaaaagttggatgatcatgacattgaaggggtaattcatctgtactacaacataatttctcagccttgtttagtctgcaaaaacctaactgatgtagagctattgcggaagtacactttcttgcattctcttccgttggacaaaagcctgaagatcgttagggacttcctcatttctgctaccgcaaaggactgtagcctgatgatcagctttcggccaagagagaatggtagtacagattctgagtatgattcagtgtttcttgaatcagtgaagcgaacctatgagtacaaggcatatttccttgatctggatgtgaaacctctggataagatggagcattattttaaactggatcagaggatagtcaatttctacacaagaaatgggggaggtcttgccatctccaaagggcagtaataccaaagacacttcgaggatttatacatctggagaagggtgcatcagggagtgttggttgttgttcctgctgcttggtgctgctgttgtaacttcatgagtacagtcccaaggttgggaggctcgacccttaacgcctggaaagggcacagggagctgtgttgtccgtcagtcgctgttgtaactcaaactagtgcatacaccgtggcttgtcacggtaatttccgaagatgtccaacgttagttgagacaaccgaactgcttaccgtggcaatcactcattgtaacatcaagttgaaaatgagggctgaagtttccctcacaggctaccatatgtcagatatgtcctttgtaccactaataagtgcccctggggtcatgtatgaatgtatctcaatttgctattgcagaaatgtttggtgaaactttcatcctcccatgctttgagcaaagctaacctaacttctttgaatctgttgggcttattccagcaaatcctggctgacggatggacctgcgatgctgtctgcttt

SEQ ID NO: 101399 - DNA, 2124 bp, Zea Mays
gtcctcgtcgccttcctgggaaatctccagctactgcccactgccccttcccttcagtccctttccccgggctgtggcactagtactagcaccagcatctcttcaggtctccaccaagcgcagacaccgcagcagcggcagcggcacgatctggtgacccccccgccgcgtcaagcctgctcctccggtgatcgccggactggcggggtaggaaccagcggagcgcagcccgcctccttccgctgtgtctgacagcagcagatcctcgatggagatggatggggttctgcaagccgcggatgccaaggattgggtttacaagggggaaggcgccgcgaatcttatcctcagctacaccggctcgtcgccctccatgcttggcaaggtactgcggctcaagaagattctaaaaaacaagtcgcagcgggcaccaagttgtattgtattctcaagtcatgagcaactcctgtggggccatatcccagaactggttgagtcggtcaaacaagattgcttggctcaagcctatgcagtgcatgttatgagccaacacctgggtgccaatcatgtcgatggtggggtccgtgtacgtgtttctagggattttctggagcttgtcgaaaagaatgttcttagcagccgtcctgctgggagagtaaatgcaagttcaattgataacactgctgatgccgctcttctgatagcagaccactctttattttctggcaatcctaagggtagcagctgcatagctgtagagataaaggccaaatgtgggtttctgccatcatcagaatatatatcagaagataatactatcaagaaacaagtaacgagatataagatgcatcagcacctcaaattttatcagggtgagatatcgaagactagtgagtacaatcctcttgatctattttctgggtcaaaagagagaatatgcatggccatcaagtcccttttctcaactcctcagaacaacttaaggatttttgtcaatggatctttagcttttggtggcatgggaggtggtgcagatagtgttcatcctgctgacactcttaagtgtcttgaagatctcagcaagattagtggcctaaaactccctgacttcactgagctcctgtcagagacaatttttaggtctgaggtattaggcaacctgttggccactcaaaagttggatgatcatgacattgaaggggtaattcatctgtactacaacataatttctcagccttgtttagtctgcaaaaacctaactgatgtagagctattgcggaagtacactttcttgcattctcttccgttggacaaaagcctgaagatcgttagggacttcctcatttctgctaccgcaaaggactgtagcctgatgatcagctttcggccaagagagaatggtagtacagattctgagtatgattcagtgtttcttgaatcagtgaagcgaacctatgagtacaaggcatatttccttgatctggatgtgaaacctctggataagatggagcattattttaaactggatcagaggatagtcaatttctacacaagaaatgggggaggtcttgccatctccaaagggcagtaataccaaagacacttcgaggatttatacatctggagaagggtgcatcagggagtgttggttgttgttcctgctgcttggtgctgctgttgtaacttcatgagtacagtcccaaggttgggaggctcgacccttaacgcctggaaagggcacagggagctgtgttgtccgtcagtcgctgttgtaactcaaactagtgcatacaccgtggcttgtcacggtaatttccgaagatgtccaacgttagttgagacaaccgaactgcttaccgtggcaatcactcattgtaacatcaagttgaaaatgagggctgaagtttccctcacaggctaccatatgtcagatatgtcctttgtaccactaataagtgcccctggggtcatgtatgaatgtatctcaatttgctattgcagaaatgtttggtgaaactttcatcctcccatgctttgagcaaagctaacctaacttctttgaatctgttgggcttattccagcaaatcctggctgacggatggacctgcgatgctgtctgcttt

SEQ ID NO: 101400 - DNA, 1920 bp, Zea Mays
gtcctcgtcgccttcctgggaaatctccagctactgcccactgccccttcccttcagtccctttccccgggctgtggcactagtactagcaccagcatctcttcaggtctccaccaagcgcagacaccgcagcagcggcagcggcacgatctggtgacccccccgccgcgtcaagcctgctcctccggtgatcgccggactggcggggtaggaaccagcggagcgcagcccgcctccttccgctgtgtctgacagcagcagatcctcgatggagatggatggggttctgcaagccgcggatgccaaggattgggtttacaagggggaaggcgccgcgaatcttatcctcagctacaccggctcgtcgccctccatggtccgtgtacgtgtttctagggattttctggagcttgtcgaaaagaatgttcttagcagccgtcctgctgggagagtaaatgcaagttcaattgataacactgctgatgccgctcttctgatagcagaccactctttattttctggcaatcctaagggtagcagctgcatagctgtagagataaaggccaaatgtgggtttctgccatcatcagaatatatatcagaagataatactatcaagaaacaagtaacgagatataagatgcatcagcacctcaaattttatcagggtgagatatcgaagactagtgagtacaatcctcttgatctattttctgggtcaaaagagagaatatgcatggccatcaagtcccttttctcaactcctcagaacaacttaaggatttttgtcaatggatctttagcttttggtggcatgggaggtggtgcagatagtgttcatcctgctgacactcttaagtgtcttgaagatctcagcaagattagtggcctaaaactccctgacttcactgagctcctgtcagagacaatttttaggtctgaggtattaggcaacctgttggccactcaaaagttggatgatcatgacattgaaggggtaattcatctgtactacaacataatttctcagccttgtttagtctgcaaaaacctaactgatgtagagctattgcggaagtacactttcttgcattctcttccgttggacaaaagcctgaagatcgttagggacttcctcatttctgctaccgcaaaggactgtagcctgatgatcagctttcggccaagagagaatggtagtacagattctgagtatgattcagtgtttcttgaatcagtgaagcgaacctatgagtacaaggcatatttccttgatctggatgtgaaacctctggataagatggagcattattttaaactggatcagaggatagtcaatttctacacaagaaatgggggaggtcttgccatctccaaagggcagtaataccaaagacacttcgaggatttatacatctggagaagggtgcatcagggagtgttggttgttgttcctgctgcttggtgctgctgttgtaacttcatgagtacagtcccaaggttgggaggctcgacccttaacgcctggaaagggcacagggagctgtgttgtccgtcagtcgctgttgtaactcaaactagtgcatacaccgtggcttgtcacggtaatttccgaagatgtccaacgttagttgagacaaccgaactgcttaccgtggcaatcactcattgtaacatcaagttgaaaatgagggctgaagtttccctcacaggctaccatatgtcagatatgtcctttgtaccactaataagtgcccctggggtcatgtatgaatgtatctcaatttgctattgcagaaatgtttggtgaaactttcatcctcccatgctttgagcaaagctaacctaacttctttgaatctgttgggcttattccagcaaatcctggctgacggatggacctgcgatgctgtctgcttt

SEQ ID NO: 101401 - DNA, 2158 bp, Zea Mays
gtcctcgtcgccttcctgggaaatctccagctactgcccactgccccttcccttcagtccctttccccgggctgtggcactagtactagcaccagcatctcttcaggtctccaccaagcgcagacaccgcagcagcggcagcggcacgatctggtgacccccccgccgcgtcaagcctgctcctccggtgatcgccggactggcggggtaggaaccagcggagcgcagcccgcctccttccgctgtgtctgacagcagcagatcctcgatggagatggatggggttctgcaagccgcggatgccaaggattgggtttacaagggggaaggcgccgcgaatcttatcctcagctacaccggctcgtcgccctccatgcttggcaaggtactgcggctcaagaagattctaaaaaacaagtcgcagcgggcaccaagttgtattgtattctcaagtcatgagcaactcctgtggggccatatcccagaactggttgagtcggtcaaacaagattgcttggctcaagcctatgcagtgcatgttatgagccaacacctgggtgccaatcatgtcgatggtggggtccgtgtacgtgtttctagggattttctggagcttgtcgaaaagaatgttcttagcagccgtcctgctgggagagtaaatgcaagttcaattgataacactgctgatgccgctcttctgatagcagaccactctttattttctggcaatcctaagggtagcagctgcatagctgtagagataaaggccaaatgtgggtttctgccatcatcagaatatatatcagaagataatactatcaagaaacaagtaacgagatataagatgcatcagcacctcaaattttatcagggtgaggttgattcccaatacattcttgcacacatttcagatatcgaagactagtgagtacaatcctcttgatctattttctgggtcaaaagagagaatatgcatggccatcaagtcccttttctcaactcctcagaacaacttaaggatttttgtcaatggatctttagcttttggtggcatgggaggtggtgcagatagtgttcatcctgctgacactcttaagtgtcttgaagatctcagcaagattagtggcctaaaactccctgacttcactgagctcctgtcagagacaatttttaggtctgaggtattaggcaacctgttggccactcaaaagttggatgatcatgacattgaaggggtaattcatctgtactacaacataatttctcagccttgtttagtctgcaaaaacctaactgatgtagagctattgcggaagtacactttcttgcattctcttccgttggacaaaagcctgaagatcgttagggacttcctcatttctgctaccgcaaaggactgtagcctgatgatcagctttcggccaagagagaatggtagtacagattctgagtatgattcagtgtttcttgaatcagtgaagcgaacctatgagtacaaggcatatttccttgatctggatgtgaaacctctggataagatggagcattattttaaactggatcagaggatagtcaatttctacacaagaaatgggggaggtcttgccatctccaaagggcagtaataccaaagacacttcgaggatttatacatctggagaagggtgcatcagggagtgttggttgttgttcctgctgcttggtgctgctgttgtaacttcatgagtacagtcccaaggttgggaggctcgacccttaacgcctggaaagggcacagggagctgtgttgtccgtcagtcgctgttgtaactcaaactagtgcatacaccgtggcttgtcacggtaatttccgaagatgtccaacgttagttgagacaaccgaactgcttaccgtggcaatcactcattgtaacatcaagttgaaaatgagggctgaagtttccctcacaggctaccatatgtcagatatgtcctttgtaccactaataagtgcccctggggtcatgtatgaatgtatctcaatttgctattgcagaaatgtttggtgaaactttcatcctcccatgctttgagcaaagctaacctaacttctttgaatctgttgggcttattccagcaaatcctggctgacggatggacctgcgatgctgtctgcttt

SEQ ID NO: 101402 - DNA, 1465 bp, Zea Mays
gcatttggaagtcatcctcgcccagtcgccccaccaccgcctccgtcgacgtcgtcctcgcctccgccgcgctcgcctcaccgccaccgccaccacggccttcctcgtctcatctccgccgtggcctcgccctcgatacgctactgacggggtgcccctcgccgtcgacacgtgacctccgtcatttgcatctcagctccaagatctactccagctgctggcctgtagctggcagtggtgactggcaggctgatctggttggacatggagagcgggctgctcttggcaccaggattggcaccatcaccggcacgcttgtctccaatctccatcgatataattgactgcattcggcttgggtgaagacaagaagtgacccagcaatttccattttcttgttcaggatggcaatggccacatcatcatcttaccctccaccacctcccttttaccgactgtacaaaaattttgagcaggatccttcatccgcaccagaacctccaccaccaattgatggaccattcaaagctttgggtgttgattacacaggagatgttgtgattccaagcttggagagtcataatgtccgtcagctttatccaaagggccccaatattgacttcaaaaaggagctaaggaccctcaacagagagcttcaattgcatattttggagctggcagatattttagttgagagaccatctcaatatgctcgtagggtggaagatatcacactcatattcaagaacttgcatcatcttctcaattccctacgacctcatcaggcaagagccacattgattcacatgcttgagagccaaattcagcgccgcaaggaagcaattgaagatataaagcagaggagagtggaagcgcagaagctgcttgcggaatcactgcatatcttggatgcaagccaagctaactaggctgacgccgagttggctggttcaagactggttcttcttagttaagagagtgttagcagcttcgagcctgccttcagctacatgttgggttactttgttgtggaagtatagattgtgagattgatgcctcgtggctaaacttagggggtgtttgaatgcactagaactaatagttagttagctaaaaattattagttagattagctagctaacaaataactagctaactattaactactttaccaaaaatagctaatagctaaactattagctagagtgtttggacgtttcaactaattttagccactaactattagttttagtgcattcaaacacttccttaatcgaaaggttctctatgctactcccttcattccaaattattagttttattttttttaatgcattattatgcacctagatgtatactatgtgtagatacataataaaagctaagtattcagaaaaattaaaataacttacagtatgatttaaaatagaggaaataatatattacagtattatctagaggaaga

SEQ ID NO: 101403 - DNA, 1530 bp, Zea Mays
aactgccggccttttcctatgaaattcagacacgaccacgcacggagcatttggaagtcatcctcgcccagtcgccccaccaccgcctccgtcgacgtcgtcctcgcctccgccgcgctcgcctcaccgccaccgccaccacggccttcctcgtctcatctccgccgtggcctcgccctcgatacgctactgacggggtgcccctcgccgtcgacacgtgacctccgtcatttgcatctcagctccaagatctactccagatcgggtgcatgcatgcagctgctggcctgtagctggcagtggtgactggcaggctgatctggttggacatggagagcgggctgctcttggcaccaggattggcaccatcaccggcacgcttgtctccaatctccatcgatataattgactgcattcggcttgggtgaagacaagaagtgacccagcaatttccattttcttgttcaggatggcaatggccacatcatcatcttaccctccaccacctcccttttaccgactgtacaaaaattttgagcaggatccttcatccgcaccagaacctccaccaccaattgatggaccattcaaagctttgggtgttgattacacaggagatgttgtgattccaagcttggagagtcataatgtccgtcagctttatccaaagggccccaatattgacttcaaaaaggagctaaggaccctcaacagagagcttcaattgcatattttggagctggcagatattttagttgagagaccatctcaatatgctcgtagggtggaagatatcacactcatattcaagaacttgcatcatcttctcaattccctacgacctcatcaggcaagagccacattgattcacatgcttgagagccaaattcagcgccgcaaggaagcaattgaagatataaagcagaggagagtggaagcgcagaagctgcttgcggaatcactgcatatcttggatgcaagccaagctaactaggctgacgccgagttggctggttcaagactggttcttcttagttaagagagtgttagcagcttcgagcctgccttcagctacatgttgggttactttgttgtggaagtatagattgtgagattgatgcctcgtggctaaacttagggggtgtttgaatgcactagaactaatagttagttagctaaaaattattagttagattagctagctaacaaataactagctaactattaactactttaccaaaaatagctaatagctaaactattagctagagtgtttggacgtttcaactaattttagccactaactattagttttagtgcattcaaacacttccttaatcgaaaggttctctatgctactcccttcattccaaattattagttttattttttttaatgcattattatgcacctagatgtatactatgtgtagatacataataaaagctaagtattcagaaaaattaaaataacttacagtatgatttaaaatagaggaaataatatattacagtattatctagaggaaga

SEQ ID NO: 101404 - DNA, 1528 bp, Zea Mays
aactgccggccttttcctatgaaattcagacacgaccacgcacggagcatttggaagtcatcctcgcccagtcgccccaccaccgcctccgtcgacgtcgtcctcgcctccgccgcgctcgcctcaccgccaccgccaccacggccttcctcgtctcatctccgccgtggcctcgccctcgatacgctactgacggggtgcccctcgccgtcgacacgtgacctccgtcatttgcatctcagctccaagatctactccagctgctggcctgtagctggcagtggtgactggcaggctgatctggttggacatggagagcgggctgctcttggcaccaggattggcaccatcaccggcacgcttgtctccaatctccatcgatataattgactgcattcggcttggttgtgcttgttttcagggtgaagacaagaagtgacccagcaatttccattttcttgttcaggatggcaatggccacatcatcatcttaccctccaccacctcccttttaccgactgtacaaaaattttgagcaggatccttcatccgcaccagaacctccaccaccaattgatggaccattcaaagctttgggtgttgattacacaggagatgttgtgattccaagcttggagagtcataatgtccgtcagctttatccaaagggccccaatattgacttcaaaaaggagctaaggaccctcaacagagagcttcaattgcatattttggagctggcagatattttagttgagagaccatctcaatatgctcgtagggtggaagatatcacactcatattcaagaacttgcatcatcttctcaattccctacgacctcatcaggcaagagccacattgattcacatgcttgagagccaaattcagcgccgcaaggaagcaattgaagatataaagcagaggagagtggaagcgcagaagctgcttgcggaatcactgcatatcttggatgcaagccaagctaactaggctgacgccgagttggctggttcaagactggttcttcttagttaagagagtgttagcagcttcgagcctgccttcagctacatgttgggttactttgttgtggaagtatagattgtgagattgatgcctcgtggctaaacttagggggtgtttgaatgcactagaactaatagttagttagctaaaaattattagttagattagctagctaacaaataactagctaactattaactactttaccaaaaatagctaatagctaaactattagctagagtgtttggacgtttcaactaattttagccactaactattagttttagtgcattcaaacacttccttaatcgaaaggttctctatgctactcccttcattccaaattattagttttattttttttaatgcattattatgcacctagatgtatactatgtgtagatacataataaaagctaagtattcagaaaaattaaaataacttacagtatgatttaaaatagaggaaataatatattacagtattatctagaggaaga

SEQ ID NO: 101405 - DNA, 594 bp, Zea Mays
ggtatatcatttgacttgacagctcaatcttatactgatatctggttttgtgatgcatatggcaggatggcaatggccacatcatcatcttaccctccaccacctcccttttaccgactgtacaaaaattttgagcaggatccttcatccgcaccagaacctccaccaccaattgatggaccattcaaagctttgggtgttgattacacaggagatgttgtgattccaagcttggagagtcataatgtccgtcagctttatccaaagggccccaatattgacttcaaaaaggagctaaggaccctcaacagagagcttcaattgcatattttggagctggcagatattttagttgagagaccatctcaatatgctcgtagggtggaagatatcacactcatattcaagaacttgcatcatcttctcaattccctacgacctcatcaggcaagagccacattgattcacatgcttgagagccaaattcagcgccgcaaggaagcaattgaagatataaagcagaggagagtggaagcgcagaagctgcttgcggaatcactgcatatcttggatgcaagccaagctaactaggct

SEQ ID NO: 101406 - DNA, 949 bp, Zea Mays
aactgccggccttttcctatgaaattcagacacgaccacgcacggagcatttggaagtcatcctcgcccagtcgccccaccaccgcctccgtcgacgtcgtcctcgcctccgccgcgctcgcctcaccgccaccgccaccacggccttcctcgtctcatctccgccgtggcctcgccctcgatacgctactgacggggtgcccctcgccgtcgacacgtgacctccgtcatttgcatctcagctccaagatctactccagatcgggtgcatgcatgcagctgctggcctgtagctggcagtggtgactggcaggctgatctggttggacatggagagcgggctgctcttggcaccaggattggcaccatcaccggcacgcttgtctccaatctccatcgatataattgactgcattcggcttggatggcaatggccacatcatcatcttaccctccaccacctcccttttaccgactgtacaaaaattttgagcaggatccttcatccgcaccagaacctccaccaccaattgatggaccattcaaagctttgggtgttgattacacaggagatgttgtgattccaagcttggagagtcataatgtccgtcagctttatccaaagggccccaatattgacttcaaaaaggagctaaggaccctcaacagagagcttcaattgcatattttggagctggcagatattttagttgagagaccatctcaatatgctcgtagggtggaagatatcacactcatattcaagaacttgcatcatcttctcaattccctacgacctcatcaggcaagagccacattgattcacatgcttgagagccaaattcagcgccgcaaggaagcaattgaagatataaagcagaggagagtggaagcgcagaagctgcttgcggaatcactgcatatcttggatgcaagccaagctaactag

SEQ ID NO: 101407 - DNA, 1121 bp, Zea Mays
atgaaattcagacacgaccacgcacggagcatttggaagtcatcctcgcccagtcgccccaccaccgcctccgtcgacgtcgtcctcgcctccgccgcgctcgcctcaccgccaccgccaccacggccttcctcgtctcatctccgccgtggcctcgccctcgatacgctactgacggggtgcccctcgccgtcgacacgtgacctccgtcatttgcatctcagctccaagatctactccagctgctggcctgtagctggcagtggtgactggcaggctgatctggttggacatggagagcgggctgctcttggcaccaggattggcaccatcaccggcacgcttgtctccaatctccatcgatataattgactgcattcggcttgggtgaagacaagaagtgacccagcaatttccattttcttgttcaggatggcaatggccacatcatcatcttaccctccaccacctcccttttaccgactgtacaaaaattttgagcaggatccttcatccgcaccagaacctccaccaccaattgatggaccattcaaagctttgggtgttgattacacaggagatgttgtgattccaagcttggagagtcataatgtccgtcagctttatccaaagggccccaatattggtgcgttggttcttgagaaatagatatgtttattgtgtatgcatacatactcaattctttgtgattgttaaatgttaaagctgtttataagtaggcactagctagacttgtgccaaaagaaaggcgaaaggggctgaaatcgttaatcattttaacgacctgggagatttggaagcatagaaattcatgtgtttttgaacttgcaaggccttgcattcctgacatccttagacagatcatggaggaatgcaggatatggtggtgggctgatgcttcaaatctgcaagattttattatttggtcgttgtccaggacgtgatgatcttcaccaaattagtttgcctttgccttatcttttggtcatgttttagaaatggtttgtacagttagggtgctgtgtgagtgggtgtgggtcttgtaagtctggccttagctggacaaatttgtctctttccttaatgaaatttcacacaca

SEQ ID NO: 101408 - DNA, 1158 bp, Zea Mays
aactgccggccttttcctatgaaattcagacacgaccacgcacggagcatttggaagtcatcctcgcccagtcgccccaccaccgcctccgtcgacgtcgtcctcgcctccgccgcgctcgcctcaccgccaccgccaccacggccttcctcgtctcatctccgccgtggcctcgccctcgatacgctactgacggggtgcccctcgccgtcgacacgtgacctccgtcatttgcatctcagctccaagatctactccagatcgggtgcatgcatgcagctgctggcctgtagctggcagtggtgactggcaggctgatctggttggacatggagagcgggctgctcttggcaccaggattggcaccatcaccggcacgcttgtctccaatctccatcgatataattgactgcattcggcttgggtgaagacaagaagtgacccagcaatttccattttcttgttcaggatggcaatggccacatcatcatcttaccctccaccacctcccttttaccgactgtacaaaaattttgagcaggatccttcatccgcaccagaacctccaccaccaattgatggaccattcaaagctttgggtgttgattacacaggagatgttgtgattccaagcttggagagtcataatgtccgtcagctttatccaaagggccccaatattggtgcgttggttcttgagaaatagatatgtttattgtgtatgcatacatactcaattctttgtgattgttaaatgttaaagctgtttataagtaggcactagctagacttgtgccaaaagaaaggcgaaaggggctgaaatcgttaatcattttaacgacctgggagatttggaagcatagaaattcatgtgtttttgaacttgcaaggccttgcattcctgacatccttagacagatcatggaggaatgcaggatatggtggtgggctgatgcttcaaatctgcaagattttattatttggtcgttgtccaggacgtgatgatcttcaccaaattagtttgcctttgccttatcttttggtcatgttttagaaatggtttgtacagttagggtgctgtgtgagtgggtgtgggtcttgtaagtctggccttagctggacaaatttgtctctttccttaatgaaatttcacacaca

SEQ ID NO: 101409 - DNA, 1549 bp, Zea Mays
acgacttacgagccgcgccccgcaggccgcagcattcgaccccacacgcctagccgccgacgcaggccatcccgactccgcccgccggctggtcggagttctccctcccggtccggaaatcctcgccgctggctcctccgtcgactccaggggacgagtacaacaggtacggtgcggtgggacatgcctaatggtgcagaagcaagtgtgtgtgcattatcaggcagatggatggactcgttcaggatcgacatgacagacgtgtgccgctcgacgaatactagcaacaactatgacgaagatggcagagcacctcaaagagaggcgttgaacagggccatgtcatgttcgtgctggtcctgaggtcgtcaccgatccagcctttcttgtgaccaggaacatggaggcctgatcaatagaaggaacccaaaaaaaaaagagtcatggagtacattgatgcattggattatcatgatgccatgctttgagggtactgttgagagaaaattctgtggccagcaatgtagaatggtgtgatattttttgggcctatcattatgatggtgccttttatcttggtgactaagtttagtctgcctcgatgattgcagtgcctgctctgtgctgatccagtgattcttaattctgtgcggttttgctcgcatgcattgtgcctgctctgtgctgatccagtaattcttaattctgtgctgttgtgctcgcatgcattttcctggaattggtttctaaatcgtttagaatgtgatccttttttatgtcatcagggaacggaatatagcatttaaccgcatagttcgtttcacaaaattccttcagcgacgcaatcacacaaatcgtataacaaaaaaaaagaaaaaaaaagaaaagcaagacggaggtggtgggctggtggcaacagaacagaaatgtgtccaacacatgcacagcagaatcgaagttgacataatctatagctacatgaaacgcagtcgtttttgttcacgcgcaagataccctagatttacatgtcagtggatcggagcacagccaacaagcacatatgctgcgtaatgcaggaaaggacctacttggtttcagtacacaaaagcacacagcggactggtagtctagcgagagtcgatccaagatctgaagaactcgtggagctatttggtgtgtggaggaatcataaaagggctactgattgcgttacctaagctagatctgttagaagctataactgcaaaactaaacctgagattctagatctacttctgatgcttgtgagagactagtgcgcttcgattcttgcatctccacctcaacagagatcacttgttttggcttgcagttttctgtctccatccgtctgagtttttccttctgtatggcacgtagttcatacctacaacaggtaggataagtgtacaatgatgttgtcaataacaaatggtagctggcataggagaacgtacgtaatatcatatatcaggaggtaaggtaaactctatatggtaatgtaattgctcatcaaatagcgacagttcag

SEQ ID NO: 101410 - DNA, 1462 bp, Zea Mays
aagagaggtaactgaacgaagcatccggtgtgtgccctcgtcatccgccgccgccgccatgccgggcttcgctcagcgtctcgcgggcatcccgtggcggagcatcgcgaggcaaggcctctcccgcgtgttcctggtggcgaaggcctactgcgtgatccacgtcgtcaacgaccacctctgctcggtgaccttagtgcggggcgccagcatgctgccgtccctgaacctggcgggcgacgcggtggcggtggacagggtcagcgtgaggctcggccgggtcgcgccgggggacatcgtgctgatgatctcccccgaggacccgcgcaagtcggtcgtcaagcgcgtcgtcgggatgcaaggggactccgtcacctaccttgtcgaccccggcaaaagcgactcctcctccagaaccgtcgtggtaccgcaagatcatgtctgggtgcagggtgacaatatctttgcttctaacgattcgaggcaatttggagctgtgccttatgggctgattacagggaagatcttttgccgggtttggccgccggagagtttcggcgcaattgatgacgcaaccaagcagtcttaacgctgaggaggagccgaggagagcacatggacccatattgtttgctcgcgcccagagattctataatagccaactgcagggggggcccttccttgagctcgagagctttcgacgacctaccgcagcgcatttctacagcgaagcaaagagcgtgtcccgtgtttttatagttttggtgtgtgacaagttctgaaacccaaatcggcacaggtttcgagacagtttttttttttttggtgctagtgccaacctgggtttgggtttgcaactacactacaacttcacatgcttattccaaacatttgaactgatttgtcagtcctcgttttgcagaagggtgtgtttgtttgtttatccatgtccatgtcaaaacacacgacgattattgttcagcatgtccatgtcaaaacatacatcgatcttgaggttattatgccatactatatatatagcactgtaataaagtcatccatccggcctctacgtcgacgcggcggcggcggtggcgctgggctccggtgctgctgccgccgctagctgaaaccgatggtgctgctgctgctgcagcagcagcgacgacttgcactgggcgcacatgcagatctgctgggtggtgcagaagccgccgacgtagcccttgtcctggcagcgggcgatgcagagcagtggcgcgtcgcggcactccgggacgatgctgcggaacagcgggcacatgcccttgccgtctgcttggttcagcaacccggtctatatatatacttccacgcgagctcatcgatcatggtccatgtccatctccttctttttgtcctcgacgtcgcctggtgcatgccgggcatgcaggcgccgtggctaccgctgccggcgctgtag

SEQ ID NO: 101411 - DNA, 981 bp, Zea Mays
gatgggaatttggcagaagccggaatttggtacaagccgtacatgtcacagttatggcttgaaattgaccagcattccagcaacaccttttaatcttttataatgttctgcagaatctggaaaagagaatccaaatgatgatggtcctgaaaataaccctcagtttactactgtttatgttggcaatcttcctcacgaggctaccatgaatgatgtgcgcctgtttttccattcactgggggctggttcaattgaggaagtccgtgtaactcgtgataaaggctttggctttgtgaggtacagcacccatgaggaggctgcattggcaattcagatgggtaatggccaacttattggcgggaggcagataaagtgttcctggggaagcaagccgactccacaagggacagcatccttgcctctgcctcctccagcactggcaccattctccactggagtgtcggccaccgacttgctggcctaccagcgcctggctctgagcaagatggcctcgaaccacccagccctaatgggtcagcactccttgaagcaggtcgctgcattggggattggcggcggagccagccagtccatctatgatggcggcttccagggcatcaatactgtcaccggcacaacttccgcccagcagcagcagcagctcatgtactactagagtactactactccatgaggtacccagctacctatcccttcaagaggatggcgaggatgaatggatgatgccccttactatacccctatacatatagtagatgatgaagtcattactaggaccttttttccctaatctttttaagacccatctaagtaacatgtcctctctatgctagctatataattgtgcatttctggatacttaaagccaaggttcttagtagtataatcttctgtgtttgaccatcttttattgtgatgtatggattttcgttggcaattactgtatatgtcactggatag

SEQ ID NO: 101412 - DNA, 117 bp, Zea Mays
gttcttgtaactcagggttgcccatcattgtatatgtttaccagaaccagtttgcccataggcaaatatacaaaactaaatgatttatcatttttcagttgcattctaagtaactag

SEQ ID NO: 101413 - DNA, 658 bp, Zea Mays
gacgcgtgcttggcgtgtcccatggcctgaggggaagagcacggggactccgattggacgacatcttctttgcctcgccatcaacaatgtcttcccctctaatgctgtcgatggaggcagatctggagaagacgtgaggcaagggagggaactggaggaggagcggcgcttcatgaccaagcggctagagcggttcctagggaggctgaccgagaagaaggcggcgtggaagtcctgggttcgggccaaggcttgccacgccgtggccgccctctaggacgagctcggcgcggagcggaggaaccgaaggcagttggagcaggccaacgccaggctgttgcgtgacctggcagaggtgtgggaggcggtgaagcaggaggcacaaagctatgagatggagcgcaagacaggggagctgatggaggacgtctggtctgagctcatgtaggaggtggaggaggaccagatcgaggtagagctgctcttcgaggagtgcctgcgcatgcaggaggagatggacgaagagctccacatgctgtagacggtcgaggtgtggcaggaggagtgcgtgcagatgaagctgtcggatgccaatgtcgcgccggagaaaaagtacgagcataaccggctgcaggcggagatggaggccttcctccgc

SEQ ID NO: 101414 - DNA, 790 bp, Zea Mays
catacgaagactagtaacaactatgacgaagatggcagagcacctcaaagagaggctgtggcatacgttgaacagggccatgttcgtgctggtcctgaggtcgtcaccgatccagcctttcttgtgaccagcaacatggaggactgatcaagagaaggaataaacaaaaaaagagagtcatggagtacattgatgcattggatgatcatgatgccatgctttgagggtactgttgagagaaaattctgtgtccagcaatgtaggatggtgtgatattttttgggcctatcatctgaggtgcttgttgcatagatattagttttgtgcatttggctattttgggatgcagatacgattttacactactagttgattaaattaataataataatgatatagcagcacagagaaactgtgatatatagcagcacagagaaaccgtgatattgggcgtggtaaccacattatgatggtgccttttatcttggtgactaagtttagtctgcctcgatgattgcagtgcctgctctgtgctgatccagtgattcttaattctgtgcggttttgctcgcatgcattgtgcctgctctgtgctgatccagtaattctttaattctgtgctgttgtgctcgcatgcattttcctggaattggtttctaaatcgtttagaatgtgatcctttttatgtcatcagggaacggaatatagcatttaaccgcatagttcgtttcacagaattccttcagcgacgcaatcacacaaaatcgtataacaaaaaagaaagaaagaa

SEQ ID NO: 101415 - DNA, 234 bp, Zea Mays
atgggacgggcgacccgtgaacatcccggtcgtctctctggttggtgcggcgggcccggctgcggcgcgctgcccaatgtgccgcagcggaggcgcgtgcatgtgggctgtggggactgggggggtgggagacgacccatggtccccgctccggctgcatgtgtgctgatagctgataccggcagcgggggccaggcgcatggcgcccgtagtccttcccagctttatccgtag

SEQ ID NO: 101416 - DNA, 622 bp, Zea Mays
agacagatcgacagacgtgatagagtcgcggccgctgctgcaggccggaagaatagtggccgtggacgagaagctcgtctggtgaatcgtgatggattcactcgtccggtccgtccgtcagcatccgctggctccttcggccggccgggtttctgcaagcacgaactcgcgtgcaagttccgctgctgcggccagtggccagcgcgaggggaaagggcaaaggcgtctcgccccctggaagaccgtgcacgctggcacaggcatgccgcatgcatgcggcaaagcaagcgccaaactcgccgccgcgcgcgcgcgcgcatcccgtgcgccaaggaggaagcagcactaccggctaccgcgatgggcccatgcatgtcttgcgtaggcattgtttgccttgttagcagcagctagctgtggatatacttattaactgcactgcttgtaaattgtgtaacctgtagtaagacataagttcaagaccgacagatgaactgtgcactgcaaacgtacgggctcatgtcgtaggcctcgtttcagtgtggcttggttctgcaggaacgcacctccctcatgtcgcgcgcgtgcagataaatggcagaaaaatcacataaacgtacaa

SEQ ID NO: 101417 - DNA, 2183 bp, Zea Mays
gacgtaaaattcctcccattgcccgtgggcgtgtggcggcggcgacgacgaatcaaacgatcctgatctacctcacacatctcgaggaggccgtccagcgtccaccaactcccgcatctcaccccatcgcttcgtcgctagtacgcagttcggtccacctatctatcgcctccttgtcggccgtcgttatatttcgcggccgatccttgttcagttgttcctttttccccatttgcgccccttcgtcgctgctatattccgcgaccgcctcgcctaataatagtcgccgcgggcagtggataccgcgaccgccaccgtcatgggagcgctcgagggggcccacctcgcggccgtcgcttgcgcgtgtgacgatgacgaggagcaaagcgactgcatccccctgctcgcaggggacgccgcgacggcggccgacgccatggagccggcggtgcgcgcgctcctgctggggctcggcgaggacgaccgccgcgagggactgcgccggacgcccaagcgcgtctccaaggccttccgcgacggcacccgaggttacaggcaaaaagtgaaggacatagtgcggggtgctctgtttccagaggttggtgtggacaaaaggactgggtctgctggtggaactggcgggcaagtagttgtccgagacattgaacttttctcatactgcgagtcatgcttgcttccattcagcatacagtgccatgttgggtatgttccctcgggtggaagggtggttgggttaagcaagctttctagagtgtctgatgtctttgccaagagattgcaaaaccctcaaagactagccaatgaagtctgtggtgcactgcatgctagcattcagccagccggtgtggctgttgctctgcagtgctggcacattcctttgccagaaaacctggaatgcaagaccttgcaaggttggataagaacttcacgttcatgtcggtctggactatttgagggtgaaagcagcactttatggagtgacttcttggctcttgttaagcttaggggcatagacatggaggctgggactggggaccgttgtgtctctgttccttggtgccccttaaggtctcgtgaggttccactctccaatgggctctgcaagaaaagctcaaccaatggcatggtttccgcagttgcctcaatgctcttatcactcggagaggaccccctcaggaaagagcttctaggcacacctcagcgttatgtgcagtggctgatgaagttcagagcacgcaatctactagacgtgaagctgaatggctttacacttggtaacgctagcctacatgagaggccaggcggaggcacagctgaccatggacatggatcaatccgaaccgagctgcacttgccattttgtgcgcagtgtgagcaccatcttctgcccttctacggagtagttcacattgggtacttggacaaaggaagtggagaaggcatcatcgaccggtcgcattttcaggcactggttcgtttctatggctgcaagcttcaggtgcaagaaaggatgacgaggcagatagccgaagcagttcattcggtttcacgcaacggggccatggtcgttgtcgaggccagccacatgtgcatgatctcaaggggggtagagaaaataaggagcaacacggcgacagttgcggtcttgggccactttttgaccgacccttctgccaaggcacgcttcctgcagaatgttctgcgtacagctggttctgcggtttgaatcgtatgacttagcaaaggaagggaaaaaaatgtgtacgattactctccagcaatggcattttttttgcggatcttctggtctaatacgattaccactgaaaatgtccgtagctcatcgcctcttcttcttgactgcaaatctgtcacctgggtgactgtaccgaggatgtcacaagaaaacaccgaaagttttttttggttctcttgtgttgtaccatgtcacttgtacaccgtttcaaataaaaaaaaagaaaaaaaaagaatagtacgtaatagttacagccgtgccaagaaggaaatagttattcgtacgttagatttcttgtcagattgtcagttgttctcgagatttgtagtggaggttactctggattttgttgtaagtttgagttttgatgatgcaccgatagagatcagtgaaggaaactacgcag

SEQ ID NO: 101418 - DNA, 1994 bp, Zea Mays
gaaaaaacagatcaaatcgacgcgacgacgagataaagaagagaacccaccaaatcaaaggcggacacatcgccacatcctccattccgccttctcggctcctccccacctggccaccactaccacctcccgtctcctcgcctccttccaaatccaccggttgccatccgtccgacgaggacggaaagggaccggcgtgagggaaacctagatgacccgttcctgggtcgggaccagagagccttccgggctgcgccttcgatcgccgccccgccgcctagggttcccgcgcctgtagatcgggtttgggggacgaggaaggggagtgccaagtaagggaacgatggggccgaggcgctccaagcgcgtttcgtgggccaccggggccaatctctgcaaggtaaggttttttatttcggaggattccccttctcaagctggattgagaccgcaggacaatctccaagcaaaaggctcatggttaatgcatgcagctggcccaagctcagatgattcgctgccacctggcttcgaatcattgcagccaacaagctgtctcaaaattgacatatcccaaatccatgttattaggtggagatgcccaccaaaggtattgcataatcctgtttggcttgtagctgctggagaagaaagtgaggaggttgccttgcagaatgatagaatatttggagcacttgaggctatatatccacggccgtcgaatatacccccaaacccatttgttactcctgatgtgaaagactcccaatatgatgattcccgaacccagttggttccgttgctcccagttgaagaggatgatgcctctgaccagttggaagaaccacctgttggtctatcaagtagttaccagcagtcagataagtacgactcagcaacattcagggtcccacaagcctcagacgctccctttaccactgcgcagcagcagcagccgaatggttccatcaacaccacaaggtctggtgcccccgttgagcctgacacagtggctgctgcatctgctgcttacactgcaataattcagagcaaccgaatgggaaatatgattgacaaagatctgctcgtcgaaatgctaagtgaccctgcccaacttgagaggttaatgaaagaatatggcgcgcttaagcacgaacagtcaactaacagttctgttgccccaatggtgcaaggtccaccaccccagatgacagctagtgttccggtctccttcccagatcacaccactacttttcacaacataaactctacactgccgcctccacctgttctgaatcgtctgcctcctccagctattccttcagcagttaccatcaatccaccagcaagttcaagtcaagcaattagctttccaactggccgaaccagcggcttgaactattaccagaccctgatccatcagcatggaggggagaggcaggagccacagccacttcaacagcatggaatgcactttccaatgcatcatcgcactgtcgcttcccagtctagcgccactgatattgtcagcagtggtactatgccagctagggatactaagcaaaggcctacgaggccttgtgcttacttcaacagcgccagaggatgccgcaatggtgcgaactgcacctttctgcacgatgtgtctgccgcgaggaaagaacagccaaagggatccaaaagaattaagctagacagtagaatagctggtcggtattgaggaggctgctgccggttgattttttactgttctttggttcaaaatccttttcctcctttttcccttcaaaaaattattcagtaaatattgcgccccagctcctttgctttctcttagccaatttctatttgtttactagaagaacatgctcttagcccatttctctttgttgactaaaagaaaatgttttagaagaaagaaaaaaaatcccatgattaaatggagctctgtcgttattgaaccagttgaacacatgttaattggtggcagttat

SEQ ID NO: 101419 - DNA, 978 bp, Zea Mays
atggcggccaatgcgggcggcggtggagcgggaggaggcagcggcagcggcagcgtggctgcgccggcggtgtgccgccccagcggctcgcggtggacgccgacgccggagcagatcaggatgctgaaggagctctactacggctgcggcatccggtcgcccagctcggagcagatccagcgcatcaccgccatgctgcggcagcacggcaagatcgagggcaagaacgtcttctactggttccagaaccacaaggcccgcgagcgccagaagcgccgcctcaccagcctcgacgtcaacgtgcccgccgccggcgcggccgacgccaccaccagccaactcggcgtcctctcgctgtcgtcgccgccttcaggcgcggcgcctccctcgcccaccctcggcttctacgccgccggcaatggcggcggatcggctgggctgctggacacgagttccgactggggcagcagcggcgctgccatggccaccgagacatgcttcctgcaggactacatgggcgtgacggacacgggcagctcgtcgcagtggccatgcttctcgtcgtcggacacgataatggcggcggcggcggccgcggcgcgggtggcgacgacgcgggcgcccgagacactccctctcttcccgacctgcggcgacgacgacgacgacgacagccagcccccgccgcggccgcggcacgcagtcccagtcccggcaggcgagaccatccgcggcggcggcggcagcagcagcagctacttgccgttctggggtgccggtgccgcgtccacaactgccggcgccacttcttccgttgcgatccagcagcaacaccagctgcaggagcagtacagcttttacagcaacagcacccagctggccggcaccggcagccaagacgtatcggcttcagcggccgccctggagctgagcctcagctcatggtgctccccttaccctgctgcagggagcatgtga

SEQ ID NO: 101420 - DNA, 3053 bp, Zea Mays
atggcctcctcgcaggagaaggccacgtcgggtgtcctgaggaacgcggcggcgctgctcgacgaaatgcagctcatgggagaaacgcagggtgcgaagaaggtgatcaactccgagctgtggcacgcgtgcgcggggccgctagtgtgcttgccgcagcgcgggagcctcgtctactacttcccgcagggccacagcgagcaggttgctgctaccactaaaaagataccgaattctcgcatcccaaactacccgagtctcccgccgcagctgctatgccaagtccacaacatcactttgcatgccgacaaagaaactgatgagatttactgccagatgaccctgcaaccgttacactcggaaacagacgtcttcccaattccaactcttggtgcctataccaaaagcaagcaccccaccgaatacttctgcaaaaatctaaccgcgagcgatacaagtacgcatggcggcttctcagtgccgcggagagctgccgagaagctgtttccgcaactggtacgagcttcagctcagacccgtgttttcaacccccaggattactcaatgcagcctcctaatcaggagcttatcgtccgagatttgcatgataacatgtggacgttccgtcacatttatcgtggccagccaaagcgacatcttctaacaactggatggagcctttttgttggggcgaaacggcttaaagctggagactctgtcttatttatcagggatgagaagtcacagctccttgtcggtgttaggagggccacccgacaacaaccggctttgtcttcatccgtcctgtctactgacagtatgcacataggcgttcttgctgcagcagctcatgcagcatcaagtggtggctcatttactatttactacaatcctcggacaagcccgtcgccatttgtgattcctcttgcgaggtacaataaggccacgtatctgcaaccatctgttggaatgaggttcgcgatgatgtttgagacggaggagtcaagcaagcgcagatgcacaggtgctattgtgggaattagcgactatgacccgatgcgatggccaaactcaaagtggcgcaacttgcaggtagaatgggatgaacatgggtatggagaaagacctgaaagagttagcatatgggatatcgaaactccagagaacatggttttctcttctcctttgaattcgaagcggcaatgtcttcctagctatggagttccgggcctacaaattggatctgtaaatatgtcatcaattccaagggcacaaggaaatcctatcggtaacttgcagcacatgccagggatgggctcagaattggctctactgcttctcaatcaatctggccagaacatcggaagtccaatcgcttgtcaacaatcatcattttccagcattattcaaaatgctaagcacagctatttccctccaaagacgtttggtgcttccactgcttcaatgaagcaagaaagcatgccttcgactgaagcccagccacagttgaatgctcttggtattcagagaagtgatcgagtaagctgtgaagttcagacagctagtgattcaaatcctgcacaggagatgagtgttaaaccaagagcaccaagaagcacagattcacactcaagccaaagcatttcggatcaaaacagcaagggtgagcctagaacaaaaactcgaaggagcaagaagagctcgtatcagaaaaccatttcagataaatctgagctttgttcagtaccttctcagatttgtgacgacaagaagcatggttcagagccaagactggctgactgtgaagccgaacaagctacctgtgggaataacgaagaatcatctggagcacttacacatggtgattttgctggagagctccaagttcagcagcaggttgaacagcatgaactacttgcgccaccaaagatagaatcatcaaagtcacctgatggagggaagtccgtcagttcgttcccaaaccaagggtgtatcccacagttctttgagggtctggactggatgattccaccttcctattaccaagactccaatggcatccaatcagttaccgcgtcggataacatttttaatccatctgaaggtataccttccaccatgaacgctgatgccttggatgcgtttcaaacatcttgcctttctgagtgctttcctagctccattcaagagttcatcggcagtccggatataaacacactggcatttatgtcgcctgagatgcaacaattggatgccggcagcaacttgccgagcacatccaactcctatgtgcagatgagtttctcggaggagagccacagcgcatccttgagtggccttcacatggaagccatccatataaacagctcgtcatgctctcagccactggcgacggggagcttcgatgcaggggcgttcccgaaactgtcaaacataagagaatgccaacccttgcctctgcaagagatccacaccagttccatgggaacaccttcatgcagtatggacgcggcggcagagtacggcacggatagaagtgcgaagcaaatgaaaccaccggtccggacctatacaaaggttcagaagttaggatcagttggaagatgtattgacgttacacggttcagagattaccatgagttgaggtcagccattgcgtgcatgtttggactccaggggaagctggaacatcctggcagttcagattggaagcttgtttatgtcgactacgagaacgatgttcttctcgttggagacgatccatgggaggagttcatcaactgtgtgagatgcatccggatcttatcaccttcggaagtacagcagatgagcgagaacggcgtgcatgtcttgaacgactgcatccaaatagcttagcaaagtcacggctgtatgctctacagcctgcacagtgtaggctcttcttgtaaataaaaatatacagcatgtgcgtcaaattctctggtcgctctgtttcttttgtagcacgagaagaaacaattacagatgtcaacatcctgccaatgccatgtgtgtttctttcaggagtcaaa

SEQ ID NO: 101421 - DNA, 104 bp, Zea Mays
agtattcttcacccgcgcgtaatggaaggcgtggcatcgttgaaaacgcatgcactcgaggtccgactccgtataggatgcacgcccaggtcaagtaaaaggcg

SEQ ID NO: 101422 - DNA, 1935 bp, Zea Mays
gttcggaactgattagttgcttccctattacaaccgtctgtttgaggtctcactcacaggatgctgaaaataagccgcgttgtgtgtgtgtgtgtctacgatgaactgtttgacgcgttcgttcgagctcttcttgaagcagtttgacaagctgtttgtggtcgtctcgttctctgtttggttgtccagtttcagtcccgagacgtcgtaatcgctagatgatcgatgaacgccaagaagattaagctgcacgactatcaccactgctacggatcgccgatgtgtgacccacagctgttcccgcgcgccgccgccgccaccaccgcagggctctccttgcacccggggccggggctcgtgggctccctgccgcagcggcatggcggcggcggcggcggctgggtgcacgaggagcacaccgcgacgaccccgagggcggcgcaggggcagggcggctgcgtcgtcggctccgacgccgccgcgttcttcgccgccgaggagctcatgatgggcacggcgcggttcgactcccctctcggcggaacgacgacggcactccaggagctgacagcgtttgccaagggaccgccgtttggccggccgaggcccacgacggggggcgagcgcgagcgcgagcggctgtacccagtggacccgctgccgctccgcgactgcgcggcggtgaggacgtactacgtccggccgcagcagcgcgacggcgccacggaggcgcctccttcactcgagctgccattccagcggcggcagcagcaacaagtgcacgggctattcggcgacccttccaccggcaggctactcggcggcggcgagcctcaagctcactcctttccagctcacaccctgaagcaggttccggcgagcacgtttgtccccgcgatggaggcgccgccgggcatgcagagccttatggacaacccgctgtccaggagctgcagtatcatcggtgcggcggcgacccacgcagggagcggtaacgccgccgcgccggggcaaggtgctcccagcaagacgcggattcggtggacgcaggacctccacgagcgcttcgtcgactgcgtcaacaagctcggcggcgcggacaaggcgactcccaagggcattctgaagctgatgaactctgatggcctcacaatctaccacatcaagagccaccttcagaaataccgcatagccaagtacatgcccgtgtcatcgacgtccgaagggaaagagaaacgagctgctgccgccaatgacgtgcagaatctcgaccccggcaccgggatgaagatcacggaagcgctacgcgtccagctcgacgtgcagaggcgcctccacgagcagctcgagatccagaggaatctgcagctgaggatcgaggcgcaaggcaagaagctgcagaagatgttcgaggagcagatgaagacgagcaggaccgtgatggggccgccgcagggcgccgacgtcgccttcatcggcgccggcgagcaggaggaggaggtggaggtggaggacgcgttcgacgacgtgcagctactggcggccgtgtccagcgccagcgtcggctaccgcgacggcggattccagtcgaagataagctagcctgtcgcctccagcctccaggcttcagctggcttgtcggcattgtaattgtagggtttgactacaaatgccatcgtagctatccatggaagatgatgcctacaatgtttgggacgacgacgacgagtgttttggagggaaaaaaaggaaactaaattgttggggatgcaggcaagggacgatcctcgtcgtccacttatgtcgttgattggaaggtgtgatcgtgcacctagcctaaccacttagttttaaaagttctctctgaactttagaatgtgagtgtctatttttgcttatttatttttaataaaaaaccatcaggtctcttataga

SEQ ID NO: 101423 - DNA, 753 bp, Zea Mays
gcattcaatatagagaatgcacccaggccgaacctatgtgccaggtccgagccaaccgtcccacccaggccggtttcgtccctcccgcacgctccggacagaaccttttcattttcccgcccccgcccctctttctccgtgaacggctcctccgcgaacggctcaacctcttcacataagttgcaatcacaccagacttacagttgcaattatgccaaacagcagttgcaatcattgttttgtttaacagatttttggacatagttatatagaagttgcaatcacaccagaccagcagttgcaattacaccagacacagttgcaatcattgttttgtttaacaaatttttggacatagttatataggagttgcaatcacaccagaccagcagttgcaattacaccagacagcagttgcaatcattgtttgtttaacagatttttggacatagttatatagaagttgcaatcacaccagatcagaagttgcaattacaccagacagcagttgcaattattgtttgtttaacatatttttagacatagttatatagaagttgcaatcacaccagaccagtagttgcaattacaccagaccagcagttgcaatcatattttttaacaaaatttctcagagttattcagtacttgcaatcacataagagcaactcagcagttgcatccacactacaccagcagttgcaattacaacacaccatcggttgcaatcattttgtttacattttttaacag

SEQ ID NO: 101424 - DNA, 1040 bp, Zea Mays
aaacgaaaggactgccctaacctcatgcagtcgtgcccgcttgtttcacttgctcgccttcacccctcgtcgccgccgccgccaccgccgtcgccgtcgcaagcgatgatgctcaacatcaacttgttccgcactgacaagggcgacaacccagaccttattcgcgagtcccagcgtagtcggttcgcctccgtcgagctcgtcgacgaggtcatcgccctcgacaaggcatggcgcgaaaggcagttcgagctggataagatccggcaggagcttaacgctaccagcaagaagatcggcaagctcaaagccagcaagcaagaagaggaagcgaagaagctcatggagagcacagacgaaattaagaaaaggttgacaggcaaagaagttgaggtgtaggaggccaagagcaccctcgacgccaaggtcacgacgattggcaacatcgtgcatgagtccgtgccagtcagcaacgacgagcaaaggtggtgtatgggtcggtcatttactctctggttactccttgccaatggacatgccgtcgcaagtaaatgtaaagagttctgaagaggttgctggaatgtggaagcactccatcaaagtttcttatgaagcaacaaaggcagcatttcctggtggtgaagttatcgcacatcttgatcacaagatgggagagtgtcggatgcttcttcatatactatttcttggtccgtcaaatctgcttgacccaaatgcaagttttgctcaaatgtggcaaaaataattgtctcatcgattgttagcgcgcctgcttccagcaaagtttcagagaaggaaaagatggaatgtaactcaaattttggtggccgcacaagtgtggagacttgaattcatatatacttagttaggctcaatattagtgcaaacagttgataaccaagtttttcaattagtatttagttttggctttagagtacacttatgtatgagttatttgacaatatttatttatgagatattgaatggtacttatctatattatattagttacaatgttatta

SEQ ID NO: 101425 - DNA, 1256 bp, Zea Mays
cacttaggggacttgtcgattttaggaaacgagaaagaaattatttctggttttgcaatgttgagaaagataaaatcaaccttttctcttccaagatcctgtattttacaaccaagttacgaaatagcacaatgcgaacacacccaatactcttaaggcccaacaggcccatgtagccgacgcactggcactgtgcccccgactgctctcactcagtctcagagacgttctcctccgtccgtccgcccccgtgacgcgagcgtcgccagggagccgaaagtaagcctcagttccgccggcgtgcgaggggttcgatctgggttagcctctcacgatgccgccagcccccaagtccggcgacgccctcttcgccagcgtggatcgcgtcgtaagccgttgctcgcggagacctgacgctgacgctagatctggccttggactcgtcgtaatcgctcttctggtgcatcgcttgcagaatgcggagctgttcacgctcacgtacggcgccatagtgcggcagctgctcacggatctggaggaggtcgaggaggtcaacaagcagctcgatcaaatgggttacaacattggaacacgattggtcgatgagttcttagcaaagtcaaatgtatcaaggtgtgttgacttcaaggagactgccgatgttattgcgaagcttggcttcaaaatgttcttgggtgtgactgcaactgtgaccaattgggatgttgagggtacaagttgcagtattgtcctcgaagacaaccctcttgttgattttgttgagctccctgacacttgccaaggccttcagtattgcaatttgttaagcggagttattaggggggcattggaaatggtgtctatgaagacggaggtgacatgggtacgagacatgcttcgcggggatgatgcctatgagatgcgggtgaaacttatcaagcaagtcccggaggaatacccctacaaggatgatgactagttctatctcattggaagatacaggacgcctgtttgcttgtttggattttttcacattgttgtcgttgacggattctagttctgctataacctgatgccatacgaggaaggtgtggattatattttatactcgccgtgtgtattgcttatgtattgtagttgtagaaatcatacatgatcttccatgagttgaggctttgaattatagtctgctgaattcagagcattagctacgcaaactgtgtttcctagaaatgaagtattttctagttgagggt

SEQ ID NO: 101426 - DNA, 1169 bp, Zea Mays
cacttaggggacttgtcgattttaggaaacgagaaagaaattatttctggttttgcaatgttgagaaagataaaatcaaccttttctcttccaagatcctgtattttacaaccaagttacgaaatagcacaatgcgaacacacccaatactcttaaggcccaacaggcccatgtagccgacgcactggcactgtgcccccgactgctctcactcagtctcagagacgttctcctccgtccgtccgcccccgtgacgcgagcgtcgccagggagccgaaagtaagcctcagttccgccggcgtgcgaggggttcgatctgggttagcctctcacgatgccgccagcccccaagtccggcgacgccctcttcgccagcgtggatcgcgtcaatgcggagctgttcacgctcacgtacggcgccatagtgcggcagctgctcacggatctggaggaggtcgaggaggtcaacaagcagctcgatcaaatgggttacaacattggaacacgattggtcgatgagttcttagcaaagtcaaatgtatcaaggtgtgttgacttcaaggagactgccgatgttattgcgaagcttggcttcaaaatgttcttgggtgtgactgcaactgtgaccaattgggatgttgagggtacaagttgcagtattgtcctcgaagacaaccctcttgttgattttgttgagctccctgacacttgccaaggccttcagtattgcaatttgttaagcggagttattaggggggcattggaaatggtgtctatgaagacggaggtgacatgggtacgagacatgcttcgcggggatgatgcctatgagatgcgggtgaaacttatcaagcaagtcccggaggaatacccctacaaggatgatgactagttctatctcattggaagatacaggacgcctgtttgcttgtttggattttttcacattgttgtcgttgacggattctagttctgctataacctgatgccatacgaggaaggtgtggattatattttatactcgccgtgtgtattgcttatgtattgtagttgtagaaatcatacatgatcttccatgagttgaggctttgaattatagtctgctgaattcagagcattagctacgcaaactgtgtttcctagaaatgaagtattttctagttgagggt

SEQ ID NO: 101427 - DNA, 4546 bp, Zea Mays
ccccgcccctcgtgaaggcctccagtccacaccagccttcgtcccgtcctgccccccaccccatcctcgcctccggatctcgctccgccggccgcggccggacgaggcgcctgcgacccggtccgaccctccctccctccctccccctctcccgccgaccgcgcgtctgtcgggactcgggccggcttacttataccgctcgcattgccgggtgcctgctccatttgtccaccccactcgccgcgcgcgcggactccgtgccccgggcgggccactcgcagcttcgagctagctcggagcttctgagcacgaccacgaggaggagaggtacaggctactacagttctgggagatggcggccggcggggtggggcccgcgcagcaccaggcggcgaacggcgcctctggcagcgtcagcaacggtggcgccgccacgccgctgcacggctcggccgccgacggctacgacagcgacggctacagcttcgcgccccccacgccgtcaactttgtccatgtccatacctcctgagcttgctggagctattccgttaattgatcgatttcaggtcgagggctttctcaaagcaatgcaaaagcagattcattcagctggaaaacgtgggtttttttctaaaaagtctgttggaccacaagctcgtgagaagttcactttggaagatatgttgtgctttcaaaaggatcctattccaacttcattactgaagataagcagtgaccttgtaagccgctcaattaaattgttccatgtcatattgaagtacatgggcgtcgattcaccagcaataataactttggatgagagaatagaacttgttgcgaagctctacaagcatacgttgaagcgttctgaacttcgagatgaactctttgcccagatttcaaaacaaacacgtaacaatcctgataggggttggtcaataagagcttgggagcttatgtacctgtgtgcatcatccatgccaccaagcaaagatattggggcatacttgtctgagtatgttcactttgttgcccacggagccacaactgattctgatgttcgagttctagcactgaacacactgaatgcattaaaacgatcagtcaaggcaggtcctagggttacaattcctgcacgggaggaaatagaagctcttttgacaagccgaaagcttacaacaattgtttttttcttggacgaaacttttgaagaaatcacctatgacatggcaacaactgttgctgatgctgttgaggaacttgctagcattatcaaactttcagtgtattctagtttcagcctatttgaatgtcggaaggttgttaacggatcaaagtcttcagaggttggcaatgaggaatacattggattagatgataacaaatatattggtgacttgctatctgaattcagatcagctaaggatcgcaacaaaggagaaattcttcattgcaaacttgtattcaagaaacgtctcttccgcgagtcggatgaggctgtgactgatccaatgtttgttcagctatcatatgtccagttgcaacatgattacattttgggaaactatcctgttggcagggatgatgcttcacaactctctgctctgcaaatcttggttgagattggattcatcgacaatcctgagtcctgcgtcgaatggatatcacttttagagagatttcttcctagacaagtggcgattaccagagcaaagcgagattgggagcttgacatcatttcacgctttcagttaatggaacatttatcaaaagacgatgcacggcaacaatttctcagaatcttaaggactcttccatatgggaactctgttttctttagtgtccgtaagattgatgatccaataggattgctacctggaaaaattattctgggaatcaacaaacgaggggttcactttttccgtccagttcccaaggaatatcttcattctgcagaattaagagacatcatgcaatttggtagcagcaatactgctgttttctttaaaatgcgagttgctggtgtccttcatatctttcaatttgaaacaaagcagggcgaggaaatatgtgtagcacttcaaacacatataaatgacgtcatgctccgcagatattcaaaagcacgctctgctaatagtgtgacatcgcaaaatgatgttaaccatgcatataagccaccaaatattgaaatgtatgagaagcatgtccaagaactgacaaaaacagttgaggaatctcagaagcaagcagatcagttgcgagaagatctacagttgaagacaaaacaagaaacagagatgcaagaagagttggaagggctaaaagacaccttgcaatccgaacgacaaagttccaaagaagtaaaaaatgagcttgataagctaaaatctctatgtgatgagaaagaatctgctttgcaggctgccctgatggaaaaaagtagacttgaaaccagattgacaagtagccagggccgtgagagagatactttgacaactgtaggcagcgtcaatagtgacattgagatgcttaccaagcttaaggaggatttgaaatcataccaaaaagagctcgatgcatcaaaacaggtctcgaagaagctcatgtcagaaaagaatcttcttgaccagaaggttcaaaggcttgaaagaatgaaaaatgaagagaaaagcacaatggaaaaggtttatgcggatgaatgccgtaaactgaaatctcagattgctgaattggagcagaaattggaagatgcaacacaatccttaaatgtggctgaatcaaatcttgctgtaagaaatgctgaagttgatagcttgcaaaatagtctgaaagaccttgatgaactaagagagttcaaagcggatgttgaccgaaagaatcaacaaactgctgagattcttaaaaggcaaggggcacaattggtggaacttgagaatctttataagcaagaacaagttctgcgaaaacgttactataatacaattgaagatatgaaaggaaaaataagagttttttgtcgcttgcgccctctaagcgacaaggaactttcttttgaggagaaaaatatagtttgcagtcctgatgaatttacaattgcacatccatggaaagatgagaagtcgaagcaacatatatatgatcgtgtttttgatgcaaacacaagtcaagaagaaatatttgaggatactaagtacctggtacaatcagctgttgatggatataacgtttgcatatttgcatatggtcaaactggttctggaaagactttcactatttatggttcagataacaatcctggtcttactccaagggccacatctgaactttttagggtgataaagcgcgatgggaacaaatattcattttcattgaagacatatatggtggagctttatcaagataatcttgtggacctattgttgcccagaaatgtgaagccgctaaagttagagataaaaaaagattccaagggtgttgttactgttgaaaatgcgacagttgtgagcatttcgagtattgaggaactgagggctataatttcaagaggctctgagaggaggcacactgccggaactaatatgaatgatgagagttcaaggtctcatttaattctttcagtcattattgaaagtacaaatcttcaaacccaatcatatgcaagaggcaagctaagttttgtggaccttgctggttctgagagggtgaaaaaatctggttccgcaggaaagcaactgaaagaagcacaaagtataaacaaatctctttctgctttggctgatgttattggtgctttatcttctgatggacaacatataccttaccggaaccataagttaacaatgcttatgagtgattctctgggagggaatgcgaagaccttgatgtttgtgaatgtttcaccagcagagtctaacttggaggagacttacaactcgctgatgtatgcttcacgcgttcgatgcattgttaatgatacgagcaagcatgttgctccaaaagaaatcatgagattgaagaagttgatcgcctactggaaggagcaagcaggcaagcggagtgatgaggacgagctagaggaggtaaaggaagagaggatctcaaaagagagagcagacaatcgcctgactggctgacaacttgacacaaccactgaatgctcctggttccgttcttccattacctggagaagaggtgattgatgctgatgagcatttgcaactgccacgagttctgcgatcgctctctaacagaatgttccgatatcatctgacctgtacatacagtagctacgtattatatactatggcagcgatgcccgtttgtacaaagaggaatgtagcacacattgatagaaagggaaaaggttgtgtgactgggaggcttgatgcgccctaagcctataacagctggatcatgtctttttccccccttggagcaggtatttaaagcataatgtgagcgtccttacccaattctttcttatcttgtgtaaaaatcgggtagccttggatgtcaattaaacacgtaaacttcaccttgga

SEQ ID NO: 101428 - DNA, 751 bp, Zea Mays
tggattctgccctctatttaattccaaaatttatcatgacatattcaaacagctgcatacattccctgaaggaaaaatagcccaagaagatcagccgattagaagattgaagtggggaacggccagtcttattgtccgagcacctataactccaatagttttgccaattgttcactctggtttcgaaaaggtcatgccagaaaactcgttctttggacggcgaccaccggtgccactctgcagtaagaagatagacatcattgttggagagccaatagagtttgacttgccaagcttgaagcaagaagcatcaacggtaccccatgactcatcctctgaacggaaggggtggccggccattacaccagatgggctggacgaggccgcccagagatggctttaccagaagatgtcagacaaggtccagtctgtgatggagagactgcggaaaacagttaccaaccttaagcagcgttgatcttcatctatcaggcaataccttgttgaactgctgattaggattctttaaccagcttgagttggtggatacagaaatggacaagtggtcgtcacacaagttcgtcaaagtattggtaataatagaattagagctcagattgtttcattttttagtctttttttagttattgttttgaaaggtttcttcattatttacaatcaactgttcaggttgcctgccagttttactgaggcatgaataaaaaaaggcttttgatattcagttgcaaaa

SEQ ID NO: 101429 - DNA, 817 bp, Zea Mays
agacgaaaaaccgagcccacgcgagaagaaaaaaagtggctaaaaatggaggcgtccgcggaggcggcggccgccgccgccgctgcgcgaacgttgaggtgggctggccgcgcggggcacctgggcggcgtcccgcgcgccgtcgtgttcgccgcggtgggcgcgttcgccaaggcgtgcgcctcgctgctcaacaccaccacggtccacaacgccgacgcgctcctccgcctcgtctcggcgcgggctcccgggacgccgctcctcaccgtcagcaatcacatgtccacgttagatgacccgcttatgtggggattcaagggttttccaacttcggatgcaaagcttggaaggtgggtgctgacagcagaagatatatgcttcaagaatgtagtcatgtcctacatgtttcgacttggtaacatttcatttgaagatatggattgttgccttttgatagaggactacaaggcattttaaggtgtatccagtgaagcatgcaaaataggaaaacgtctagcacaatcctattaaatccagcaaacacctgtctgttccgtacttatgaaatccagtttcacttcaactgccagcaacctttttagaaattcagtttcatggcactcaattcacccaccaagactagcgaattgcagagggttggcatagcttgtcttcttgccataatatcttcagtccctcatttgcagtattgtgtatcagataagattagctgatgcttgctaatctatgtgctgtggtactagtacaagaagcaaatggtatcaaatgtagcgcctcattatattttgttcaa

SEQ ID NO: 101430 - DNA, 1066 bp, Zea Mays
cgtactccctccctccaaccacgcccggccaaacttgccatggcgctaccgtcgtcctcgacccccaccgcgtcggctccggcctccctcggcgagcggtggccgccgctggagtctacccccgcagttttcaaccagttcgtgtggtcgctaggtgtcccggaggacgacgtggagttccacgacgtgtacgggctcgacgccgacgcgttggatatggttccccagcctgtgctcgccgttgttctctgcttccccgatccaccacaggatgcaagttacccttcagaacaactcttaatttctggagaaaaggaaacacaggaccaggtttactttataaaacagatcgaatcattgggaaatgcttgtggaactattgctctactccatgctgttggaaatgcatcttccaaagtcaatttagtggagaattcatgcttggacttgttcttcaaatcaactgctaccatggacccatatgagcgtgctgtgtttctggagaaggatgatacaatggcaagggctcacttacttgctgccaatgatggtgccaccgagctcagtgatcttatagaagagcactacgtttgttttgtgtatgtcaatggaacactttatgagcttgatggaatgaaggatggacctataaagcacggaccctgttctttctataagtttgctgcaggatgttgttcctgttattaaggccatcatgtgcaatatccccaactcaatcaacttcaatcttatggtgctgtcaaggaaagaaaaataatggtggtgctattccttgagctggtaagcggtggaatgcaaaacgcaagggttcaagggaaggggattaaacggatgcctgtttggactgcagctgcgtcactaataagttcagtgaatgcaaacattttttcctgatgtgttcgctatcatatctagtcgagtgcgtgactacattcatctttagtgttcgcaaagcatctgaaaacttgtcttaggctctatttgtttccttccagtattatataatccagcttatacattatataggccccgtttgtttcctttt

SEQ ID NO: 101431 - DNA, 524 bp, Zea Mays
cgtactccctccctccaaccacgcccggccaaacttgccatggcgctaccgtcgtcctcgacccccaccgcgtcggctccggcctccctcggcgagcggtggccgccgctggagtctacccccgcagttttcaaccagttcgtgtggtcgctaggtgtcccggaggacgacgtggagttccacgacgtgtacgggctcgacgccgacgcgttggatatggttccccagcctgtgctcgccgttgttctctgcttccccgatccaccacaggtcaggcaaaggtgaggctactacacctcttgttggagtgctgtttcacgatgggctcggctcaccaagcctcacatttgatcgtgcaatataagtttgttaccctcagatgaagtaaccgtagtgactgctcgtagtgttgagtaatgaccaattagtgcctaaacaatttttaccatgctgcatatgtagcccaactcgtccaaatatacgaatgttgctctcttaatgtgggatgctggatgcacataaaa

SEQ ID NO: 101432 - DNA, 1346 bp, Zea Mays
ataaacgagaacccagccgctgagtagacttgtgttttcgcttccccttccccatcccctctcctcccctcgccggcttgtcggtctcgccgcgccactggccatacatccaagacgctaatccgtgtgggggaaaagcccccctctctctgaaactattcaaatggcgtggggcgtatccccgcggcggcagccgtcgttcccggtgcaggccctctacgagctctgcaagcgctccttcccctccccttccgccgcctcatcgtctcccccgcccgctgatgtcgtccgcagcatctcctcgctcatggatacaatcactcctgcggatgttgggctcagagattataatcttgaggacgacagggggcatggattttttgactccaacctcctcaagggttcaggaaggcttcctcggtgggcgcggcccatcaagtaccttcatatctacagctgtgatgcattctctattggaatattctgcttgccaacttcatcagtcattcctcttcatgatcatccaggaatgactgtactgagcaaaatcctttatggttccatgcatgtgaaatcatatgattggatagagcctactgtcctagcaagtagccagccagcaaggttggccaaattacatacagatgatgttcgtactgctccatgtccaacctccattttgtatccccaaagtggtgggaacctgcactgcttcacttcagtatcttcttgtgctgttcttgatgtccttgccccaccatataacgatgacgctggtcggatttgcacttattttcatgactatccattttcaagtctctcagctggacgcacgaaggtagctggtaacccagataattatgcatggctggaggccataaacactccagtgaatatcaacatgcacactggcatgtataccggtccaactgtacaggaacttcagacatgatgtaaagatgaaccggagcatcaagcagcagctgggtgcctcttcactgatagtagagctctaatatagtgatgtatgttctatactttgaggttagcttttcccctctggccccctttgttggagaaactgttgtacttcagttaagagataagttttcagagtaatttctcctaatcagtttagtagaggtttcaggttcactaacctgagcagtgatcaggcttttagcttatttatttatgttgtgcaacgctggaatggttttgaatgcaaaattgtcactgatgttgccgcattgccgtcttaactcgcgggggctggctgcatgccgatatcggtgtttgaacggaaagaggactcacaacaagaaatgaatgaacgatgttccatt

SEQ ID NO: 101433 - DNA, 1359 bp, Zea Mays
gaactccgtcataaacgagaacccagccgctgagtagacttgtgttttcgcttccccttccccatcccctctcctcccctcgccggcttgtcggtctcgccgcgccactggccatacatccaagacgctaatccgtgtgggggaaaagcccccctctctctgaaactattcaaatggcgtggggcgtatccccgcggcggcagccgtcgttcccggtgcaggccctctacgagctctgcaagcgctccttcccctccccttccgccgcctcatcgtctcccccgcccgctgatgtcgtccgcagcatctcctcgctcatggatacaatcactcctgcggatgttgggctcagagattataatcttgaggacgacagggggcatggattttttgactccaacctcctcaagggttcaggaaggcttcctcggtgggcgcggcccatcaagtaccttcatatctacagctgtgatgcattctctattggaatattctgcttgccaacttcatcagtcattcctcttcatgatcatccaggaatgactgtactgagcaaaatcctttatggttccatgcatgtgaaatcatatgattggatagagcctactgtcctagcaagtagccagccagcaaggttggccaaattacatacagatgatgttcgtactgctccatgtccaacctccattttgtatccccaaagtggtgggaacctgcactgcttcacttcagtatcttcttgtgctgttcttgatgtccttgccccaccatataacgatgacgctggtcggatttgcacttattttcatgactatccattttcaagtctctcagcagctggacgcacgaaggtagctggtaacccagataattatgcatggctggaggccataaacactccagtgaatatcaacatgcacactggcatgtataccggtccaactgtacaggaacttcagacatgatgtaaagatgaaccggagcatcaagcagcagctgggtgcctcttcactgatagtagagctctaatatagtgatgtatgttctatactttgaggttagcttttcccctctggccccctttgttggagaaactgttgtacttcagttaagagataagttttcagagtaatttctcctaatcagtttagtagaggtttcaggttcactaacctgagcagtgatcaggcttttagcttatttatttatgttgtgcaacgctggaatggttttgaatgcaaaattgtcactgatgttgccgcattgccgtcttaactcgcgggggctggctgcatgccgatatcggtgtttgaacggaaagaggactcacaacaagaaatgaatgaacgatgttccatt

SEQ ID NO: 101434 - DNA, 324 bp, Zea Mays
gatcacataacggatactgttggggttatttgtgtagatagctacggaaatgtagcatcaggtgcatctagtggtggtattgccctgaaggtagatggccgggttgggttagcagctatgtttggctctgggtgctgggcttcgtccaaaggaccctttggtacaccattcgtagttgcttgttgtgcaactggagctggagaacacttgattagaggatttgctgccagagaaagttgcatctcatcgtcgttgtcacaatctggtcctgcttctgcgtgcactaaagttctctgctctgtggttcaaagcagcagcaatgtg

SEQ ID NO: 101435 - DNA, 2591 bp, Zea Mays
gatagagaaatgagcttcgctgttcgagaaaacagcagagcccggccgaattcgttgggcagcctgcggagatgcagtagaggccgccaggcgcagatggaatgagcgaccgggctctgctccgccgctagcctgccgccgcaccgcgccgtcgatcgccgcgccatgaacggtccccgcggctaccccctttctccaccggcaccttacccccgtatggcgtgatccaatgatagcaccaagagcgcaccttcccctctccctgacggcgtcgtcctccccgcacggcggcgcgcgcacccgcaccaagaagaggaagaaaccatgtcccccaacctggacagcgccatcaagagccaggtgccggcgctgctcctgaggcgtctcttcggcgcgtcccggcgggacgaggccaagcagctccagcggaccccggcgccggtggggaggcggcgggtgtttgtgcagacggagaccggctgcgtgctcggcatggacctggaccgcggggacaacgcgcacaccgtcaagcgccggctgcagctcgcgctcaacatgcccaccggcgggacctcgctcaccttcggcgatcgcctcctggagaacgacctgtccttcatacgcccggactcgccgctgctgctcacccggaacagcatcaaccggagctgctccaccccgtgcctctgccccgtctccaaggacttcgagcacaaggactgcagcggactggttgagatgctcggctgttccagcagctgtgcccgggtgaagcgcctcgtggacgacgtggtgactgccatcaggagcggcgtggatccggtccccattagcagcggccttggtggctcgtactacttcaggaacgtcttgggcgacagggttgctattgtgaagccgacggacgaggagccctttgcgccaaacaatcccaaggggttcgtcgggagggcgctcggtcagccgggcctcaagagatctgtgcgagtgggagagacggggtttagggaggttgcggcgttcctgttggaccatgacaacttcgccaacgttcctgccacggctctggtgaagataacacactccattttcaacataaactgcccggtaaatggaggaaacctggcaccggctcatgaccagcaacagcaagttaacagcaagattgcttcgttccagcagttcatagcccatgacttcgacgccagcgaccatggcacgtcaagcttccctgtcgctgctgttcataggatcggcatactagatatccggattttcaacactgacaggcacgccggcaatgtgctggtgaggaagcttaacggtggcacaggccgctttggttgccagacagagctgttcccaattgatcatggcatgtgcttgccggagaacttggaggacccttacttcgagtggatccattgggctcaggcttctattccgttctctgaggaagagctcgagtacatcagaaatcttgatccaaggaaagatgtgcagatgctgcgccgggaacttccgatgatacgtgaggcctgcctacatgtactggccctgtgcacaatcttccttaaggaggctgcagctttcggactctgcttggccgagataggcgagatgatgaccagggagttcagagggatggaggaggaaccaagccagctggaggttatgtgtatggaggccaggaagagagtagcagagtgggagcccttctctgccacggctgaacatggagaagataccgatttccagttctcggtggatatgctaggagaatacagtgatgtagtgcgatcaccgaggttcaatggctcaggttccaaggtgtccagtttcagaagccctttgtctaagctcgtcgagagtgtcgacgagggcagtgatggccatgaagatcaaaacgagtctgatcgagtcttgtatgctggatggaatacatccagcgttcctagcaaagctatgggccatagtggcaatgcctcaaaaagtgcaatgaacaggagtgccgatgaacaacttccatcaagtatgtgttttgtcaggctgtcggatatgagtgcagatgagtgggatgtattcctcgaaaaattccaggagctgctgaaagaggcactgcacgagagcgcaagggcagcagtaggtcaaaggatgaagcagcggctgggcacttcatgcaagttttgagcagggcaatagcgcatcagagaagaaaaaaatgcagtgctacttgtactgcttgcttatggagtgagtacaggatgaagatatcatcgtatgtggcaccttcaaccttgtgcaacgatctaggttgcagcagccatgtccagcaggtagataggaccacaagcatatgtagtgacggtgtggagaactgctacgcgtgtttattagctatatgtttacgaaggggaatgcttaataataaatgtttgtcagcctgtgtatattggcttgatgttagatactccagctttagcatgcaatttcttagtcgctgaaaattctttgtagcttgtgatgtgacctgtgagcagtgtaaacgttgcacctttgatggaaaaataatgcttacctgttgttgaata

SEQ ID NO: 101436 - DNA, 3923 bp, Zea Mays
gcgagctcaccacgagtattttgcccagccctactggtcggcctccctgactccctccgccgtgggaaaggaaagcggaggaggaagaggagccaagccgctcgcctcaacacacccccacccaagcaacacgcggaaaaggcgaggcgatggtggtgcggcggctgggcggcgcggggcgcgcgctgctcacgctccccaacatccggaggcgggcgtccaactcctgggccgccgtctgcgacaccttcttctccactaagcaagtgttcgagaaccaccgcatcgtcttcaccgtcggcacctccatcgcctccgtcctcacggcttgggcaggctattcacttcgccacgtgcaacaatcaaggattgaacagaggcttgagtcaattgaatcatctctgaagggtaaccacaaagttgaacatgaagagataaaaaagatcgtcacttccagcaatattagcgcccccagcctgtgtagccacggcaatgaccacaatggttgttgggtccgcggtaggctggcgaggtggtgcttggtacgctcgaaggggcttgagaaaagagcaacaaaagctggtggggatgggtcacatgaagtcgcacgacagatggcactggcggcccttcaacaggctcaggaacagcaggttagcctccaagaacaagcgcgccgacgcccatccaagcaccgaggccccctcgacgtcaagcaacgcggcctctgcggacgttagctgtgcttctcagccggcagcgggcagtgcatgagcttatatatccacaacaatggactaggatgtgactgtgagcttggggccgcgtagtagtccatacgacttggtagaacagacaatgtgagtcagctcgatctgtggtggatcgtttttacatgcgtgaaccagtacagtgtacatacaaatgtacaatcatatgtactttgataaaccattacataagctattcacctttttttttctaatacaactgcgattatttgtactgttaaagccatatatacgagccttagcctatataaagcatggctagaggcgaggtatgtagcacagtataacatctttatgctcacatcttgcatactttgtcatctttacattcgccctgcggaaggacaaagcagtcagtaaaacgaagccaatgaaatgttcgctcgcatgcaaccagtatgattgttacagagcttcagccagatgaagcgagctcatgatcagaactcagaaggacaacttactgcagctcttcgggatgccatgatctcttctagcggaggtcgacctgtcaaagtaggaaaaaagagtgatcaaatttgttcaccccaatgcgcaagatattcaatgcacatttgcattagatttcattgaagttttgatccatgtgcatagttcttagcagctatacctgtaatttgcatacggtattttgcccacaaaccatatactgcatttgccatgctagctacctgcagagtattagaatatgattgtttttttagaacaaattagaaggtgaatgaagaagtaccggtgttagcaagaacataaaacttatgtttgatctcagttggaagacgttctgcttatataaaaagcatgcggctgaatggtgagcctatgaagtgaatggaccagtccaagatgatcatatttttgctctctgcaagtagcgacttacaggctcatacttagtaacagcataaacccatccaagtcctacttcctcgtacagttttctaaatgcctgcaataataacacaataaatattcacatgaaacatacctgatgtttagactaaaaagaaacaaattctgactaggccttttatttgtcttggcatcacactcataccctgttaagtttagcactatgttttggaatgagctcttttgtagcttggtcgaaataactatgttgatagaccatactattctacatcaagttctttagaacagtgtttcgaacgcgtcacctaggcatccaggcatacccagctcgccttgggaatcggtgccttgctgcctgggtgtccgagcggacccagcacttgcctggatgcctagtcgccttttaaacactgcttcaaaacattattcactaaggtttgtaacagtttagtgattctaagctatgcatgcaatgttgtcctgaatcctgtcaagaaaacatcagtacctaaattttgtttggctctagaagagaacaaaattgattttggcttgtacacactcatctatgcattaacatagttgctcattgtcaagtgaacacaagggaaacatatgtgctacaatattatgttaaagaaacatctagccattcattaataacatgtataactcaactggtcatttccttcatttgatgcaaaaatgttcagacagtcagcctagtctaatttaactatccaacagttcatctggcactaagccagtaggcagtagccaatctgcctattgcaaagttaaatcccagacgacttcagcaggacatgatgttaatgttctacctcaacgtctgtgacaacagttccatctgaaagaaccgcatgtatcctccccatggactgaaaagagaaagcaaatttatttactagaaattaaataaacaatgcacatgatcttctagcttcttatatttatctctttggccataatacaaaatgctaactttcagtctggtcccagtaaacaaattacgaataagatgtccttctacattcccccagaaagtgaatggtaggaactgagaaatcaaatagcattgctagcagtggagtaaatggtgatcatacaccaggctattgatgagtttaatatttttagattttttgagaaagcatagaagcatgaatgcagacaaactaggaacacgaaacaagttaggaaccatgaggaagcaattgaagtatcagcataacagtgccagtacaaatgacagtcataaaatattcaaaatcaagtgtttaagcaatgaaaaaaaggtcatcaatttttcagtggaacgtgcttgctaaaattggtagggttaatctacgtgtgtgccactatattaatgaaaagtaacttttataccatagcctttgccttttaggaaacaaaacatgacatgaccaatttcactaatggggaaccataaaccggcgagaaaaaactgaaataaattgaagtaatacgcacagtttcataatcaaggccctgattgtcatctggagagtaatctttcgagcttatgtcaacaaactttattgctccataggatttgtttctttctcttagcatgtttacctgcacaaacattaaagtacatgaaaatttagctgcagtggtatcagtatgatggccacctattgtttcaaccataaacaacattatcagttaagaaaatccatccagatttgaataagtataagtcaaatggcatgtgcctttcatgagatagtgctgcatattgagctctaacatgctctagcagtagtgatagggtcctaaaatatatagtaaaagctcatggtggagaactccatggtctgcactgagtgccactgaaagaatggggatggcatcaaaatgaactagccatctagttttgtaaaagttaagtggcatgtatacaattaatccttccgatatcccagctgaactgctgaagttcattgatataaatgataaagtatagagctggtgaagaattaatggggaaagttaatccagaagtatctgccaaggtatacaaactgaaagctgaagcattttcagaacataaatatcacatgaattcaacaagaatttatctacagcatgcgatggttaataatccaggcaataatctgtactctctcgcgaaagggcctctagctgagttggttaggtggtctgagtagcactcctcaggtcctgggttcg

SEQ ID NO: 101437 - DNA, 835 bp, Zea Mays
cgcggaaaaggcgaggcgatggtggtgcggcggctgggcggcgcggggcgcgcgctgctcacgctccccaacatccggaggcgggcgtccaactcctgggccgccgtctgcgacaccttcttctccactaagcaagtgttcgagaaccaccgcatcgtcttcaccgtcggcacctccatcgcctccgtcctcacggcttgggcaggctattcacttcgccacgtgcaacaatcaaggattgaacagaggcttgagtcaattgaatcatctctgaagggtaaccacaaagttgaacatgaagagataaaaaagatcgtcacttccagcaatattagcgcccccagcctgtgtagccacggcaatgaccacaatggttgttgggtccgcggtaggctggcgaggtggtgcttggtacgctcgaaggggcttgagaaaagagcaacaaaagctggtggggatgggtcacatgaagtcgcacgacagatggcactggcggcccttcaacaggctcaggaacagcaggttagcctccaagaacaagcgcgccgacgcccatccaagcaccgaggccccctcgacgtcaagcaacgcggcctctgcggacgttagctgtgcttctcagccggcagcgggcagtgcatgagcttatatatccacaacaatggactaggatgtgactgtgagcttggggccgcgtagtagtccatacgacttggtagaacagacaatgtgagtcagctcgatctgtggtggatcgtttttacatgcgtgaaccagtacagtgtacatacaaatgtacaatcatatgtactttgataaaccattacataagcta

SEQ ID NO: 101438 - DNA, 876 bp, Zea Mays
cgcggaaaaggcgaggcgatggtggtgcggcggctgggcggcgcggggcgcgcgctgctcacgctccccaacatccggaggcgggcgtccaactcctgggccgccgtctgcgacaccttcttctccactaagcaagtgttcgagaaccaccgcatcgtcttcaccgtcggcacctccatcgcctccgtcctcacggcttgggcaggctattcacttcgccacgtgcaacaatcaaggattgaacagaggcttgagtcaattgaatcatctctgaagggtaaccacaaagttgaacatgaagagataaaaaagatcgtcacttccagcaatattagcgcccccagcctgtgtagccacggcaatgaccacaatggttgttgggcattgccattggagctccatccatctggtgacattgttacgtccgcggtaggctggcgaggtggtgcttggtacgctcgaaggggcttgagaaaagagcaacaaaagctggtggggatgggtcacatgaagtcgcacgacagatggcactggcggcccttcaacaggctcaggaacagcaggttagcctccaagaacaagcgcgccgacgcccatccaagcaccgaggccccctcgacgtcaagcaacgcggcctctgcggacgttagctgtgcttctcagccggcagcgggcagtgcatgagcttatatatccacaacaatggactaggatgtgactgtgagcttggggccgcgtagtagtccatacgacttggtagaacagacaatgtgagtcagctcgatctgtggtggatcgtttttacatgcgtgaaccagtacagtgtacatacaaatgtacaatcatatgtactttgataaaccattacataagcta

SEQ ID NO: 101439 - DNA, 1116 bp, Zea Mays
ggggaaggtgggtgggaagaggctgcccaaagctaccccagccgcgtctccccaccaccaccaccagcccttcttctacccccaaccctcccccaacaccacaccagcgcagcgccctctcctacccgactcccagctagcccctcacgcgctcgtcggcgccctgtcgagtcgagcccgcatctcgcccgatcgagagcgagcgcatccgcgcgccggggagagctttgctttcggtggtctgtaacgactcaacgacgacggcaggcggtagataaaggcgcgcgatgtgcgacgcggcgccgaggtacaggggcgtgcggaagcggccgtggggccggttcgcggcggagatccgggacccggcgaagcgcgcgcgcgtctggctcggcaccttcgactcggccgaggccgcggcgcgcgcctacgacgtggccgcgcgggccctgcgcggcccgctcgccaggaccaacttccccgcgctcaccaccacctcccgccgccccgcgcccacgtgcagctccggctccaccgtcgagtcctccagcgggccccgcgccggggaccccagggccagggcggcgcatcgcggccgtgctgctgcgaagccgcggcggcccccacggcaggcgccgccgccgcccaccgacgccgactgccacagcgactgcgcgtcgtcggcctccgtcgtggacgacggcgacgacgcgtccacggtccggtcgcgcgcgcgcccgtcgctcgatctcaacctcccggcgccgctcgacttggacggtggccacgacctcgggttctgcacggacctgcggctctgtctctgagcgatcggaatcggatccacggacgaggcggattctgctttgacttgtcgtgagcttgtagcagtagtgccatgtactacgcgatacgaatggcaatagaattggatgatggttccttttctttaacgctctccggattcattcagaggtcagtcatctcgtcgagagtttcagcctttttttctcatgtctggatctgatttgtatcttgctgtcattctgtatgtactttgtacaccagaaaacatctaaaagagagatgttggcgaactaacacgaatctctaccgcaa

SEQ ID NO: 101440 - DNA, 551 bp, Zea Mays
cgtctccgtcgcttctccttcgccgctgctgatacgcggaccgaggacccaatcgctgctgctgctgatgaacaaggaagaaaaacaggaacattcactgaagaggacaaaattggatttgggagaacacacatccaaatctccattgcagtcgtccaggtccttgcgcgcgcaggcgaacttgtccacccacagcagcccaccggggcggagcacgcggtcccagtcgaagagcacgaagttgaaagggaaatgtgcccttgggccatttctaagtattttggtgattaagtgccaacacaagtgcttaaatgtgaatcaatgcccatagatgaacaaagtgcaaatcttcaacaaaggtatgtttctaagtcttagtatatgggttttgtgtactaatatatttatctaagtgtaagaaacagaaagaagaagaaaagaaaggaagtggagagtggctgtgtgcagccaaaggctgtttcgggctggggcaccggactgtccggtgtgcaccggacagtgtccggtgcgccagaccagcgtggagcaaa

SEQ ID NO: 101441 - DNA, 1029 bp, Zea Mays
cttagtagttgttgattgagggagataggtcaatatagatattagatacaagcatgcctgatatctgatgtttagcctaacaatatatttgataaagagaaaaaaggagtcaaccagtgaaccaaattttgtacatgtagttatgtacaaaatccgccatacctcaaattttgtgtgtaggtgcttttactcctgtgcataggcgcttttactcctgtgcgtaggaattgcttcgagtcaacatcagctggtacaaggagagttcttttttttgctcttggcagatggttttgtcatgccatcgtggtttgttgtccacgagcttcccatgagcgctggtgagttcaccccatgccgtcagtaatgaagtagcccaacgcggcactggaattttgatctaacttcaatttcgaacgagtagagtttgccgcaagatgagactggggttctcaaggctatgcaagatgtgcacgccatgatacagggaagtagccgatggtatctatccaccctgataacatatttgtttgtggattcagtcaaagaggtgctctgacattagctagtgttttgctttatccgaagaagttaggtggaggagcagtgttcagcaggtgggtgcctttcggttcatcagtgagaggatttcacctgaagcgaggaagacccatttctttggtcgcatcgatggaatggctgacaaagtagtcttgtttgaagccggtcaagctggtccaccatttttttttgcagagtacgggtgttaactgtgattcaaggcatatttcccttttatcttgagtcatggatcaagagtcgtctaaatgcctctcaagagaaggccgctgcagaaggtgcgtgtacttcatcgggctgtgctggagcgcacctgccaagctgtggtggccactgatgagttccggcgagagcgaaggcccgatggccatactgacatcttcttgcggtggaatcgagtcgtcatcaggttgacagatggactgcacgacatctgagctcccacactctttc

SEQ ID NO: 101442 - DNA, 2509 bp, Zea Mays
tcgccgccgcccatcgcaccctgccttagacgcccatgctcgccatggccggctggccgcattcctcagggcctcggcctccgcggtggccgaagcgggcggcgacccggccgttctccacgcggtcctcatcaagaccgcatcgtcctctcgcaccgcctacaacctcctcttctcccgctaccatccatccctctcgctgcacctcctctcccgcctcccgttccacttccgccccactgccgcctcactcacctcctcgctctcttccctctccgcttcctccccggcctccgtgctcccgctcctccgccgcgtcctcggcatgtcgcctgctctcctcgccgacggcccgctctcctcactcctccgctccatgccgccgtccattgcaccccacgtgcacgccctcgccttcaagctcgccctatcgtcgtccccctactccgcctcttgccttattaccctcacccgcatccgcccgctcacccgcatccgcccgctcacccgcatccgcccgccacctgttcgatgaaatccctgttgcaaaccgggaccccgtttgctactcctctacgattgttgggcttgcacagaacgggtggtacgaagaatctctcagtgtcttcgctggcatgcgtgtaaatgctgttgattctaccatgtatgcactctccggtgctctccgggctgctgcagggcttgctgtgctggagcagacttgtgggattcacgcgcatgcggtggtggttgggcttgatgggaatgtgtgtgttgggactgccctggtggatgcttatggtaaggctggaggtgtggatgatgcagccagggtttttaaggggttgggtgctgaccggaacctgattacatggaacacggtgctgtctgctcatgctcagcagggagatgtgcaagcggtcattggactgtttaaccagatgatggagctgggttttgctcctgatgggctaacattccttgctgttctcacggcatgtagtaatgccggagcagccactgaagctgagttttggttggaaacaatgcagtcaaagtacagtgtgaagcctggccttgagcattatacttgcgtggtgggtgcaatggcacggatggggcgtctagaggatgcagagagtgttgcttgtacaatgccatgcaaaccggatgcagcagtgtggcggacgcttctaatgggctgtgtggttcaccgcaaggttgacctggcagaatccatgggacagaggcttctggagattaatcccaaggatgactcggcttatgtcctgcttgccaacgtctactcagctgctgggaaaaagaacgaggaggctgaggcatggactgcaatgagggaccatggagtcaggaaggaaggtggcaggagttggattgaggttagagggctggtacatgtgttcgttgcaaacgaaagaagacatgaacagctgctagaaatatatgacaaactgactgaattgattctagaggtagagaagttagggtacaaggagacagatgaggggtttgggcatcatagtgaaagattggcccttgcatatgggttgatcagtggtgctgcaccatcaggaaaggtgttgagaatagttaagaatttgagaatatgtgctcattgccatgaattcttcaagtatgctagcatggtgatcgacagagtaattgtagtacgggatgtcaataggtaccacacaattaagaaaggtgattgcagctgcagagactgctggtgaaacacatatatcctgagggtaaactatgatgcaagaagcattattacgattttcggatactccacgagataattggcttcataaaaaactcaccgcaggattgattggaaacttgcttggagttgttgccatagggtttacactcttctaagcaagtgaaagcttctttggtttgtacaaaacaagaaggttgaagatcggactgacccacattttcccactgtccaaggcatagtatttctgggcttgaaggttgaggcattgatacagtttatactccaacagggtgcatcaaaaaatttgaatctcatgtagtgggataaactctggacaatcaacaagaagataattgatccagtgtgcgcaaggcatacttctgtgctaaaagaccagtgtgtcatctttactcttcaaaatggtccaggccatttattcgaataatcgaattttaccaagacataagaaattttagggtgctggaaagaaggctacaacctttgccaacagaattttggctcgattttgctgatgtggtagctactaccgagggtgaggaagtaacctttatggattgggggaatgctactgttaaagagatcaaggtggagtgtggagtaattactgaactagttggagaactaaatcttgagggatctgtgaaaacaacaaaactgaagatcacatggctagcagatatagaggagctagttcccctttcattggtggaatttgattatctcatcagcaagaaaaag

SEQ ID NO: 101443 - DNA, 1147 bp, Zea Mays
atggaggaggagcgcccgcccgccgcggggtccggggccgggaccgggagggtgcgccgcggcggcttcgtggtgtggctgcacggactgggcgactgcggccgcgccaacgagttcatcgccgaccatttctccgcggccgccttgagcgacgcccgctgggccttccccaccgcgcccaccgcccccgtcacgtgcaaccgtggcatgcgcatgccttcgtggttcgacatccacgacgcgcccattacttcaagatccgtgaggggtgaggaggatgtgctgagagctgtccagatcgtgcacaccatgatcgacagggaaatcgcgtccgggacaggcccggaggacgtgttcgtgtttgggctcagccaaggaggtgccctgagcatagcaagcgtgctgctctaccctaagactctgggcggctgcgcagtcttcagtggcttcctccccttcgactcctcctcctcctcctccttcgctgccagagtgacagacgaagcaaagaagacgccagttctgtggatccacgggggcgccgactcgctgatcccggtccaggaaggctggaagggcgagacggggtcaagttcctgcggggactcggcatggcatgcgagttcaaggaatacgacaggctcggccacactctggcgccgtacgaactggagcactgcgagcggtgggcgtcggagaccgttctgggagtgggagaggacgaacacggacgaagacaaggcccggggaagaagaagaagaagggtggccgtccggggacggggacggggacggggagcaagagcaagtcgttgttctgcggggtcttcaatctcttctccagatagccgccgccgccgccgcttgttcttgttcctactgctctgacaaaccttcttgtgatttctttatttgccttttgttagaagttcttattttcatgtgtaaattttgtaccatttccgtgggttagaaaccacgtttttccaaactcagtcctatggcttactgagaactttcgtgatcttgaatggctgatcagaggagggtagcctgatagaaccaatgtcctatggtgtcaaactgttgttatgtagactacacatccaaattaaataaaggaaaatgaagaacagtttccttctgc

SEQ ID NO: 101444 - DNA, 1726 bp, Zea Mays
ataaaaccccaccacaagggcgcagattccacacggttcctctctgaccactcctctcctctcctctcctctcctctcgccggcgcatcgcccgactgtcagtcagcctcagccatggccgcggaggaggagcagggcttccgcccgctggacgaggcgtccctgctcgcctacatcaaggccacgccggcgctcgcctcccgcctcggcggcggtggcagtctagactccatcgagatcaaggaggtcggcgacggcaacctcaacttcgtctacatcgtgcagtccgaggccggcgccatcgtcgtcaagcaggcgctcccgtacgtgcgctgcgtgggggactcgtggcccatgacgcgggagcgcgcctacttcgaggcctccacgctgcgggagcacggccgcctgtgcccggagcacacccccgaggtgtaccacttcgaccggaccttgtcgctgatggggatgcgctacatcgagcccccgcacatcatcctccggaagggcctcgtcgccggtgtcgagtacccgctgctcgccgaccacatgtccgattacatggccaagacgctcttcttcacctccctcctctataacaataccacggatcataagaacggagttgctaagtactctgcgaacgtggagatgtgtaggctcacggagcaagttgtgttctcggacccataccgtgtttccaaatttaatcggtggacctcgccttatctcgacaaagatgctgaggcagttcgcgaggatgatgagctcaagttggaagtagctgggctgaaatcgatgtttatcgagagagctcaagctctgattcatggagatctccacactggttctatcatggtgaccgaaggttcaactcaagtcattgatccagaatttgggttctatgggccaatgggttttgatattggagccttccttggaaacctgattttggcatactatgcacagaatgggcatgctgatcaagcgaatgatcgtaaggcttacaagaaatggatcttgaagacaattgaagagtcgtggaatttgttccagaaaaagtttgttgaactatggaataaacacaaagaaagcaatggggaggcatacctgcctgatatatacaacaagccaaagcttttgagcgttgttcagaagaagtacatgacaaacctatttcatgatagccttgggtttggttcagccaaaatgatcaggagaatagtcggaatcgctcacgtagaggatctcgagtcaatcaaggatgccagcaagagagcagagtgcgagcgtgctgccctcaactgtgcgaagacgatcctcaagggaagacaccagtttgagacgatcgagcaagtcgtcgagcatattcagtcattcgatcaggactgagaagacgacagtctatttgtgcgctgaagcctgaaggagccatactctcgtcaattaacccacgcatgcccgagtatcgatgaatcgtctgttttgtagtgatgaagcgcccggttgtttgtgatctctgtattggttgctaggtgagaaaagtatgtggtctcctggcttgaactgtgtgtacactattattccgggccggcatagcgagcagctgaataatgaaatgtacgggtcctcagtgaccatctcagtgcatataaacacgtgtgttaccaataaattttgttatggtgctggtggttctatggcaagtactgcatcgtgctgttgt

SEQ ID NO: 101445 - DNA, 1267 bp, Zea Mays
ataaaaccccaccacaagggcgcagattccacacggttcctctctgaccactcctctcctctcctctcctctcctctcgccggcgcatcgcccgactgtcagtcagcctcagccatggccgcggaggaggagcagggcttccgcccgctggacgaggcgtccctgctcgcctacatcaaggccacgccggcgctcgcctcccgcctcggcggcggtggcagtctagactccatcgagatcaaggaggtcggcgacggcaacctcaacttcgtctacatcgtgcagtccgaggccggcgccatcgtcgtcaagcaggcgctcccgtacgtgcgctgcgtgggggactcgtggcccatgacgcgggagcgcgcctacttcgaggcctccacgctgcgggagcacggccgcctgtgcccggagcacacccccgaggtgtaccacttcgaccggaccttgtcgctgatggggatgcgctacatcgagcccccgcacatcatcctccggaagggcctcgtcgccggtgtcgagtacccgctgctcgccgaccacatgtccgattacatggccaagacgctcttcttcacctccctcctctataacaataccacggatcataagaacggagttgctaagtactctgcgaacgtggagatgtgtaggctcacggagcaagttgtgttctcggacccataccgtgtttccaaatttaatcggtggacctcgccttatctcgacaaagatgctgaggcagttcgcgaggatgatgagctcaagttggaagtagctgggctgaaatcgatgtttatcgagagagctcaagctctgattcatggagatctccacactggttctatcatggtgaccgaaggttcaactcaagtcattgatccagaatttgggttctatgggccaatgggttttgatattggagccttccttggaaacctgattttggcatactatgcacagaatgggcatgctgatcaagcgaatgatcgtaaggcttacaagaaatggatcttgaagacaattgaagagtcgtggaatttgttccagaaaaagtttgttgaactatggaataaacacaaagaaagcaatggggaggcatacctgcctgatatatacaacaagccaaagcttttgagcgttgttcagaagaagtacatgacaaacctatttcatgatagccttgggtttggttcagccaaaatgatcaggtaactgactaactgcagatcagatttgtgaatgatgtgttttttcctta

SEQ ID NO: 101446 - DNA, 988 bp, Zea Mays
aagaactctacataaaaccccaccacaagggcgcagattccacacggttcctctctgaccactcctctcctctcctctcctctcctctcgccggcgcatcgcccgactgtcagtcagcctcagccatggccgcggaggaggagcagggcttccgcccgctggacgaggcgtccctgctcgcctacatcaaggccacgccggcgctcgcctcccgcctcggcggcggtggcagtctagactccatcgagatcaaggaggtcggcgacggcaacctcaacttcgtctacatcgtgcagtccgaggccggcgccatcgtcgtcaagcaggcgctcccgtacgtgcgctgcgtgggggactcgtggcccatgacgcgggagcgcgcctacttcgaggcctccacgctgcgggagcacggccgcctgtgcccggagcacacccccgaggtgtaccacttcgaccggaccttgtcgctgatggggatgcgctacatcgagcccccgcacatcatcctccggaagggcctcgtcgccggtgtcgagtacccgctgctcgccgaccacatgtccgattacatggccaagacgctcttcttcacctccctcctctataacaataccacggatcataagaacggaggtgagctgcttcactgctgtttgaattgcttgtcgacttggcaattggctcccagtcgctggtacgtgggcacgtggccatgcctgtaaaggggagatgcgcactaactggacgggatttgcaatggtgtgtgctgttgttgcagttgctaagtactctgcgaacgtggagatgtgtaggctcacggagcaagttgtgttctcggacccataccgtgtttccaaatttaatcggtggacctcgccttatctcgacaaagatgctgaggcagttcgcgaggatgatgagctcaagttggaagtagctgggctgaaatcgatgtaattacctcactgaattgaaattagtggcc

SEQ ID NO: 101447 - DNA, 105 bp, Zea Mays
aatttcgagattttgttggttcttctaactgcaacagtttattcatatggtcattcaaaacactgttttgcactgttttttaactgtaaactgaactatccgcat

SEQ ID NO: 101448 - DNA, 3111 bp, Zea Mays
gccgaacccctggacaccccacaccaaaagaaaccaactaaaatcccaaaagagaggaaaggcacaaacagacggtacaaagaaagggacgctcgtctcgtctcgtcacgtgccgccgccatggctgctctgggccgtggcctgcccctcctcctcctgctcctcctcctcgccgtatcgggggccgccaacgccgcggcggcgcccggcggcatgtccatcatcacctacaacgaggagcacggcgcgcgggggctggagcggacggagccggaggtgcgggccatgtacgacctctggctcgcggagcacggccgcgcctacaacgcgctgggcgagggcgagggcgagcgcgaccgccgcttcctcgtcttctgggacaacctccgcttcgtcgacgcgcacaacgagcgcgccggcgcccgcggcttccgcctcgggatgaaccagttcgccgacctcaccaacgacgagttccgcgccgcgtacctcggcgccatggtccccgccgcccgccggggagccgtcgtgggggagaggtaccgccacgacggcgccgccgaggagctgccggagagcgtcgactggagggagaagggcgccgtcgcgcccgtcaagaaccaggggcaatgcggaagttgctgggctttctctgcagtaagctcagtggaaagcgttaaccagatcgtcaccggtgagatggtgacactgtctgaacaggagctcgtagagtgctcgactgacggagggaacagcggctgcaacggcgggctcatggacgccgctttcgatttcatcataaagaacgggggcatcgataccgaagatgactacccttacagagccgtggacgggaagtgcgacatgaacaggaaaaatgccagggttgtgagcatcgatggctttgaagacgtgcctgagaacgacgagaagtcgctgcagaaggcggttgctcaccagccagttagcgttgccattgaggccggaggccgggagttccagctctacaaatcgggtgtcttcagcggaagctgcaccacgaaccttgaccatggtgtcgtcgcggtcggctacggcgccgagaacgggaaggactactggatcgtccgcaactcgtggggcccgaagtggggcgaggctggttacatccgtatggagaggaacgtcaacgccagcactgggaagtgcgggatcgcgatgatggcgtcctacccgacgaagaagggcgcgaaccctcccaggccgtctccaaccccgccaacaccgccggctgcccctgacaatgtctgcgacgagaacttctcgtgctccgcgggcagcacctgctgctgcgcgtttggcttcaggaacgtctgcttggtctggggctgctgcccggtcgagggcgccacctgctgcaaggatcacgccagctgctgcccgccgggctaccctgtctgcaacgtcagagctggaacttgctcggtgagcaagaacagcccactgagcgtcaaggccttgaagcgcactctcgccaagctgagcaccgcatgaggacctcgatctgggactgcccattgctttttctgactcatgggcgttcagatcaccaagagcaagatttcatagattatctatatgtttgtataagtactattaccgtcccatgaatccgctgtaaataactagtacctctgattaaaaggataatattatttgtcacccagtgtcatgaatgcagcagtggaacttattcctcccccccaaaaaggctaccaaatcaccatggccatggatcagttcccacccccatggccttggtgaggatggccgtgcgccgtgtacccaggcaactcgcaggggatgtgcgggatgaaggggcagtgcttgctggggtcgacgtagaaggcggcgcactcgagcgggggccgctggtcggggaaccccagaatgcagttgcgccgcacgtccaggacacggctgcgcaccagctccatgcagtggtgccccaccgagtggaagaagttgtccgacagcgacaggttctgcagcttccccgtccgcgccagcaggcacaccacgtcgggcacctgcccgtacagctggttccccgccaggttgagctcctccacgtcgcggaggcagccgaacgacagcggcacgggccccgtgatctcgttcccgccggcgtcgaacacggccagcccctccaccagcccgatctcgtaggggaggcacccggacaggcggttgttgaggaacagcacctccgacagcgtggccgacgcgttgtagatggagcgcgggatggggcccgtgaactggttgttggccaccaccaggtactgcgcgcccgtgctgccgagcgtgtccgggatccgcccgccaaagccgttgttgttgaggaagagcgcctccaccgtgagcgcgaacaccggcgctggcacctcccccgcgtaccggttgaagcggaggtccaggaacagcagcccgcccagcggcaccacggcctccgggaacgcgcccgagaagttgttgttggacaggtccagctcgtagaagtagcgcagctgggtcaggtccggcacgtcgccggagaagttgttggagttggcgtggaacagcgccaggtccgggaacgcgtcgatgaacccggccagcgacggcgcgcacagcccgaacccgttgaagtcgatggacgccaccgtcagcacgcccggcgcgtccggcgggtagtcgcagtagaatcccctgtagtacgtggtggtgctgccgttgttgaagaagctgtcgcagagctccgtgcccgtccacgtcgccgtcacgcccagcgggtcgcacgtgatcgtctgcttgaacgcctggatcaccgggtacagcgccctcagcttgtcgttcctgaacctccacggcggcggcggcgacggctcgcacccgcaaccctccagcgccgccgtgctgttcgtcccgcggtggtcccaggacggcgacggcgctggcgcgacgaactcgacgtggctcgagccgcagagcgcgccgtgcgccgcggcgagcaccagcacagctactgccgccgctgccgcccccgccattattcgtctcgggctcggagcagtagtgccagtggagatt

SEQ ID NO: 101449 - DNA, 952 bp, Zea Mays
cgagcggcacgagtacaagcagcaggcgcgtctcagcctggaaaaaaggcccattaaaaggcccacttcaacgtggtggatatgcatatataactgcgaagtaaccctaaccgtcaatagcctccgcctctccttccagtgtccgccgtcgtgcgctcgctacccctctccctcgaggcctttgccggcgaagagcgcccagtcgcccaccaggatgaagtttgttgctgcctacctgcttgctgtcctcgctgggaactccagcccctctgccgaggacttgacagccattctggagtcagttggctgtgaagttgacaatgaaaagatggaactccttctgtcccaactgagcggtaaggacattaccgagctcattgctgctggcagggagaagtttgcttcagtcccatgtggcggtggcggtgtggctgttgtggcagctgcccctgctgctggcggcgctcctgcagctgaggcgaagaaagaagagaaggtggaggagaaggaagaaagtgatgacgacatgggcttcagcctcttcgactaagcctgtgcaatagtcaagagtattgtttttgagtcgcggaagcagagggaagaaaaatcgtagtcatgtttggactttaactttgttttatgttggaaagtacttgaaagacttttcctgtggtaattctaggcgtaggttgctgtgctggttggggtttactggtgaaccagagtttttctatctcccactatgaatttgttacctcaagttacctggatgttcactattttgttggtacatgtcgattttgcctcgtgcatccgtgtacactgagtgagtatgcgcatgtgctacctgctgtcggtgttcgtgttcttggcatggatgtttgcatcgatgaaagtaaagagctgttgggagttgatgattcagatggcgttggctgccggctgaaatttt

SEQ ID NO: 101450 - DNA, 1836 bp, Zea Mays
gaaaattggtccactttggcagaggttcgaggcgccgcgaggaaatggagcagacgatgccggatgtgcgtccaccacctccggtcacccagatctgaccggcgtcggccatgaagcggctccccatcctggtcgtccccgtcctcctcctcctactctccatctccttcttcctcttccggcctaccaccccgcctgtcctcagttcgcggcaagccttcgaacccgaccgccgtctcagggtctacgtcgcggacctcccccgcgcgttcaactacggcctgctcgaccgctactggtccctccgcgcagcggactcccgcatccaggcctcgtccgaccctgaccacccgcccccgcacgaccacccgccataccccgagaaccccctcatcaagcagtacagcgccgagtactggctcctcgcctccctccgcgccgcggcgacggcgccggccgccgtgagggtcgtcgcggactggagggaagccgatgtcgtctttgttcccttcttcgcgacgctgtctgcggagatggagctcgggtggggaaccaagggcgccttccgcaagaaggacggcaacgaagactaccggcggcagcgggaggttgtcgaccgcgtcacctcccaccccgcgtggcggaggtccagcggccgggatcacatcttcgtcctgacaggttatgttaaatactgaagcattctttgacagaccctgtggctatgtggcatgtccgtgctgagattgctcctgcaatccttttggtggttgattttggaggatggtataaagttgattcaaagtcttcaagcaaaaactcgtctcgggtgatacagcacactcaagtgtcattgcttaaggatgttattgtgccttacacgcatttgcttccgacactgctcttatcagagaataaagatcgtcgcacacttctctacttcaagggggcgaagcataggcatcggggtggtttagtacgagagaaattatgggatttgctgggtaatgagcctgacgttatcatggaagaaggcttcccgaatgccaccggacgtgaacaatcaataaaagggttgcggacatcggaattttgcttgcacccagccggtgacaccccaacctcatgtcgcctctttgatgctattgccagtctgtgcataccagtcatcgttagtgatgaggttgagctccctttcgaagggataatagactacacagaaatctccattttcgtgtcagttagtaacgctatgagaccgaaatggctaacaagctacttgaggaatatttccaagcagcagaaggacgagtttcgaagaaacctggctcgtgtccaacctatctttgagtatgacaccagctactccagcagcagaggctctacctccattgatggtgctgtgagtcacatatggaagaagattcagcagaaactgccaatgattcaggaggcaatcatcagggacaagcggaagcctgatggcgtgtcaatcccgctccggtgtcattgtacatgaacttaccatagctgctgcggaacgctggtaccaccatggcaccatgggaatggcttataatgagcaattactccaagctaattcctttcttgttttttgttggtagttgcaaatatgatcatgtaaaggaatggcttatgtttttaacccaatttttgtaaacccctttagtagtggttttgcacgttgttgtgtcattggagtggatttgcatgttgggcaatgatgatttatttgcttgttcggcaatgatgattcatacgggaaaaaacccacttggattgaaaagactggaatataatttgtttctttacatc

SEQ ID NO: 101451 - DNA, 1811 bp, Zea Mays
ggaaaaagaaaattggtccactttggcagaggttcgaggcgccgcgaggaaatggagcagacgatgccggatgtgcgtccaccacctccggtcacccagatctgaccggcgtcggccatgaagcggctccccatcctggtcgtccccgtcctcctcctcctactctccatctccttcttcctcttccggcctaccaccccgcctgtcctcagttcgcggcaagccttcgaacccgaccgccgtctcagggtctacgtcgcggacctcccccgcgcgttcaactacggcctgctcgaccgctactggtccctccgcgcagcggactcccgcatccaggcctcgtccgaccctgaccacccgcccccgcacgaccacccgccataccccgagaaccccctcatcaagcagtacagcgccgagtactggctcctcgcctccctccgcgccgcggcgacggcgccggccgccgtgagggtcgtcgcggactggagggaagccgatgtcgtctttgttcccttcttcgcgacgctgtctgcggagatggagctcgggtggggaaccaagggcgccttccgcaagaaggacggcaacgaagactaccggcggcagcgggaggttgtcgaccgcgtcacctcccaccccgcgtggcggaggtccagcggccgggatcacatcttcgtcctgacagaccctgtggctatgtggcatgtccgtgctgagattgctcctgcaatccttttggtggttgattttggaggatggtataaagttgattcaaagtcttcaagcaaaaactcgtctcgggtgatacagcacactcaagtgtcattgcttaaggatgttattgtgccttacacgcatttgcttccgacactgctcttatcagagaataaagatcgtcgcacacttctctacttcaagggggcgaagcataggcatcggggtggtttagtacgagagaaattatgggatttgctgggtaatgagcctgacgttatcatggaagaaggcttcccgaatgccaccggacgtgaacaatcaataaaagggttgcggacatcggaattttgcttgcacccagccggtgacaccccaacctcatgtcgcctctttgatgctattgccagtctgtgcataccagtcatcgttagtgatgaggttgagctccctttcgaagggataatagactacacagaaatctccattttcgtgtcagttagtaacgctatgagaccgaaatggctaacaagctacttgaggaatatttccaagcagcagaaggacgagtttcgaagaaacctggctcgtgtccaacctatctttgagtatgacaccagctactccagcagcagaggctctacctccattgatggtgctgtgagtcacatatggaagaagattcagcagaaactgccaatgattcaggaggcaatcatcagggacaagcggaagcctgatggcgtgtcaatcccgctccggtgtcattgtacatgaacttaccatagctgctgcggaacgctggtaccaccatggcaccatgggaatggcttataatgagcaattactccaagctaattcctttcttgttttttgttggtagttgcaaatatgatcatgtaaaggaatggcttatgtttttaacccaatttttgtaaacccctttagtagtggttttgcacgttgttgtgtcattggagtggatttgcatgttgggcaatgatgatttatttgcttgttcggcaatgatgattcatacgggaaaaaacccacttggattgaaaagactggaatataatttgtttctttacatc

SEQ ID NO: 101452 - DNA, 114 bp, Zea Mays
gcttgtagttgtgtttatatttgtaaatttcagtttcgccctattcaccctccctctaggcgactatcagaatggaatttcagggaaattctgcaacaaaaggtggctgatttg

SEQ ID NO: 101453 - DNA, 1430 bp, Zea Mays
tctctctctttctctctcgtgcgtgtcgaagactccaagtcgaactcaaaacacgcaacacgcaagtcacgaacgcacgacaaaaggaagaaaaacccaagaaatatctctgcggccctgctcgtcccgagccgagccggcgagatggcggggatgtctcgcgcgatccgcaacttcgccgccgcgtcccggcgaaccctgaccgctgcttcggggccggcgctgccgaaggaggcggcggcggcgggggcgcgggtgagggcggcggcgcccgggcgcatggggcgggatcaggaggacgggaggcgcgtgcagtgggtgttcctcgggtgccccggggtggggaagggcacctacgccagccgcctctcgcagctgctcggcgtcccgcacatcgccaccggcgacctcgtccgcgacgccctggccacccctggccccttctccaacaagcttgctgagattgtcaatcatggaaaactggtgtctgatgagatcatcataaatctgctgtcaagacgtctggaagagggagaggaaaagggtgaattggggttcatccttgatggctttcctcgaaccataggacaagcggagatacttgaaggagtcacagacattgatttggtgatcaatctcaaactccgagaagaagctctgcttgcgaaatgccttggcaggaggatgtgcagccagtgtggagggaacttcaatgtggcctccattgatattgagggtgaagatggtgggcctcgaatgtacatgcccccactgttgcctcctccacagtgtgaatcgaagctgattgctagagcagacgatactgaagaagtggtaaaagagcggctgcgtgtgtaccatgatttgactgaaccagtggaggagttctacagagcacgtgggaaactgctggagttcaatctgcctggtgggatacccgaatcatggccgaagttactgcaggccctgaacatagaagaccccgacaataagcgatctgcagcagcatgattcttgttttgttataggaatgcacattctaaattgaacatctgtagactatgtcaaagctagtcaaattggtgggcattccttacatctttgggaagcctactccattctggatccagattattgtggcatggcactcaactgtacagtagattgatcatcgattggcaaggtcgatcgatggatgtgctgactgtgatcctcgaacgtaaggtgtgtaaaaaggcaagaaaataattgttgggcgtcgagacattcacttgtaggtcgtaccatgcatatgcttgttgaaagaggggagcatgccagaaacgtctgatttttatttttatttttttatttgggagggctggctggctggagcttttcgtgtatgtgacgagctacctatgtacgcaatacactaatactacactgca

SEQ ID NO: 101454 - DNA, 1642 bp, Zea Mays
tctctctctttctctctcgtgcgtgtcgaagactccaagtcgaactcaaaacacgcaacacgcaagtcacgaacgcacgacaaaaggaagaaaaacccaagaaatatctctgcggccctgctcgtcccgagccgagccggcgagatggcggggatgtctcgcgcgatccgcaacttcgccgccgcgtcccggcgaaccctgaccgctgcttcggggccggcgctgccgaaggaggcggcggcggcgggggcgcgggtgagggcggcggcgcccgggcgcatggggcgggatcaggaggacgggaggcgcgtgcagtgggtgttcctcgggtgccccggggtggggaagggcacctacgccagccgcctctcgcagctgctcggcgtcccgcacatcgccaccggcgacctcgtccgcgacgccctggccacccctggccccttctccaacaagcttgctgagattgtcaatcatggaaaactggtgtctgatgagatcatcataaatctgctgtcaagacgtctggaagagggagaggaaaagggtgaattggggttcatccttgatggctttcctcgaaccataggacaagcggtgagctaattatttgacctgaccgtaagtatgcagcaaaaacacatacttgcctcttatcaggaagcatttttcacttgcatcttcttttgagttcttatgaaaatcttagatttcaccaagcacaagttggttagagttgaatagatttcatccgctctagccctcagagatgagcagtagatcggtatccctggatttctatctcaacgttataacttgtgtcaaaccttagacactggggtagactgcttggtcctaatactggttttatcatgtgccctgtcaggagatacttgaaggagtcacagacattgatttggtgatcaatctcaaactccgagaagaagctctgcttgcgaaatgccttggcaggaggatgtgcagccagtgtggagggaacttcaatgtggcctccattgatattgagggtgaagatggtgggcctcgaatgtacatgcccccactgttgcctcctccacagtgtgaatcgaagctgattgctagagcagacgatactgaagaagtggtaaaagagcggctgcgtgtgtaccatgatttgactgaaccagtggaggagttctacagagcacgtgggaaactgctggagttcaatctgcctggtgggatacccgaatcatggccgaagttactgcaggccctgaacatagaagaccccgacaataagcgatctgcagcagcatgattcttgttttgttataggaatgcacattctaaattgaacatctgtagactatgtcaaagctagtcaaattggtgggcattccttacatctttgggaagcctactccattctggatccagattattgtggcatggcactcaactgtacagtagattgatcatcgattggcaaggtcgatcgatggatgtgctgactgtgatcctcgaacgtaaggtgtgtaaaaaggcaagaaaataattgttgggcgtcgagacattcacttgtaggtcgtaccatgcatatgcttgttgaaagaggggagcatgccagaaacgtctgatttttatttttatttttttattt

SEQ ID NO: 101455 - DNA, 1355 bp, Zea Mays
tctctctctttctctctcgtgcgtgtcgaagactccaagtcgaactcaaaacacgcaacacgcaagtcacgaacgcacgacaaaaggaagaaaaacccaagaaatatctctgcggccctgctcgtcccgagccgagccggcgagatggcggggatgtctcgcgcgatccgcaacttcgccgccgcgtcccggcgaaccctgaccgctgcttcggggccggcgctgccgaaggaggcggcggcggcgggggcgcgggtgagggcggcggcgcccgggcgcatggggcgggatcaggaggacgggaggcgcgtgcagtgggtgttcctcgggtgccccggggtggggaagggcacctacgccagccgcctctcgcagctgctcggcgtcccgcacatcgccaccggcgacctcgtccgcgacgccctggccacccctggccccttctccaacaagcttgctgagattgtcaatcatggaaaactggtgtctgatgagatcatcataaatctgctgtcaagacgtctggaagagggagaggaaaagggtgaattggggttcatccttgatggctttcctcgaaccataggacaagcggtgagctaattatttgacctgaccgagatacttgaaggagtcacagacattgatttggtgatcaatctcaaactccgagaagaagctctgcttgcgaaatgccttggcaggaggatgtgcagccagtgtggagggaacttcaatgtggcctccattgatattgagggtgaagatggtgggcctcgaatgtacatgcccccactgttgcctcctccacagtgtgaatcgaagctgattgctagagcagacgatactgaagaagtggtaaaagagcggctgcgtgtgtaccatgatttgactgaaccagtggaggagttctacagagcacgtgggaaactgctggagttcaatctgcctggtgggatacccgaatcatggccgaagttactgcaggccctgaacatagaagaccccgacaataagcgatctgcagcagcatgattcttgttttgttataggaatgcacattctaaattgaacatctgtagactatgtcaaagctagtcaaattggtgggcattccttacatctttgggaagcctactccattctggatccagattattgtggcatggcactcaactgtacagtagattgatcatcgattggcaaggtcgatcgatggatgtgctgactgtgatcctcgaacgtaaggtgtgtaaaaaggcaagaaaataattgttgggcgtcgagacattcacttgtaggtcgtaccatgcatatgcttgttgaaagaggggagcatgccagaaacgtctgat

SEQ ID NO: 101456 - DNA, 2713 bp, Zea Mays
ccagtcttgttgactcttgagtcttccaccttcctcctcccgtctcgtctccaacggtgtgcttcttcctccggacgcctcgctcgtccgaccgctttacctccctcctccggcgagctccctccgctgttcctggtgtgtctacgcgccagctcctcctcttgtcgattttgggcgcgctcccctccgccgccgggctgtgctgcgcggacgcggttcgtggattcggcagaaggatctgcaccgtcctcgccgccgatatgcaggagcactagcaaagcggcttcgccatccctccggagtccggagcagccagctcatcaatcgttcctccttagatacattcccattatatatcatgtgccgagtgccctccaagatggtttactacagtaatatagttgtgcatcaattctaaaacagagttgataccttttttccatcttcaaggttctgctctctcatgccgcagttttacaacgttgaaggcttaaaaattctacagaactagatgatacttgcataatgcagccctcagatatttggaaggcgcatgctggttcatcacagtcagaggcttcgggtctggatatggagaggaacggatgcaatcataattgctgtccatctcctctccagccaattgcttcagctggtcagcactctgaaagcagcgctgcatacttttcttggcctacatctactctaatgcacggctcagctgaaggccgtgctaattactttgggaatctacagaagggtgtactaccaggacatcttggtcgcttgccaaatggccagcaagccaccaccttacttgatttaatgattataagagcattccacagcaagattctccgccggtttagtcttggtacagcaataggctttagaatcaggaaaggaacattgactgacacacctgccatccttgtgtttgttgctcgaaaggttcacaggaagtggctcagccctactcaatgtcttccaggtgcccttgagggacctgggggtgtgtggtgtgatgttgatgttgttgaattttcttattatggtgcaccagccccaacaccgaaggaacaactttatgatgagcttgttgatggattgcgtggtagcgaccctagtataggctcaggttcacaggtggctagtcttgagacctatgggactttgggtgccattgtgaagagtcgaactggcaacaagcaagttgggttccttacaaacaggcatgttgcggttgatctggattatcccaaccagaagatgttccatccgttgcctcctaatcttggacctggagtttacctaggtgctgttgagagagcaacatcatttataacagatgatgtttggtacgggatatatgcaggaacaaacccagaaacttttgtccgagctgatggtgcatttataccgtttgctgatgactttgaaattgctagtgtcagcacctccgttaaaggagttggagtcattggtaatgtaaaggcaattgacttgcaatccccaattggcagtctcattgggagacaagttgtcaaagttggaagaagttctggtatgacaactgggactgttgtcgcatacgcacttgagtacaatgatgagaagggaatatgtttcttcactgactttcttgtcgttggggagaaccaacaaacatttgatcttgaaggggacagtggaagcctcataatcttaacaggacaagacggtgagaagccgcaacctataggaattatatggggtggtacagctaaccggggaaggttgaaacttaaaagtggccagggtccggagaactggacaagtggagttgatcttggccgccttcttgatctcttggagctagatctgatcacaacaagtgaagggctacaagctgccttggaagaacaaaggattactctagctgccgctgcggctgcagccactaattcaactgccacagaatcgtcacctgttgctggccctcaagaggatgataaaatcgacaaaatctatgagcctctcggcattaacatcattcctcgagacggttctgccatatcaacggaccaacccaacgaggatgtggaagagctaaacctgatgtctccaatgcgcaatggtgaagaaggcaacggtgacttcaataacttgatggacttggaatcggaaaattcacctgatggtatttctattgctctgaacctgggagagcgggagccagaaagactccgctctgtttctgattcgatgctggacatagacttgcagaaatgaggctgcccgctgctatgctgcagacgtattgcaggaggctccgtatcattcagctttttttatcgatcattgcaggtatggccacaaaggaaataatctgtttctaggcgactggaccggttgttctgcttgaaacccggtctgggttaagctgtgaagctcctgcagccgcttgctcctgcagttttgcgtcaagtgtctaccaactctagcatatgtagtgctgcgtaagatgtcggcacctcagatagacagaggcgccatatttcttgctcatgtaatgttatttgttgtatgctcgtttgtatgtactgcatgaagcattgtaaaattgagcaacagcaaccagagctcgagaatcttaggcgcaaccaaccaaccccgtatcgatgaattgacaataaagctgaatattttaggtgtttagaaagtattttctctt

SEQ ID NO: 101457 - DNA, 2628 bp, Zea Mays
ccagtcttgttgactcttgagtcttccaccttcctcctcccgtctcgtctccaacggtgtgcttcttcctccggacgcctcgctcgtccgaccgctttacctccctcctccggcgagctccctccgctgttcctggtgtgtctacgcgccagctcctcctcttgtcgattttgggcgcgctcccctccgccgccgggctgtgctgcgcggacgcggttcgtggattcggcagaaggatctgcaccgtcctcgccgccgatatgcaggagcactagcaaagcggcttcgccatccctccggagtccggagcagccagttgtgcatcaattctaaaacagagttgataccttttttccatcttcaaggttctgctctctcatgccgcagttttacaacgttgaaggcttaaaaattctacagaactagatgatacttgcataatgcagccctcagatatttggaaggcgcatgctggttcatcacagtcagaggcttcgggtctggatatggagaggaacggatgcaatcataattgctgtccatctcctctccagccaattgcttcagctggtcagcactctgaaagcagcgctgcatacttttcttggcctacatctactctaatgcacggctcagctgaaggccgtgctaattactttgggaatctacagaagggtgtactaccaggacatcttggtcgcttgccaaatggccagcaagccaccaccttacttgatttaatgattataagagcattccacagcaagattctccgccggtttagtcttggtacagcaataggctttagaatcaggaaaggaacattgactgacacacctgccatccttgtgtttgttgctcgaaaggttcacaggaagtggctcagccctactcaatgtcttccaggtgcccttgagggacctgggggtgtgtggtgtgatgttgatgttgttgaattttcttattatggtgcaccagccccaacaccgaaggaacaactttatgatgagcttgttgatggattgcgtggtagcgaccctagtataggctcaggttcacaggtggctagtcttgagacctatgggactttgggtgccattgtgaagagtcgaactggcaacaagcaagttgggttccttacaaacaggcatgttgcggttgatctggattatcccaaccagaagatgttccatccgttgcctcctaatcttggacctggagtttacctaggtgctgttgagagagcaacatcatttataacagatgatgtttggtacgggatatatgcaggaacaaacccagaaacttttgtccgagctgatggtgcatttataccgtttgctgatgactttgaaattgctagtgtcagcacctccgttaaaggagttggagtcattggtaatgtaaaggcaattgacttgcaatccccaattggcagtctcattgggagacaagttgtcaaagttggaagaagttctggtatgacaactgggactgttgtcgcatacgcacttgagtacaatgatgagaagggaatatgtttcttcactgactttcttgtcgttggggagaaccaacaaacatttgatcttgaaggggacagtggaagcctcataatcttaacaggacaagacggtgagaagccgcaacctataggaattatatggggtggtacagctaaccggggaaggttgaaacttaaaagtggccagggtccggagaactggacaagtggagttgatcttggccgccttcttgatctcttggagctagatctgatcacaacaagtgaagggctacaagctgccttggaagaacaaaggattactctagctgccgctgcggctgcagccactaattcaactgccacagaatcgtcacctgttgctggccctcaagaggatgataaaatcgacaaaatctatgagcctctcggcattaacatcattcctcgagacggttctgccatatcaacggaccaacccaacgaggatgtggaagagctaaacctgatgtctccaatgcgcaatggtgaagaaggcaacggtgacttcaataacttgatggacttggaatcggaaaattcacctgatggtatttctattgctctgaacctgggagagcgggagccagaaagactccgctctgtttctgattcgatgctggacatagacttgcagaaatgaggctgcccgctgctatgctgcagacgtattgcaggaggctccgtatcattcagctttttttatcgatcattgcaggtatggccacaaaggaaataatctgtttctaggcgactggaccggttgttctgcttgaaacccggtctgggttaagctgtgaagctcctgcagccgcttgctcctgcagttttgcgtcaagtgtctaccaactctagcatatgtagtgctgcgtaagatgtcggcacctcagatagacagaggcgccatatttcttgctcatgtaatgttatttgttgtatgctcgtttgtatgtactgcatgaagcattgtaaaattgagcaacagcaaccagagctcgagaatcttaggcgcaaccaaccaaccccgtatcgatgaattgacaataaagctgaatattttaggtgtttagaaagtattttctctt

SEQ ID NO: 101458 - DNA, 2244 bp, Zea Mays
ctgcaacaagtctactacgagcgggcacggcgcggcgcctccgatttttttcacgggggagcgcccggggcgaggctataaaaaccgtctcctccacgccacctccgcaccgcagagagaggagcgagagcgagcgacccccccgagccgtgccaaccaagaaccatccacccaccaccaccaccccggccgcttccttgtccctgcccctccgttggtctcctttgcccatctcatcctctctctctctctccctctctctctctctggcggtcggcgtggctccgggggcgcgaagcgcgggctcggcggggcgactcgccggcggcgacctgcaggtttgggtatgagaggggtcacccacgcggcgcccaccacaagcgccccccgcccccgcggacgcctcatggacggcctcctcatcttcgtcttctacctctcgctgcccacccgtgccggccgcgaccactcgtcaatcgccgcctctaattgttagccgccgccggcacgccattgctcggcccgcctcccgagaagctcgatctgcggcctagccagccagcctcacgcgggatcaggatcgatggaccagccaccgaatggattcgccgccggaggttttttcacgcacattgatgggcaaaaccgttctcccccttctgtaattgtcattgggggagggatttcaggcatcgcagctgcacgtgctttgtcgactgcttcatttaaggtcacactcttggagtccagggaccgacctggtggccgtgtgcacactgactattctttcggttgcccaattgacatgggagcatcatggttgcatggtgtttgcaatgagaattctttggcaccactgattaggatgcttgggcttaggttatatcgcacaagcggtgataactctgttctgtatgaccatgatttggaaagttatgctctttttgataagcatggtcagcaagttccccaggagatagtaagcaaagttggagagacatttgagagaattcttaaggagactgtcatagtaagagatgagcatgcaaatgacatgcctctttttcaagccatagcgatcgtgcttgacaggaatccgcatatgaagctgcagggcctggaatatgaagtactgcagtggtgcatatgtaggctggaggcatggttcgctactgacatggacaatatatctctgaaaacttgggatcaggaacatgtgcttaccggtggacatggtcttatggtgaatggctacgaccctgtcatcagagctctcgctcaaggtctcgatattcacctcaaccacagggtcacaaagatcatacaacgctataacaaggttattgtctgtgtggaagatggggcgagttttgtcgcagacgctgctatagtaaccgtccctctcggggtactcaaggcaaacatcatcaagtttgagcctgagctaccgaaagagaagctctcggcaatcgccgaccttggcgtcggtatcgagaacaagatagctctcaagttcgacactgtgttttggcccgacgttgaagtgataggtagggtggccccgacgtcaaacgcctgtggctactttctcaaccttaacaaagccacaggaaacccggtcctggtgtgcatggtggccggaaggttcgcgtacgagatcgagaagctgtcggacgaagagtccgtgaacttcgtcatgtcccagctcaggaacatgctgccgcaggcaactgacccggttcagtatctggtctcgcgctggggtagtgaccccaactcacttggctcctactcgtgcgacctggtggggaaaccagctgacctgtatgaaaggttctgcgctccggtgggcagcctgttcttcgccggggaggccgcctgcattgaccactccggatcggtgcacggagcttactcgtcaggcatcgctgccgcagaggactgccgaaggcgtctgtcggcgcagctaggcatctcggccggcctgttccaggtcgggaaggctgccatgagggaggagatgacggctgaagccatggtccccttccagatatccaggttgtaagagagaatctattcaacaccgtctttgtgtcaccggtttgttgcttgatgtaattgtaaaatggtgtaagaccttgtttgttggaatattcgatggtggatgctgtttttcgtcaggtaaacgtcagcgtcagctgggccagatgaatgaatattcgcattgcgcgctgaacggattcc

SEQ ID NO: 101459 - DNA, 1243 bp, Zea Mays
gtctcctccacgccacctccgcaccgcagagagaggagcgagagcgagcgacccccccgagccgtgccaaccaagaaccatccacccaccaccaccaccccggccgcttccttgtccctgcccctccgttggtctcctttgcccatctcatcctctctctctctctccctctctctctctctggcggtcggcgtggctccgggggcgcgaagcgcgggctcggcggggcgactcgccggcggcgacctgcaggtttgggtatgagaggggtcacccacgcggcgcccaccacaagcgccccccgcccccgcggacgcctcatggacggcctcctcatcttcgtcttctacctctcgctgcccacccgtgccggccgcgaccactcgtcaatcgccgcctctaattgttagccgccgccggcacgccattgctcggcccgcctcccgagaagctcgatctgcggcctagccagccagcctcacgcgggatcaggatcgatggaccagccaccgaatggattcgccgccggaggttttttcacgcacattgatgggcaaaaccgttctcccccttctgtaattgtcattgggggagggatttcaggcatcgcagctgcacgtgctttgtcgactgcttcatttaaggtcacactcttggagtccagggaccgacctggtggccgtgtgcacactgactattctttcggttgcccaattgacatgggagcatcatggttgcatggtgtttgcaatgagaattctttggcaccactgattaggatgcttgggcttaggttatatcgcacaagcggtgataactctgttctgtatgaccatgatttggaaagttatgctctttttgataagcatggtcagcaagttccccaggagatagtaagcaaagttggagagacatttgagagaattcttaaggagactgtcatagtaagagatgagcatgcaaatgacatgcctctttttcaagccatagcgatcgtgcttgacaggaatccgcatatgaagtaagtggaacttaggatccacctgattgtgtcacagggatttgtcaggtcatgtgattgcgtgcacttacattcacaggctgcagggcctggaatatgaagtactgcagtggtgcatatgtaggctggaggcatggttcgctactgacatggacaatatatctctgaaaacttgggatcaggtatgcagtgcagaacagaacttgcagatactgcacatac

SEQ ID NO: 101460 - DNA, 2664 bp, Zea Mays
aacaatctattggagcggtgtatagcggctagagaagtatagagagagaaaaagagaggccgttggtttgggtttggttcgttgcctgtcccctcccttcccgtcataaaagataccagcaggcagaggcggctccaatccaacccagtccacacgagacgaaacgagccgagcccatccctccgtcgccttcgccaaccctagcctagcctccttcttctcctcctcccgcggatccaacctccgcccgcccgcccgccgccgccgagagagccctatctcccccacgccgcggtctccgcgcaagcgggggcaggggacgcggatcccgcagctccccgccatctccggaacggccatggaggtggcggcggctgccgcagggaagccgctgacgccggaggaggaggcactccggcgcagcaccgactgcgtctacttcctcgcctcgccgctcacctgcaagaagggtaatgaatgcgattttcgtcacagtgagggtgctaggatgaaccctagggactgttggtactggttgaatggcagttgtttgaatcccaagtgtgcatttcgccatccgccaattgatggtctctttggtgccccaacttctggactacctccagtttctgcgcactacggtgcctataacttgggcaagcagatggtcccatgctattacttccagaaagggaactgcttgaagggtgatagatgccctttctatcatggaccacaaacagctagtaatgatcttgcagagcaagcggcgaaggtttcttcctttcctttggaaccgtcccaggctcaaaataacgaagaggctgtagctccaaataattcaacgcagcaagaggcccgaatgactgaaaacaggacttcgattcatgtttccaagagtggtgtgggtgcaactcccgctgatgtagcttccaatgcattgaagcctgggaccaacttcgagcaggcacccagtaatacgcttgcagcaaagaaaagttccacaactgaggatcatcctatgcactatcagaaccaggttcctgtggagatcgatcctgtcaaagactggaaccaaaattttgaagtgtctcctactgattacctgccacaggatagtagggaggctgatgatattttgggggagtcctctcctggttttgatgttcttgtagacaatgatgtagatgttgctgaagattttgcaagggatatgtacccggtagaagattacgagtatgttacatctgattttgatgctcgggcccatcatgaaagtgagcagttcaacgatggaatgggtgtgaatggacggattggacagtatgatggctatgagaggaaacgccgtagatcttcatctgagaggaacctagacagacattaccatccagatggaaggtttcttcacagagagcttgatcgtggcgagatagatggatcagatctacgccatcagctccgcaggagaagaataaatgggccctcaacaaccattagcccagaacgggctaatggggaccgacatgggagggatgaaccctacagagaaagggcacatggtggtcaccacacgtacagagatcgctatcagggcccacgaggaagcaatctaagttcccgtctgcaggccagaataaagcttcctcgaagatcacctgatagagttgatactcgcttcgaggatgagcgagacaggagaagattcagggatatgttttctccaatgaggcgtatggatttccatggtggtaggcatcaagaggctggacataatcaagaaaggggccacaggaagttaagcgagcttgtctctactgtcaggcatgcagatggcctctctgctagaagagatgcagtgggttcaactcattttgctgctcgcagaaacttgggagagccaaggaaggcaaatggtcttgtggaatccgaagcatctcttgattttgagggcccaaaaccccttagtgtcatcttacagagaaaaagggaggcagcacagggcaataactatgagaaatttgctgaggttgcagtcacgcagacaggttctctggatgaaactgagaagaaaagctgtgacaacgttaccaggtttgcagattgcaagagtggttcaggtgacgaagagtataaagagcaagatcatatccttgtggatgcacacaggcagtcttcggatcatggtgataagtttgaggctgggtatgctgctgaagtggatgcagaaggaaaacaagaggcagatgactatgaccagagagagggcgagtccgacgactacgagacatttgaaggccatgactacaaatctgaagatgaaaatgtgtaccaagacgacgaggatttcgatgataatgatgactttgctcggaaagtaggggttttattgccttagacgccgcggtgtcattggttctgttgcttgaggcaacgagctctagtttttgccatcggttctgttgcttgaggcaaagctgaaatgccgatcataatcgatttgaggtttacatgtaaactgctgtgtgatgttcagcacatctgacctctccttggactttgttatattagtttccgtactaacagcaggatatattccttaatcaatttgtgcccggaacgaaatataatcaactccacaatgggggggggggcgttttgctt

SEQ ID NO: 101461 - DNA, 650 bp, Zea Mays
gtctagggttttaccctctccaacacgacgaggttttgctccgacaccgacgcgacagccgacaaggcagggggagaggccgagaggggaaatggcatcgttgtcccgcaccgctgctgccgctgtcgtggccctgaggtcggcggtccgctccgcgccccttaccggccgcgtcctcggagcgccactaccttcctttgcctcgccttccgctacccgctccgcccggatcctccgcaggtcggcggccgcggcgtcggcggggctggaaacgctaatgccgctgcacagcgcggtggctgccgcgcggcttaggtcctgcatcgccgtcgactcctcctgctggtgctcgctctcacaaggtttaaacaagcgcatctgaccatggctaggagctgagcagaagagaagatatgctttgcctttatgacagcgaggcgagctgcacctgaagaaacaaaagaatcttaggaattacaaacaagggctgtactgtaataatgtggttcttgtaaaccaattttgccttagaattctgtaacttgaatcatccacagatgtgcgactgtcttttgtttatgtggatctatgaattacctgccgctcctcgtttgaactacttgcaattccattatagcatcatttgaaaa

SEQ ID NO: 101462 - DNA, 602 bp, Zea Mays
gtctagggttttaccctctccaacacgacgaggttttgctccgacaccgacgcgacagccgacaaggcagggggagaggccgagaggggaaatggcatcgttgtcccgcaccgctgctgccgctgtcgtggccctgaggtcggcggtccgctccgcgccccttaccggccgcgtcctcggagcgccactaccttcctttgcctcgccttccgctacccgctccgcccggatcctccgcaggtcggcggccgcggcgtcggcggggctggaaacgctaatgccgctgcacagcgcggtggctgccgcgcggcttaggtcctgcatcgccgtcgactcctcctgctggtgctcgctctcacaaggatatgctttgcctttatgacagcgaggcgagctgcacctgaagaaacaaaagaatcttaggaattacaaacaagggctgtactgtaataatgtggttcttgtaaaccaattttgccttagaattctgtaacttgaatcatccacagatgtgcgactgtcttttgtttatgtggatctatgaattacctgccgctcctcgtttgaactacttgcaattccattatagcatcatttgaaaa

SEQ ID NO: 101463 - DNA, 622 bp, Zea Mays
gtctagggttttaccctctccaacacgacgaggttttgctccgacaccgacgcgacagccgacaaggcagggggagaggccgagaggggaaatggcatcgttgtcccgcaccgctgctgccgctgtcgtggccctgaggtcggcggtccgctccgcgccccttaccggccgcgtcctcggagcgccactaccttcctttgcctcgccttccgctacccgctccgcccggatcctccgcaggtcggcggccgcggcgtcggcggggctggaaacgctaatgccgctgcacagcgcggtggctgccgcgcggcttaggtcctgcatcgccgtcgactcctcctgctggtgctcgctctcacaaggtttaaacaagcgcatctgaccatggctaggagctgagcagaagagaagtgaggacactgagttaaaacgaagtcatttttttgttgcagatatttgtaacatgtactactttgatcgttgctctatgcatttgcccatggcttcataacggagcatgccaatttgttccttgtaacttgcattggttcttattttcagtttgatcatgatcatgacaatgaaaacaagacttgatttacattaaaacacactttttttt

SEQ ID NO: 101464 - DNA, 1385 bp, Zea Mays
tagtgctttccagccctaagctcatggctgatactgaatgaataacgtcctgtcctgatgaaactcctttttaagctatgtgatactgaaatgcatgttgatattcctttctatttgtggtttagtatcaattagttcaattgtgctcgattgttgttctaccgagctagttttacatctatgccaattgtccactgtatcagtagtttagattttgtataacctttttattttgcaattataacaaaaaagtgatcaacagggatctttatgtatgcagtgatgaataatgaatgcattcaacgtgcctttcagagttacactagtgtgaaggacttaaaatgctagcagtttatagcaaaactagtttcaggctttgtattgttttattttacagtagctcgttactgtatatgtatatttgttgtctttttttatttatgtgaaaagtttgattggcttttccgggtgtatggtgccacgacagaatcctagttgcaaacagaaggaacacaatctcgttgggactagtcattgcaatcttgttgattgatctaccgattccattattggccttctttattcgtaaaatattaataagatctggttttagctatatagacttgcagtctacatgtctgccataagattgtggttctctaaaatctgagcaaaagtgctgcctggttaaaacattgtcccatacataatagtagattatttgttgtcattgatgcatgagatgctattgtttatcaccttttcaatgcatttctctgttttgtacaataggtaaactaccaattttacatgtagataccaagatggttgttccgtagattcgtacacaaaaattgtttaggttgcagcaaaatatagtagttttaaagcaccccatgttcctttttgtttctcagcaatctgtatcatacctgctgctttctgaggtggtatcattgttttcaaccatgaaatactgagcctatcagtttcagctagcatggcttggtaatatgagatgattcatgcttattgattagatcgagctaatgaaggaaaaagttatgtgttctttttctttgacaaaagaagatggagtttccatattttaactgtggttattataggtttaaacaagcgcatctgaccatggctaggagctgagcagaagagaagtgaggacactgagttaaaacgaagtcatttttttgttgcagatatttgtaacatgtactactttgatcgttgctctatgcatttgcccatggcttcataacggagcatgccaatttgttccttgtaacttgcattggttcttattttcagtttgatcatgatcatgacaatgaaaacaagacttgatttacattaaaacacactttttt

SEQ ID NO: 101465 - DNA, 718 bp, Zea Mays
aaaccaattagcgtctagggtttagcctctccaacccacgtggttttgcttcgacaacgacgctttggcatcgcacacgacgtgagaagaaatggcatctttgtcccgcacagccgtcgccgccgtgaggtccgcagcccgctcagcaccccttaccggccgcgtcccaggcgcgccactgccttcccttgcctcgtcttccgctgcccggtccgcccggatcctccgcaggtcggcggccgcgtcgtcgtcggggctggagacgctcatgccgctgcacagcgcggtggcggccgcgcggcttaggtcctgcatcgccgttgacttctcctgctggagctcgctctcacaaggatacgctttgcctttgtgacagagagaagaaaccaatgaacattaggaatcactatcaagggctgtaataatgtgattcttgtaaactaattttgcctttatagttcattggattttgtaacctggaccattcgaagatgtgcagctggcattcgttgatgcttggattttatttctggatccgtttcttacctgcagcttgtctttcagacagacagttggttggctgttgggatattattcccaattctaaatcatgcgtttttcaaggtaaagttacacaagcatcacctggaattttgtacagtggaatcatctgtgcactcacaggaggaacagtaaacagtaaagcctatttgccaag

SEQ ID NO: 101466 - DNA, 567 bp, Zea Mays
aaaccaattagcgtctagggtttagcctctccaacccacgtggttttgcttcgacaacgacgctttggcatcgcacacgacgtgagaagaaatggcatctttgtcccgcacagccgtcgccgccgtgaggtccgcagcccgctcagcaccccttaccggccgcgtcccaggcgcgccactgccttcccttgcctcgtcttccgctgcccggtccgcccggatcctccgcaggtcggcggccgcgtcgtcgtcggggctggagacgctcatgccgctgcacagcgcggtggcggccgcgcggcttaggtcctgcatcgccgttgacttctcctgctggagctcgctctcacaaggccaagttcatggagctactgccttaggagcgtgtgttcattctctgacttattggctgtcagtgctaaatggcgcataccaatttggaaacttgtgaacttccatagtagtttcgattttgtataaccttttgtttctggcaacgttgacaaaatttgatcagcagggatctttatgaatgcttttcaaagttacactagtacttgtaataaa

SEQ ID NO: 101467 - DNA, 3152 bp, Zea Mays
ctctctctctctctctctctccgtgccccccaggccctcctcccaggctcccagcccccctcccgtccctctctctgtctctctccacgcaccatggcgatctccgagctcgggtgagctgacaagaatgcggccgatttgagcgaggacgggaggggcgcgatggatgcgggttcgggcggattcgcgaggaggctctagaggaggttaggtttcggccccggccccggcccggctgtgggagatgagctcctcgtccgcggccagcatcgggcagcagccgccggaggaagagaagaagtgcctcaactcggagctgtggcacgcgtgcgccggcccgctcgtctgcctccccaccgtcgccacgcgcgtcgtctacttcccgcagggccacagcgagcaggtggcggcgtcgacgaacaaggaggtggacgggcacatccccaactaccccaacctgccgccgcagctgatctgccagctgcacgatgtcacaatgcatgcggatgtggagacggatgaagtgtacgcgcagatgacgctgcagccgctcaacccacaagagcagaacgacccgtacctgcctgcggagatgggaatcatgagcaagcagccgacgaactacttctgcaagacgctgactgcgagcgacaccagcacgcacggcgggttctctgtgccccgtcgcgcggccgagcgtgtcttccccccactgctgcatgctgggttgtttggtttgctgttgcaaataacaggtggtatagtgtgccgccagcgcattccactttctagccgccagcgccaggaactgaggaaccctggaagttggaacggccgtgcactcgccaggaagtcaagaactgagaagccgtgtcgaacgattgaaactgggagatgttggatcgttggaacggcccaacgacgcacaggatggccatgtggggtccctggtgggcctggcttagggaatgagaaaaaccagcttctgcttggaatcagacgcgccagccgtccacagactgtgatgccctcttctgttctttcgagtgacagcatgcacattgggctccttgcagcagcagctcatgctgctgcaacaaacagccgtttcacaattttctttaatcctagggcaagtccatcagaatttgttatacccctttcgaaatacatcaaggcagtttttcacacgcggatatcagttgggatgcgattcaggatgttgtttgagacagaggaatctagtgtccgcaggtacatggggacaataactgaagtgagtgatgctgacccagtgcgttggcctagttcctattggagatcagtgaaggttggctgggatgaatcaacagcaggagaaaggccacctagagtttctctgtgggaaattgagccactgacaacctttcctatgtatccatccctcttcccactgcgagttaagcatccatggtattcaggagttgctgctcttcatgatgacagcaatgctttgatgtggctgagaggagttgctggtgaagggggctttcagtctttaaacttccagtcacctggtgtaggttcctggggacaacagagactccatccatccttacttagcaatgaccatgatcagtatcaagcagtggttgctgccgcagctgcttcccagtcggatggttatctgaagcagcaattcctacaccttcaacaacctatgcagtccccacaggaacagtgcaatctcaatccgctgttgcagcagcaaatactacagcaagggagccaacagcagatggttagtcctgatgctcaaaatatccagtccgtgctcaacccaaatgctattcagcagcagctccaacaattccagcagatgcagcatgctcataatgaccagaagcagaagattcaaccagatcagccgtaccaagttcctagcagtgcggttctctcgagtccaacatcattaccaagccatttgcgggaaaaatttggcttttctgatcctaatgtcaactcttccagcttcatcagctctagcagcaacgagaatatgctggaatcaaacttccttcagggaagctcaaaatctgtggatttgtctagattcaaccaacctgtagttagcgagcagcagcagcaacaggcatggaagcaaaagtttatttgctcacaatcgatgtcttttgggggctcggtttcacttaactcacccactaccaaagatggtcctgttgacaacaaaattggtcgtgatgtgcagaaccagaccctttttagccctcaagttgactcttcctccctactgtacaatatggtacctaatttgacctcaaatgttgcggataataatatatcaacgattccctctggatcaacatatctgcaaagtccaatgtatggttgtctggatgactcttctggtttattgcaaaatacaggagagaatgatccgacaactagaacattcgttaaggtttacaagtcaggatcggtggggagatccttggacatcacccggttctctaattatgctgaacttcgagaggaactgggtcagatgttcggcattaagggtcagttggatgaccctgatagatcaggctggcagcttgtatttgtcgacagggagaacgatgtgcttctccttggagacgacccgtgggagtcatttgtgaatagtgtatggtacatcaaaatactttcacctgaggatgtgcataagatgggaaagccaggaaacgatccacgctacctatcttaaattgatacccagagctctttcgggctcccgtgacgattctgtggcacactgtagcactgtccatggcggtccggtgtgctgtgctcccatgttcgctggtgtcacctctagcatgtacaccgtgcgcgtcttcagaactcccccgttacttgtatccggtgcaggccaccgctctggactgatatcttgtaggttccacttaggaatcagtatcagcgactctatcctagttggtttgtagctcgcacggcactcgttcttgtgtcgcatcgaaatcttcaggctaaatgcttagttgaaactgttcccgtgattcttaagctatctatgtatttgaggattccccggcatgctttcgacgatgaactgcaataatctgaatgcaggaggattgtttgaatgc

SEQ ID NO: 101468 - DNA, 3219 bp, Zea Mays
ctctctctctctctctctctccgtgccccccaggccctcctcccaggctcccagcccccctcccgtccctctctctgtctctctccacgcaccatggcgatctccgagctcgggtgagctgacaaggtgggcgtcccgtacctagtaccgctgcctgcctcgggtgaacgagcgtcggttcggctcggtgcagaatgcggccgatttgagcgaggacgggaggggcgcgatggatgcgggttcgggcggattcgcgaggaggctctagaggaggttaggtttcggccccggccccggcccggctgtgggagatgagctcctcgtccgcggccagcatcgggcagcagccgccggaggaagagaagaagtgcctcaactcggagctgtggcacgcgtgcgccggcccgctcgtctgcctccccaccgtcgccacgcgcgtcgtctacttcccgcagggccacagcgagcaggtggcggcgtcgacgaacaaggaggtggacgggcacatccccaactaccccaacctgccgccgcagctgatctgccagctgcacgatgtcacaatgcatgcggatgtggagacggatgaagtgtacgcgcagatgacgctgcagccgctcaacccacaagagcagaacgacccgtacctgcctgcggagatgggaatcatgagcaagcagccgacgaactacttctgcaagacgctgactgcgagcgacaccagcacgcacggcgggttctctgtgccccgtcgcgcggccgagcgtgtcttccccccactgctgcatgctgggttgtttggtttgctgttgcaaataacaggtggtatagtgtgccgccagcgcattccactttctagccgccagcgccaggaactgaggaaccctggaagttggaacggccgtgcactcgccaggaagtcaagaactgagaagccgtgtcgaacgattgaaactgggagatgttggatcgttggaacggcccaacgacgcacaggatggccatgtggggtccctggtgggcctggcttagggaatgagaaaaaccagcttctgcttggaatcagacgcgccagccgtccacagactgtgatgccctcttctgttctttcgagtgacagcatgcacattgggctccttgcagcagcagctcatgctgctgcaacaaacagccgtttcacaattttctttaatcctagggcaagtccatcagaatttgttatacccctttcgaaatacatcaaggcagtttttcacacgcggatatcagttgggatgcgattcaggatgttgtttgagacagaggaatctagtgtccgcaggtacatggggacaataactgaagtgagtgatgctgacccagtgcgttggcctagttcctattggagatcagtgaaggttggctgggatgaatcaacagcaggagaaaggccacctagagtttctctgtgggaaattgagccactgacaacctttcctatgtatccatccctcttcccactgcgagttaagcatccatggtattcaggagttgctgctcttcatgatgacagcaatgctttgatgtggctgagaggagttgctggtgaagggggctttcagtctttaaacttccagtcacctggtgtaggttcctggggacaacagagactccatccatccttacttagcaatgaccatgatcagtatcaagcagtggttgctgccgcagctgcttcccagtcggatggttatctgaagcagcaattcctacaccttcaacaacctatgcagtccccacaggaacagtgcaatctcaatccgctgttgcagcagcaaatactacagcaagggagccaacagcagatggttagtcctgatgctcaaaatatccagtccgtgctcaacccaaatgctattcagcagcagctccaacaattccagcagatgcagcatgctcataatgaccagaagcagaagattcaaccagatcagccgtaccaagttcctagcagtgcggttctctcgagtccaacatcattaccaagccatttgcgggaaaaatttggcttttctgatcctaatgtcaactcttccagcttcatcagctctagcagcaacgagaatatgctggaatcaaacttccttcagggaagctcaaaatctgtggatttgtctagattcaaccaacctgtagttagcgagcagcagcagcaacaggcatggaagcaaaagtttatttgctcacaatcgatgtcttttgggggctcggtttcacttaactcacccactaccaaagatggtcctgttgacaacaaaattggtcgtgatgtgcagaaccagaccctttttagccctcaagttgactcttcctccctactgtacaatatggtacctaatttgacctcaaatgttgcggataataatatatcaacgattccctctggatcaacatatctgcaaagtccaatgtatggttgtctggatgactcttctggtttattgcaaaatacaggagagaatgatccgacaactagaacattcgttaaggtttacaagtcaggatcggtggggagatccttggacatcacccggttctctaattatgctgaacttcgagaggaactgggtcagatgttcggcattaagggtcagttggatgaccctgatagatcaggctggcagcttgtatttgtcgacagggagaacgatgtgcttctccttggagacgacccgtgggagtcatttgtgaatagtgtatggtacatcaaaatactttcacctgaggatgtgcataagatgggaaagccaggaaacgatccacgctacctatcttaaattgatacccagagctctttcgggctcccgtgacgattctgtggcacactgtagcactgtccatggcggtccggtgtgctgtgctcccatgttcgctggtgtcacctctagcatgtacaccgtgcgcgtcttcagaactcccccgttacttgtatccggtgcaggccaccgctctggactgatatcttgtaggttccacttaggaatcagtatcagcgactctatcctagttggtttgtagctcgcacggcactcgttcttgtgtcgcatcgaaatcttcaggctaaatgcttagttgaaactgttcccgtgattcttaagctatctatgtatttgaggattccccggcatgctttcgacgatgaactgcaataatctgaatgcaggaggattgtttgaatgc

SEQ ID NO: 101469 - DNA, 261 bp, Zea Mays
atggccagccgcgtctgcgccggggccggcagcgcccgcgccggggccagccgcgcccacgagccgggggccggatgctcccacgtcggcgtcggccgcgcccgcgacggggccggacgcgcccgcgacgtcgcgcccgcgttggggcagcagcgcccgtgcgccggggccggcgaccgcgcccacaaccgggtcgtgtccgagcgctcctgcgctggagcacttcgtctgcgccatggcacgaacgccgagggccggtga

SEQ ID NO: 101470 - DNA, 2148 bp, Zea Mays
aacctggagccggcgctcgccgcggcggccgaggcgctgttcggcacccgctccccgccgcgcgccgtcctccgccgcgcgcgcgcgctgcacgcgctcctcgtggtctcgtccctgccgtccgcgccccgcccgcccaccttcctcgtcaaccagctgctcgccctctactgccgcctctccgcggtccccgacgccctcgccctcctccgctccacgccgtgcccctccgtgatctcctacaacaccgtcctctccgctctctcgcgcaccccaaggcacgcgcaggacgccttcgggctcttccgcggcctgcactcgtcgggtctccgcccgaccgcccccagcctctgcgccgtcctccgcgccgccggcgcactgcgcgacggccgcgcgggggccgcggcacacgcgcatgcctcggcgctcggcttcctcgccagcgacattgtgccgaccgcgctgctccagatgtactccgggtgcgggtcgccgagggacgctaaccaggtgttcgacgaaatgatgacgccggatgtggtggcgtggaactgcgtgatgcactgcaacgtacggtacgattacctggaccgcgccctgcggaagttctgccggatggtgagcactgggctggcgcctacagagagcaccctttcttcggtgctgagtgggtgcgggcgctctggggacttgcaccatgggcgtgcgctacatggatgggtggtgaaatcagaggagcttgatcctgatttgcctttgcataatgcgctgcttgatatgtactgctgctgtggtgatctagacactgcagtacttgtgtttcggaggatcgaaacaccagacttggtgtcatggaataccataatttctggattttctggcgttgcggacggatggaccgcagtgcaggcctttgtgaagctcaaggctgtgtcctctgaatggctggctccagatgagtacacatttgcggcagtggtggctgcagctgcttctttaccagcaatgtgtagcggcaaaccgcttcatgcttgtgtgatcaaggctgggttggagagcagcgtctttgttgcgaatacacttctcaatatgtatttcacaaatgaggatccagagtctgctcacattttgttcgattccgttatggtgaaagatgttatcatgtggactgagatggtagctggccattctgcactaggtgaaggagaattgtcattgaaatattttattggcatgctggaggttgggcacaaggctgataatttctctcttagcagtgctttgaactccgcagcagatcttgcaggtcttaagcaaggggaaatgctccatgctcaagtggtaaaaagtggctatgaaggaaatatttgtgtctctggaagccttgttgatatgtacgcgaaaaatggtactcttcttcgtgcctattctgttttctgcaccatacagaagccagatttgaagtgctggaatgctatgataggaggatatggcaaccacggggattctgaaatggcattcaaactatttggtgacatgattcgtagtgatctgcaacctgaccatgtaacatacatctcactcctttctacttgtagccattgtggactggttgagaaaggaaagctttattggttctgcatgataaatgacggcattgtaccagggttcaaacactacactagcatggtgagtttgttgagtagggcaggtttattggaggaagcagttgagttaattaataaatccccttctgccaagagatatcctgagctatggagaattctactaagctctagtgtgacatttaaaaatctgtcaattggtgttcatgctgctgaacaagcactggagctggatccagatgatctctcaacacatatactgctttcaaacctttatgcttctataggaaaatgggatagtgtgtctgaaattaggagaaagatcagagggctcatgattgaaaaggagcctgggcttagctggattgagattgagaaaatggtacatgtgttttctgcagacgatgaatgccacacacgcattgatgattgtcgtgatgagttacttagaataatggaaaacatggtactgttggatagttatgaaaatgaaatagtgttaaatggttaggttgcctttgtt

SEQ ID NO: 101471 - DNA, 2001 bp, Zea Mays
cgactggcttcgcgtgcgccgatcttctatttagcacgcgacaggagcatctcgttgctcgattcggttttcttcgtgaattcgcccccagcgagccgagctagaattggaattggaactggacttgcggctgctgcgttcggcgggggctggaattctcgccgcatccccgtgtggtggtgagaggccgtggctcgtgttgcggtcgacgcgcgaggagggtcgacggcctcgcgccattggggccgctgatcctggtttgagcgcctcgggttcctcttggatttggttggcgtttttatgggcgggtagatcggtccggtgatttctcagctgctatcggtgcgatggcagctgactccagcatggggtttcaccaggggatcaccgcctctctgtacaaccatcacatgctctcgttccagtccaacagcgacgtcggcatcggcggcggcgacgacgctaccggtggcatggtcatggccccggggagtgtgagtgggggcagtggcaacgccgggctgttcctctccccaaacacaggggtcgtcggcaacgcaccgggggttgccccgttaatgaactcgtcgggggatgcgttccgtggcactgggacgcccaagtataagtatgtcactggttctccttccgattggagtgaccgtgaggtagacatactgaatgaagggcttgtgagatatgctcgtgaacctagtatcatgaggtacattaagatagcagctatgcttcctaacagaaccatcagggatgttgcgctgcgatgctgctgggctacaggtaaagagagaaggaagaaacctgatggattctacacagggaaaaaaatgagagacgtgaagccaatccaggacaaaatggttgcatcagtcccaatagctaattttcacatgacacctacaaccaatgtaatccccttttcggtatcaacgcagcatccaaatcaacaaagtcaggttcccaaagaagctcctgttgtcgacagtgcaacccagcgtctcctggaggaaaataatcagttgcttaaccagatttctgcaaataatgaaacattcaagacagtggagaacacagatctttttctccgcacgagtaacaacatcaaaacaattttaagcagaatgagcgaaacgcctggtatcatgagtcagatgcccccattgcctttatccataaacgaagaccatataaattctcttattcaactgaacagactggttgcatcatatggcacaacaagcatttcccatcatacgaagcaagagccatgaagctagtctactaaacccagggaaaaatgagaggaccagatggccggacccctcctgcaattctgtaaacgtgctgctgaggaagtcttgcatgttatactctaaccaagtgccaggaacagtcactgctttccagataatgttttcgcagtgacctgattgtttccaacccgtctgccagcctgcctgcccaccaattcttgaagcatttggaagaagtctgcagttgtggttcgagagccgcaagctatttgctgctgtttctgtttccgttatccagcatgtagaccagagtatcagacagtggatcctggtctctgcaaatgacctgtaaatatcggacggctgctggcgttccatgttttgtttctctgatcgctcatgaatgtatttcttcttttctcccccacccccggtcaccggacagggttgcattgctcccaatatgtaactgtatacagtagcgactccattttctgactaattggacacggaaacccaaacatttgttgtccagatgttctactcttttttttcaccacttcaaaagtaatggtggacaacgagtcggctcgttcgagttcgagctgactcgttaagctaacgagccagctcggctcgttaaggtaacgagtcatagagtcggctcggctcgtttacgagctcgagctgtctcatttagctagcgagccagaacagaacaaaaataaaa

SEQ ID NO: 101472 - DNA, 2251 bp, Zea Mays
atttttaggatgggagggcctactagatctaggaagcctagcggtagagaattttataataataaccgacgcgactttttctttttgttttctggcggcgtggtgttctttttcactgagaagagaataagggagatcaaacggggccgtggaaaaaggggggttagttttattcgactggcttcgcgtgcgccgatcttctatttagcacgcgacaggagcatctcgttgctcgattcggttttcttcgtgaattcgcccccagcgagccgagctagaattggaattggaactggacttgcggctgctgcgttcggcgggggctggaattctcgccgcatccccgtgtggtggtgagaggccgtggctcgtgttgcggtcgacgcgcgaggagggtcgacggcctcgcgccattggggtacgaagccggccgagactgagcggtgagttggcccggattcccgcgggtgtgttcgtaccggttgcggtggttgcttcggtgggtgggggcggctggccggctcgggccctctccggccgccgcccactcgcccagggtctcgatcggatcctcctcgggagtggggaaatgcaaggctccagcgggagcccggcgtgccggggcacggctcccgaggcgggcggtttcctcggtgcccgtgcagggccgctgatcctggtttgagcgcctcgggttcctcttggatttggttggcgtttttatgggcgggtagatcggtccggtgatttctcagctgctatcggtgcgatggcagctgactccagcatggggtttcaccaggggatcaccgcctctctgtacaaccatcacatgctctcgttccagtccaacagcgacgtcggcatcggcggcggcgacgacgctaccggtggcatggtcatggccccggggagtgtgagtgggggcagtggcaacgccgggctgttcctctccccaaacacaggggtcgtcggcaacgcaccgggggttgccccgttaatgaactcgtcgggggatgcgttccgtggcactgggacgcccaagtataagtatgtcactggttctccttccgattggagtgaccgtgaggtagacatactgaatgaagggcttgtgagatatgctcgtgaacctagtatcatgaggtacattaagatagcagctatgcttcctaacagaaccatcagggatgttgcgctgcgatgctgctgggctacaggtaaagagagaaggaagaaacctgatggattctacacagggaaaaaaatgagagacgtgaagccaatccaggacaaaatggttgcatcagtcccaatagctaattttcacatgacacctacaaccaatgtaatccccttttcggtatcaacgcagcatccaaatcaacaaagtcaggttcccaaagaagcagctcctgttgtcgacagtgcaacccagcgtctcctggaggaaaataatcagttgcttaaccagatttctgcaaataatgaaacattcaagacagtggagaacacagatctttttctccgcacgagtaacaacatcaaaacaattttaagcagaatgagcgaaacgcctggtatcatgagtcagatgcccccattgcctttatccataaacgaagaccatataaattctcttattcaactgaacagactggttgcatcatatggcacaacaagcatttcccatcatacgaagcaagagccatgaagctagtctactaaacccagggaaaaatgagaggaccagatggccggacccctcctgcaattctgtaaacgtgctgctgaggaagtcttgcatgttatactctaaccaagtgccaggaacagtcactgctttccagataatgttttcgcagtgacctgattgtttccaacccgtctgccagcctgcctgcccaccaattcttgaagcatttggaagaagtctgcagttgtggttcgagagccgcaagctatttgctgctgtttctgtttccgttatccagcatgtagaccagagtatcagacagtggatcctggtctctgcaaatgacctgtaaatatcggacggctgctggcgttccatgttttgtttctctgatcgctcatgaatgtatttcttcttttctcccccacccccggtcaccggacagggttgcattgctcccaatatgtaactgtatacagtagcgactccattttctgactaattggacacggaaacccaaacatttgttgtccagatgttctactcttttttttc

SEQ ID NO: 101473 - DNA, 2028 bp, Zea Mays
atttttaggatgggagggcctactagatctaggaagcctagcggtagagaattttataataataaccgacgcgactttttctttttgttttctggcggcgtggtgttctttttcactgagaagagaataagggagatcaaacggggccgtggaaaaaggggggttagttttattcgactggcttcgcgtgcgccgatcttctatttagcacgcgacaggagcatctcgttgctcgattcggttttcttcgtgaattcgcccccagcgagccgagctagaattggaattggaactggacttgcggctgctgcgttcggcgggggctggaattctcgccgcatccccgtgtggtggtgagaggccgtggctcgtgttgcggtcgacgcgcgaggagggtcgacggcctcgcgccattggggtacgaagccggccgagactgagcggccgctgatcctggtttgagcgcctcgggttcctcttggatttggttggcgtttttatgggcgggtagatcggtccggtgatttctcagctgctatcggtgcgatggcagctgactccagcatggggtttcaccaggggatcaccgcctctctgtacaaccatcacatgctctcgttccagtccaacagcgacgtcggcatcggcggcggcgacgacgctaccggtggcatggtcatggccccggggagtgtgagtgggggcagtggcaacgccgggctgttcctctccccaaacacaggggtcgtcggcaacgcaccgggggttgccccgttaatgaactcgtcgggggatgcgttccgtggcactgggacgcccaagtataagtatgtcactggttctccttccgattggagtgaccgtgaggtagacatactgaatgaagggcttgtgagatatgctcgtgaacctagtatcatgaggtacattaagatagcagctatgcttcctaacagaaccatcagggatgttgcgctgcgatgctgctgggctacacagggtaaagagagaaggaagaaacctgatggattctacacagggaaaaaaatgagagacgtgaagccaatccaggacaaaatggttgcatcagtcccaatagctaattttcacatgacacctacaaccaatgtaatccccttttcggtatcaacgcagcatccaaatcaacaaagtcaggttcccaaagaagctcctgttgtcgacagtgcaacccagcgtctcctggaggaaaataatcagttgcttaaccagatttctgcaaataatgaaacattcaagacagtggagaacacagatctttttctccgcacgagtaacaacatcaaaacaattttaagcagaatgagcgaaacgcctggtatcatgagtcagatgcccccattgcctttatccataaacgaagaccatataaattctcttattcaactgaacagactggttgcatcatatggcacaacaagcatttcccatcatacgaagcaagagccatgaagctagtctactaaacccagggaaaaatgagaggaccagatggccggacccctcctgcaattctgtaaacgtgctgctgaggaagtcttgcatgttatactctaaccaagtgccaggaacagtcactgctttccagataatgttttcgcagtgacctgattgtttccaacccgtctgccagcctgcctgcccaccaattcttgaagcatttggaagaagtctgcagttgtggttcgagagccgcaagctatttgctgctgtttctgtttccgttatccagcatgtagaccagagtatcagacagtggatcctggtctctgcaaatgacctgtaaatatcggacggctgctggcgttccatgttttgtttctctgatcgctcatgaatgtatttcttcttttctcccccacccccggtcaccggacagggttgcattgctcccaatatgtaactgtatacagtagcgactccattttctgactaattggacacggaaacccaaacatttgttgtccagatgttctactcttttttttc

SEQ ID NO: 101474 - DNA, 1040 bp, Zea Mays
ttcgctgctgatccgaagagctagcgcgcgatggccaacaacctcctccgtccgctcgcgctcctcctggccgtcctcggctgcgcgctgtgtccccgcgccgatgccaccgcgttcgaggtcggcggcgacgacgggtgggtcgtgccgccggccagcgacggcggcaggtacaaccagtgggcgtccaagaaccgcttcctcgtcggcgacgtcgtccacttcaagtacagcgaggactcggtgctggtggtgacggaggccgactacgacagctgccgcgcgtcgcaccccgtcttcttctccaacaacggagacacggaggtgacgctggaccgcccgggccccgtctacttcatcagcggcgagaccggccactgcgagcgcggccagcggatggtcgtcagggtcgccggccagggcgcgcccccgccggcgcctcccagcccgccggccccaaccggcggcagcgccgcgccaggcaccaccagcggcgccatcgcggcactggccatggcgttgctggccatcgccatcggcgtctgagtgatcactcactcgcgggggcgagtttgcgattaatggcgctctccattgtttgcgattaggcgcgcgtgtctttcgtagatgaaatgaaattagtggtgagaatgagaagattgcgagaagagtttttgttttgttttatttaatttttggattttgcaccccccccccccccccccacccaaaaaaaccgtattgtttcgatgtacgtattttcggcgcgtacacatgtgacgacatgatggcaaaagtattatgcccggcgtttcgaatttgtagggcatttaaactttcacaagccctttgcgtgtcacgtcctgcagcacagctcttgggggtgccagaacatggaccggaccggaccaaggtattccagtgggctgctttgccacattctgcagcctggtggaaaccgtatgctccgtggcagcagcaattgcggggcccaggcccagcgtgccaataaaaggatgggggtagatgcagtcatttaa

SEQ ID NO: 101475 - DNA, 1461 bp, Zea Mays
acgtcgcgtcgcgcacgccgtactgcccgccagcccgcccgacccttttcacagccccgacgcaaccgcttcgccgtcctgcccggctgcccgcctccctccctccctctatatcctcccctccgccaccgccccccctctctctcctcagctcaccagacgccgccgccgcgaacgacgaatcctcagcctcccagtcccagcccagatgttcctcgccgacaagtacaggtcgctgctgccctcctcccaccagcagccccactccaagcccagccgccgccgccagcagcagcagcagctgctgcagcaggagggggaggcggaccggttcggcgcggcgcgcctcgggagcctgcttcctttgccggcctccccgctcgcggcgctcgcgcgggtggccgacgtcctcgcgctcacgctcgccgacgcgggccccgcgctcgccggcgccgaccctgccgtcgccgcccacctcgacgcgggcgtcgcgctcctcgacgcctgcaacgccatatccgcgggcctcgaccgcctccgcaggcgcctcctcctcgcgcgcctcgcgctccacctcgtcctctccccctccccctccggggggcgagcacgcgcgcgcgcggcgctcgcggaccgcggcgaccacccggcgccgtccccgctcccttcgctcccgttcgagcagccccgcgggcggctctcggccgccgcgcgcgtcctcgccgccgtggacgccatctcctcgctcgcggcagcggccgcggccgccgtcctcgtcggaggacccgtcactttcccccgggtatccggcggcgtcggcgacctcccctgggcggagccgttcaacgcggtgtccggccagctcgcggcgctcggcgacggcgaggtggcatcgttagacgaggccgtccggaggctcgcgtcggcgctggacgcctccggcgagggtgctgccgacgacgaggcggccgtgcgcgctgcggcgcaggaggcggagaggcgcgccgaggaggtcgcgccgctgctggaccacctgtctgacgccgtcggcggcgtgttccgcgccgcgctgggcctccgcaacgccgaggtggactccttcatggtgggacccgcgggtaagccgtgtagcacataaccgtcgcttcgtgtggactactcgtagctgtctgtctgtatagtgtatacagtagtgtactgtgataggggtactgctacagctcagtggagagttgagtcgtgcagtggatcagtggaaatcatgtatgttagtgtcaacgacgaggatgaggccacagatcatacatgcactagttgcatcatcttgggtacgtggcatcctgtgctgtacgggaaggggagaacgttgcaatctggccgtgcagtttcgcggcacgtaacaacaacagtatgtgtgtataatttgtggagaagtgagttgcacttcccttttcctctcca

SEQ ID NO: 101476 - DNA, 664 bp, Zea Mays
taggccgagcgcgccgagcggcgtcttgccctgcccagcctcgaagtagaaggcgagcatggcaagcatggcgatgcgggcgtgcttgatctcggccagcttgagccgctcgagcttgtcgacgtcggggatgtagacgccgtccttgacggtgccggcgaggccgagcgggtcgaagaacttgccgcccgggtagccctgctcgccggtgaagttagcgaagttctcggcggtgcgggaccatggcgtggcccactccacggcctgggagtccgggttgaagaagtccacccaccgcttcgactccacccaccccatcagcagcagctgcgtgcccagcagcgacccgaaggagaagggcgcgatggcgctcgggtccgcgccggcctcgaaccacgggatgccgctccacgcctgccccacgaagatgcccagcacggccgccatcgcccaccgcccgtggatcagctccgcctcccggtaccacttgaggaacgccgggtccttgcccagccccagcgggtcgaacccgaagtcgccggggagcctgcaagtcgtcgtggtcagcttcgacctccatttaatttttctcctcgtacgtatcacagttataagtgaacatagacagacagcgaaagactcacgagccgtcgagccagggcgg

SEQ ID NO: 101477 - DNA, 934 bp, Zea Mays
tcttattattgttgtttctctgtgaatggaacaaccgccaccctctttgttaaagattgtatcctccagtattacatgttacaactttttatatatataaatcacacacccagacattgtacaagagtcccaatgaggcagaagagttccaagctcgttatgggttgaatgctggaaccgatcggccgaccgatctggcaaatcaatttacctgtcaatcccctcaatcttgtcttcaacctccgaatagagctccctgagcctgtccaggttctcctccgttgtctcccagtagcctctgccactggcttccaggaaggtctgcaccaacttcctgaacgaattggggttggtgtccatgagcctcttcctcatcgcctcgtcctcgatgaacgtggagttggcctcctcgtagacccagttgtcgacctgcccagacgtggcgctccacccgacggtgttggtgagccgcttctcgatctccctgaccccctcgtacccgctcttcatcatcccctcgtaccacttggggttcagcagcttggtcctcgcgtcgaggcgcaccgtctccgacagcgtcctcacctgggcgttcgccgtggtggtgtcggctatgtacgaggacggcgcccgcccgtccttgcgcagcccctgcacgagcttggtcgggtccgagtcgaagtagtggctcacgtccgtcagcgagatctccgacgagtcgaggttctggaacgtggcgtccgccgtcgccagggcgagctcgaacgccttgcgcttctccttcatgcctgccccaggggcgtcgctgtcgaacgcgaaggacttgcggctcaggtacatgtcctggagctgcttctcgtcggtccatgacgcgttctccaccgccaggttcacgttggacgagtaggagcctgatgcgttcgagaacaccctt

SEQ ID NO: 101478 - DNA, 353 bp, Zea Mays
tcacatggagactgctgcaagaactcctccaaagtaaggcacaaccttttggaagccgtctggattgtgactgttgtacctgcagccagtagcacagttgctatgtctgactcgaatggcaacctctgcgccatgattatgttgccacctatggttgttgtgttccgaacaaatggcgaagccactttgcttaggtgattggcaatttttttgaagaccagatttccatctgacaacacctcaatggctgtagcctgtagagatggacacaaccgatccaagctcaattcccttaacgctgctgttgatgactgatagctctggtattcctttgatgtcaatgtacttgtcat

SEQ ID NO: 101479 - DNA, 133 bp, Zea Mays
tcagttaccacacatgctgccatctgaaaaggcattttcagctgttgtatctgctcttggcatctacaacaaagacgtgatagtagtttatgatggaaaggggctgttcagtgctgctcgtgtttggtggtaa

SEQ ID NO: 101480 - DNA, 1922 bp, Zea Mays
cgacgacgacagcagcggcagcattacctcgaggtccagccagcatgccgcggttgatgaagacgtcgaccaagacgccggccaccttggctgtagccgcgtcgttcctcctcctcctcgccacggcggcgggaggcgcctcaacgccggcaccgttcgactacgccggcgcgttcgacaagtgcctgcagttcttcgaggcgcagcggtccgggaagctccccgccgaccgccgcgtgcactggcgcggcgactccgccctcaccgacggcttctcccagggggtggacttggtgggcgggtactacgactcgggcgaccacgtcaagttcgggttccccatggcgtacgcggtgacgatgctcgcgtggggggtgctcgagttcgagaaggagatggtggccgccaacaaccaccagcgcgcgctcgatgccatccgctggggcaccaactacttcgtcaaggcccacaccgagcccaacagcctctgggtccaggtgggcgacggggacagcgaccacctgtgctgggagcgcgccgaggacatgtccacgccgcggacggcgttcaagatcaacatgacccacccggggtccgaggtcgccggcgagactgccgccgcgctggccgccgcgtccaaggccttccgcccgtacgactccatgtacgccgacctcctgctgctgcacgcaaagcagctcttcacgttcgccgacacgttcagaggcaggtacgatgactccctgcagagcaccaagaagttctacccttccggttctggctaccaggacgagctgctctgggcggccgcgtggctgcacgaggccaccggcgacgaggagtacctgcagtacgtgtcccggaacgccgaggagttcggcgggatcggctggtccgtgctcgagttctcctgggacaacaagtacgccggcctgcaggtgctcctctccaaggcgctcctcgccggcggcggcggcgagcacgccgacacgctgaggcagtaccaggcgaaggcggagttcttcctgtgcgcctgcctgcagaagaacggcgggcacaacatgaagctcaccccgggcgggctcctgcacacggacgagtggaacaacatgcagtacgtcagctccgccaccttcctcctggccgtctacgccgactacctcgcggcgtcgcgcggcgcgctcaggtgccccgacggcgaggtggcgcccggcgagatggtccggttcgccaggtcccaggcggactacgtcctggggaagaaccccaggggcatgagctacatggtcggctacggcagctacttcccgacgcacgtgcaccaccgcggcgcctccatcccgtccgtctacgccatggactccagggtcgggtgcatggacggcttcgacaggtactacaacagcaagggcgccgaccccaacgtcctccacggcgccgtcgtcggcgggcccgacgcggccgacggcttcgtcgacgaccgttgcaactaccagcaggccgagcccaccctcgcagggaacgcgccgatctgcggcgtcttcgctcgcctcgcctccgagccggccgacgcctccgataacagtaacaggccggcgccttcttctcactcgccgccatcaaaggggtctcctctggagttcgtgcacacggtgagcaactcgtggacgacgaatggggtggagtactaccggcacgtggtgacggcgaagaacacgtgcgggcaccccatcacgtacctgaagctgcacgtcaaggggctgtcgggccccatctacggcgtgtcggccgccaaggagaaggacacgtacgagctccccacgtggctcaccagcctcgcggccggcgagcagttcaccatcgtgtacatccagggcggccccgcagccaggttctccgtggccagctacaagactgcttga

SEQ ID NO: 101481 - DNA, 2746 bp, Zea Mays
ctccgctcggtctcggtctcgctctcgctgcactcgtcttccccgcccgtcccctgatctcagatccagaccaaacgaattccacactaaaccccccctgccccagacgtcgcgcgcatgaaatgaaaccctagtgagtagtgaccctgtccggatcactgcgtggcgccgccatggcaccctccgctctggcctccctcccggcgccgctccggtcactgcggctcaagacgaagcagcaggagctactgctccgcgtctcggcgctggcgctcatctacgttctcgccttcgccgtccgcctcttctccgtcctccgctacgagtctatgatccacgagttcgacccctacttcaattaccgcaccacgctcttcctcaccgagaacggctttagcgagttctggaactggttcgattccgagagctggtacccgctcgggcgcgtcgtcggggggactctcttcccgggtctcatggtgaccgccgcgctgctccaccgcctcctccgcgcgctctccctcgctgtccacatccgcgaggtctgcgtcctcaccgcgcctttcttcgccgccaacaccactctcgtcgcctacgcctttggccgcgagatctgggactccggggcggggctcgtcgccgccgcgctcatcgccaccgtccctggctacatctcccgctccgtcgcggggtcctacgataacgagggcgtcgccatcttcgcgctgctgctcaccttctacttcttcgtgcgcgccgtcaacaccgggtcgctcgcctgggcgcttgcctcggcgttcggctacttctacatggtgtcggcatggggaggctacgtgttcatcatcaatctcgtcccgctctatgtgcttgtgctgcttgttaccgggaggtactcacaaaggctctacgtggcctacaattgcatgtatgtgcttgggatgttgcttgcgatgcagatccgttttgttggattccaacatgtgcagtccggagagcacatggctgctatgggagtcttcttccttttgcaggttttcttcttcttggactgggtaaaatacctgctaaacgatgccagactgtttaagtcattccttcgaattacccttacatgtgtgattactgttggcaccctggctcttggtattggcactgcatctggttacatctctccttggacaggacgattttactccctgctagatcctacctatgcaaaggaccatataccaatcatcgcatctgtttctgagcatcaaccaacagcatggtcatctttcatgtttgacttccacatcctcctttttctgttcccagctggcctttatttctgtttcaagcgcctgtcagatgccacaatatttattgttatgtatggcctcacaagtatgtactttgctggtgtgatggtccggttaattcttgtggcagcaccagccgtttgccttattagtgctattgctgcatctgctacaataaaaaacctaaccactttgatcaggacaaagagcagaagtccacagactacttctgggaaaacaactggctcaaagtcagctgctaagggtgtagttgatcaatctttaccattccaacacaatgctgctattggtcttcttctgggtgccttttacttgctcagtaggtatgccatacactgcacttgggtgacatctgaggcttactcttctccatctatagttttggccgcaaggggtcataatggtggaagagttatctttgatgattatcgtgaggcatactattggcttcgtcagaacactcctcctgatgctaagattatgtcttggtgggactatggataccaaattacagctatgggtaacagaactgtcattgttgataataatacatggaataacacacacatagctactgttggacgtgctatgtcatcttatgaagatgaagcatatgagatcatgcagtcacttgatgtgaactatgtgcttgttgtatttggaggtgttactggatattcttcagatgatatcaacaagttcttatggatggtacgtattggtggaggggttttccctgtaatcaaagagccagattaccttgttaacggggagtatcgtattgacaagggggcagcaccaaaaatgctgaactgcctaatgtacaagctttgttactaccgatttggagaacttaccacagaatatggaaaacctccagggtatgaccgtgtacgaggagtggagattggcaacaaagatataaagcttgaatacttggaagaggcatttacaacttcaaactggatagtgcgcatatacaaggtgaaacccccaaagaacaggtcctgaggcgtcatcgctagtgaagtggttggagagctattacctcagacaagtacatattgtcaaaaaatctgaatctgagtggcctcaggagagggcggggtcgttgttatgggcacctgctttggcgagagtgactattagcagccatagcatcagttcagctcgaagtcaagaacatctttcccctcattcggtttaggtgtaatcggtgaggaaccaattgtggcaacagcgagtaatttttaattgttgagcatccatggccgaactattaaagtttttgtaggcgcaatgacatatttgaatagaaacttgtctttgatcaatccaaggcaatggattttttcggcactaaacacaaaatatgaactgttaatctgttctctctattattatatgttttcatggtccaa

SEQ ID NO: 101482 - DNA, 2193 bp, Zea Mays
aaaagctatcgcttatcatgctaggctaggcagctttgttgagaaggagcacgggggaagcccggcaagatcactacacgtggcatgtatgtccaaaactccaaatgccgagtagacagtggcggcggtagagagcgctgttaccttgcggggtgacgggggcaccttcttcggcgcggctgcagctgcagcatcggcggccgcgccggacgcggaggccgtgctggcgtaccgctcgggcgccgcgccgcgccgcgggaagccgcgaagtagggcgttgcggagggtgcgtcgccacgcgagtgcggtggaagatgacatcgggaacgcgaggggagaccaggcgcgggaagggcgggaggactgtgaagagcgcgaggagggcggcggcggcggcggcgctgatgctgatgctggtgcaggggctgatgagccggattcccgttcggcgtggccgcgtggggagcaagcagaagtgcagaactgcacaaggagagggcccacataaccatttctatgatattgcgcgtgtctcagtgtatcggcccagtttttcatgggctgacccggttatgtggccttgttagttttcgcctaatttcaaataacagcaatttcttagtggcccgtacactctgcagcagtgcggtgcgggcgtgcggcctccctttttttctccagttcctccggcggcggcgtgcttggcggtgcgccaggtgcccagatctccaccatcttagtcgccggcgacgagcatcaccaggttcccgatgaccatggcgcagcgcacgatgtgcctgcttcggcggtccattgggtttacagggccgcaggcacagagagccctgagtaccactgccgcgccggcggcggagggtgcagccgtggctgaagctacggcgaaggaggcgaagaggaggaggaagaatctgtttgacgtagtgcagttcctgccagagtggggcattggatacaaggttgccaagaccacctggcgtgatgtctcctatcagatcaccaagatcaacctgtacaaggatggtcggcatggaaaggcgtgggggcttcggtacaaggcaggtgtgcaagctgcagacaccccaactaggatcagcggtgttaacaaacgtgggtggaagtacataaaagaatcacagaagaaactacaagaagcccccaaagtagacgtagctgttgctgctgcctagtttgtagttacatgcatgtttgttgtaagatgattcggtaaatctttagatggctgttgccagggtgagaacagggaaccactttttttttggatcgactctatacttttttgtcgatgacgactgaacctctctgcaacatgtccagtttctcttcttttcttttccttatggaacgaacctttaccgtaatgtactgatgcagaagaactgtgttgattgtggcaatctagtttccattcaaatgcaatccttgtttcattctgagccaatgttcctaggtttcagccgttcgttttccaagttgaactattttgttcctcaccatgttcctaggttttcattctacactgcggaggcgattgactggtattctcagtcagatgatgctggacggagtcatgcctacacgttcgcaacgcaggacaagtttggtgttcagccccgcgaggaccactacatggtcgatctgggactggtgttctggtatggcaggcggtgctggttgcctgccatctttcacggcagcgaggctgtaggcactcatctaattttggaagcagcaagcgagcgaacaaacaaacataccattgtgtgtcacaaagatgtcgaaaaacaaacttgcttgtatcaaaattagctcttcatgtatactgtaccaaatatacgcaaatgaccccgcagcatagttaattacaagctaaactcataaaaggaaattccttcaacattcccattggcatcctcggtggtcggtgctgaagccgcaggcaatggtcttaagtgactgtcgtagtcaagagaggttccaggtattgcttgaacttatcttttgtcattgccccttctcgccggctatctgctacctctcggccattcttgaagaaaatcaaagtcgggagaccatagaccttgtactcttcaatcagctgcggattggcgtcgtgatcgatcttgacgatttttactcgcccgtcatattcct

SEQ ID NO: 101483 - DNA, 1408 bp, Zea Mays
tgcaattttttgtaataactaagaaaaacatctatgaaatataagatggtgttttagtgttttccaaatactaatgcagcttttaatttttgtttggttgtttttacttggtgcactgaacataagcatagtttggatgctgaggcagccaaatcactctctctacatgaaggcccccctctatccagggagattttatgtacaatgccagatttcggaactgtcctaaggattttttcagatagatttgtcaataaagtatcatatatgcaaaagaacatatattgggccaggttctggaacattacttgcaaacaaaactttggcatttggaaaggtactttctcggactccggtggagttcgcctattatcaaacaaagatgatagcgttgttgatcgtctaaagatgtatgacagccgcatcgccaaccgagttcgtcgtcggccgatggcaagcatcccctccagtgttactgatgtagaatacgaggatgcaggttacgcttcattaatgaagtctttaactcatcatgatgtgacgcacaaattgagaaccttggtccgtgttgtggcagcacatccatgtgaagctagtttgctttcaactggtaactgtcatcttcggttgactcttgaggatcctacagcgagaattcatgcgtatgtccacaagaatgatttggtaatgttactaaacaacccttatgcttgattttttcccccttgcctacagaccagcctaggtattcatcactggtgaaaaaaagaatatcagtgttgatggtaaaaaaaaagttatggatgcttaaaagtcttgctcatttcttggcaggtcggattctttggtggtggttttttgacagcagaagtgatagtaaaaaagatgaacatggtactgggcatcccggaaccacaaggcagcgtggaagttgccccctcgaccaggaatccaccttggatatggtgttgcttgatgtcatactatatggacaaaaacgatccctgggtcagcagaaagtaccggatctatagcacagccatcagggattgagcagagggatgctgctggaatgtgcaggaacaaacttgtaaatgaatgggacagatgctgtgtagtattggcatcttgcttgtagaagaggccatatgcttttgcaggtgcaatcagtgaatcattccatactgaacactgagaatagcacctcgggttcattctgtatgtgcctacactctagattgtcttttgggtgctcatcacgaaacgtgagcatatcttttggaaacagagacctgcgtttgattcctgtgcttgttatgttgtgattgatcattggggggaggttgagcttttgagccagtataaaaatactgaccggaccatcaatattattgatcattgggagtat

SEQ ID NO: 101484 - DNA, 2225 bp, Zea Mays
ctctccctttaaatcgagcgccgcttcctctccgccgctttctctccccttcactcgagcgccgcttcctctccccttccatcgagcgcagcgcctgcgccgccgccaccactccgcaccgccgccagttccccacttcctccccacacccgaatcggattgaagccagaaggcaaggtgaagagtgggcttgggtaacggttgcaaagagatatccccaacagttgcagtcactcgcatccagtcggctcagctatggaggaggactcatcagcgatggagccgaataggctgcgcgaggccgaggcggcggctggggagctgaagaggctgcgcgaggccgggcagtctcagtacatgtaccggtctatcgccgacgccagggttgtcggcggccgggtctgcctcttcgccgtcgtctccgagatcggcgctaccgtccacagccgtggcacggatttcactgttacgttgagggtaatagatgaatcatacaagtctggaatatctgtaactttttttgctgacagcactgcactattgccttgtgtgaagtcgtgtggagatgtgatcagtctccataacgtcgtgtccatatcagacttctataagatatcatgacagcgaacacgacaaagattttttaaatcagatgagaacgtggctccctcaaggtctgaaggatttcacttcaaataattccgaattgtatttaatgaatttgaagtccgattctacttttgatctagtatgcaaggtttttcatgtacatgtggagaacaacaattcaatattttatgtttgggatggaactgatacccctgcagctgagtttccagcaatgtaagattttagatttgttttgcaattttttgtaataactaagaaaaacatctatgaaatataagatggtgttttagtgttttccaaatactaatgcagcttttaatttttgtttggttgtttttacttggtgcactgaacataagcataggtaatgaaaacataataagttttttcttagaaaaaaaatatttggtgatgtcagtcatgtcactattttcacttaatttacctgtttttgattggtgaacatatagtttggatgctgaggcagccaaatcactctctctacatgaaggcccccctctatccagggagattttatgtacaatgccagatttcggaactgtcctaaggattttttcagatagatttgtcaataaagtatcatatatgcaaaagaacatatattgggccaggttctggaacattacttgcaaacaaaactttggcatttggaaaggtactttctcggactccggtggagttcgcctattatcaaacaaagatgatagcgttgttgatcgtctaaagatgtatgacagccgcatcgccaaccgagttcgtcgtcggccgatggcaagcatcccctccagtgttactgatgtagaatacgaggatgcaggttacgcttcattaatgaagtctttaactcatcatgatgtgacgcacaaattgagaaccttggtccgtgttgtggcagcacatccatgtgaagctagtttgctttcaactggtaactgtcatcttcggttgactcttgaggatcctacagcgagaattcatgcgtatgtccacaagaatgatttggtcggattctttggtggtggttttttgacagcagaagtgatagtaaaaaagatgaacatggtactgggcatcccggaaccacaaggcagcgtggaagttgccccctcgaccaggaatccaccttggatatggtgttgcttgatgtcatactatatggacaaaaacgatccctgggtcagcagaaagtaccggatctatagcacagccatcagggattgagcagagggatgctgctggaatgtgcaggaacaaacttgtaaatgaatgggacagatgctgtgtagtattggcatcttgcttgtagaagaggccatatgcttttgcaggtgcaatcagtgaatcattccatactgaacactgagaatagcacctcgggttcattctgtatgtgcctacactctagattgtcttttgggtgctcatcacgaaacgtgagcatatcttttggaaacagagacctgcgtttgattcctgtgcttgttatgttgtgattgatcattggggggaggttgagcttttgagccagtataaaaatactgaccggaccatcaatattattgatcattgggagt

SEQ ID NO: 101485 - DNA, 2247 bp, Zea Mays
ctctccctttaaatcgagcgccgcttcctctccgccgctttctctccccttcactcgagcgccgcttcctctccccttccatcgagcgcagcgcctgcgccgccgccaccactccgcaccgccgccagttccccacttcctccccacacccgaatcggattgaagccagaaggcaaggtgaagagtgggcttgggtaacggttgcaaagagatatccccaacagttgcagtcactcgcatccagtcggctcagctatggaggaggactcatcagcgatggagccgaataggctgcgcgaggccgaggcggcggctggggagctgaagaggctgcgcgaggccgggcagtctcagtacatgtaccggtctatcgccgacgccagggttgtcggcggccgggtctgcctcttcgccgtcgtctccgagatcggcgctaccgtccacagccgtggcacggatttcactgttacgttgagggtaatagatgaatcatacaagtctggaatatctgtaactttttttgctgacagcactgcactattgccttgtgtgaagtcgtgtggagatgtgatcagtctccataacgtcgtggcaaaacgtatactgaatgcagtccatatcagacttctataagatatcatgacagcgaacacgacaaagattttttaaatcagatgagaacgtggctccctcaaggtctgaaggatttcacttcaaataattccgaattgtatttaatgaatttgaagtccgattctacttttgatctagtatgcaaggtttttcatgtacatgtggagaacaacaattcaatattttatgtttgggatggaactgatacccctgcagctgagtttccagcaatgtaagattttagatttgttttgcaattttttgtaataactaagaaaaacatctatgaaatataagatggtgttttagtgttttccaaatactaatgcagcttttaatttttgtttggttgtttttacttggtgcactgaacataagcataggtaatgaaaacataataagttttttcttagaaaaaaaatatttggtgatgtcagtcatgtcactattttcacttaatttacctgtttttgattggtgaacatatagtttggatgctgaggcagccaaatcactctctctacatgaaggcccccctctatccagggagattttatgtacaatgccagatttcggaactgtcctaaggattttttcagatagatttgtcaataaagtatcatatatgcaaaagaacatatattgggccaggttctggaacattacttgcaaacaaaactttggcatttggaaaggtactttctcggactccggtggagttcgcctattatcaaacaaagatgatagcgttgttgatcgtctaaagatgtatgacagccgcatcgccaaccgagttcgtcgtcggccgatggcaagcatcccctccagtgttactgatgtagaatacgaggatgcaggttacgcttcattaatgaagtctttaactcatcatgatgtgacgcacaaattgagaaccttggtccgtgttgtggcagcacatccatgtgaagctagtttgctttcaactggtaactgtcatcttcggttgactcttgaggatcctacagcgagaattcatgcgtatgtccacaagaatgatttggtcggattctttggtggtggttttttgacagcagaagtgatagtaaaaaagatgaacatggtactgggcatcccggaaccacaaggcagcgtggaagttgccccctcgaccaggaatccaccttggatatggtgttgcttgatgtcatactatatggacaaaaacgatccctgggtcagcagaaagtaccggatctatagcacagccatcagggattgagcagagggatgctgctggaatgtgcaggaacaaacttgtaaatgaatgggacagatgctgtgtagtattggcatcttgcttgtagaagaggccatatgcttttgcaggtgcaatcagtgaatcattccatactgaacactgagaatagcacctcgggttcattctgtatgtgcctacactctagattgtcttttgggtgctcatcacgaaacgtgagcatatcttttggaaacagagacctgcgtttgattcctgtgcttgttatgttgtgattgatcattggggggaggttgagcttttgagccagtataaaaatactgaccggaccatcaatattattgatcattgggagt

SEQ ID NO: 101486 - DNA, 1990 bp, Zea Mays
ctctccctttaaatcgagcgccgcttcctctccgccgctttctctccccttcactcgagcgccgcttcctctccccttccatcgagcgcagcgcctgcgccgccgccaccactccgcaccgccgccagttccccacttcctccccacacccgaatcggattgaagccagaaggcaaggtgaagagtgggcttgggtaacggttgcaaagagatatccccaacagttgcagtcactcgcatccagtcggctcagctatggaggaggactcatcagcgatggagccgaataggctgcgcgaggccgaggcggcggctggggagctgaagaggctgcgcgaggccgggcagtctcagtacatgtaccggtctatcgccgacgccagggttgtcggcggccgggtctgcctcttcgccgtcgtctccgagatcggcgctaccgtccacagccgtggcacggatttcactgttacgttgagggtaatagatgaatcatacaagtctggaatatctgtaactttttttgctgacagcactgcactattgccttgtgtgaagtcgtgtggagatgtgatcagtctccataacgtcgtggcaaaacgtatactgaatgcagtccatatcagacttctataagatatcatgacagcgaacacgacaaagattttttaaatcagatgagaacgtggctccctcaaggtctgaaggatttcacttcaaataattccgaattgtatttaatgaatttgaagtccgattctacttttgatctagtatgcaaggtttttcatgtacatgtggagaacaacaattcaatattttatgtttgggatggaactgatacccctgcagctgagtttccagcaattttggatgctgaggcagccaaatcactctctctacatgaaggcccccctctatccagggagattttatgtacaatgccagatttcggaactgtcctaaggattttttcagatagatttgtcaataaagtatcatatatgcaaaagaacatatattgggccaggttctggaacattacttgcaaacaaaactttggcatttggaaaggtactttctcggactccggtggagttcgcctattatcaaacaaagatgatagcgttgttgatcgtctaaagatgtatgacagccgcatcgccaaccgagttcgtcgtcggccgatggcaagcatcccctccagtgttactgatgtagaatacgaggatgcaggttacgcttcattaatgaagtctttaactcatcatgatgtgacgcacaaattgagaaccttggtccgtgttgtggcagcacatccatgtgaagctagtttgctttcaactggtaactgtcatcttcggttgactcttgaggatcctacagcgagaattcatgcgtatgtccacaagaatgatttggtcggattctttggtggtggttttttgacagcagaagtgatagtaaaaaagatgaacatggtactgggcatcccggaaccacaaggcagcgtggaagttgccccctcgaccaggaatccaccttggatatggtgttgcttgatgtcatactatatggacaaaaacgatccctgggtcagcagaaagtaccggatctatagcacagccatcagggattgagcagagggatgctgctggaatgtgcaggaacaaacttgtaaatgaatgggacagatgctgtgtagtattggcatcttgcttgtagaagaggccatatgcttttgcaggtgcaatcagtgaatcattccatactgaacactgagaatagcacctcgggttcattctgtatgtgcctacactctagattgtcttttgggtgctcatcacgaaacgtgagcatatcttttggaaacagagacctgcgtttgattcctgtgcttgttatgttgtgattgatcattggggggaggttgagcttttgagccagtataaaaatactgaccggaccatcaatattattgatcattgggagt

SEQ ID NO: 101487 - DNA, 2057 bp, Zea Mays
ctctccctttaaatcgagcgccgcttcctctccgccgctttctctccccttcactcgagcgccgcttcctctccccttccatcgagcgcagcgcctgcgccgccgccaccactccgcaccgccgccagttccccacttcctccccacacccgaatcggattgaagccagaaggcaaggtgaagagtgggcttgggtaacggttgcaaagagatatccccaacagttgcagtcactcgcatccagtcggctcagctatggaggaggactcatcagcgatggagccgaataggctgcgcgaggccgaggcggcggctggggagctgaagaggctgcgcgaggccgggcagtctcagtacatgtaccggtctatcgccgacgccagggttgtcggcggccgggtctgcctcttcgccgtcgtctccgagatcggcgctaccgtccacagccgtggcacggatttcactgttacgttgagggtaatagatgaatcatacaagtctggaatatctgtaactttttttgctgacagcactgcactattgccttgtgtgaagtcgtgtggagatgtgatcagtctccataacgtcgtgataaagaaatatagagatttctttgtgcaatttgacaaaaagtactcttcattcgcgctgtttgaaggcaaaacgtatactgaatgcagtccatatcagacttctataagatatcatgacagcgaacacgacaaagattttttaaatcagatgagaacgtggctccctcaaggtctgaaggatttcacttcaaataattccgaattgtatttaatgaatttgaagtccgattctacttttgatctagtatgcaaggtttttcatgtacatgtggagaacaacaattcaatattttatgtttgggatggaactgatacccctgcagctgagtttccagcaattttggatgctgaggcagccaaatcactctctctacatgaaggcccccctctatccagggagattttatgtacaatgccagatttcggaactgtcctaaggattttttcagatagatttgtcaataaagtatcatatatgcaaaagaacatatattgggccaggttctggaacattacttgcaaacaaaactttggcatttggaaaggtactttctcggactccggtggagttcgcctattatcaaacaaagatgatagcgttgttgatcgtctaaagatgtatgacagccgcatcgccaaccgagttcgtcgtcggccgatggcaagcatcccctccagtgttactgatgtagaatacgaggatgcaggttacgcttcattaatgaagtctttaactcatcatgatgtgacgcacaaattgagaaccttggtccgtgttgtggcagcacatccatgtgaagctagtttgctttcaactggtaactgtcatcttcggttgactcttgaggatcctacagcgagaattcatgcgtatgtccacaagaatgatttggtcggattctttggtggtggttttttgacagcagaagtgatagtaaaaaagatgaacatggtactgggcatcccggaaccacaaggcagcgtggaagttgccccctcgaccaggaatccaccttggatatggtgttgcttgatgtcatactatatggacaaaaacgatccctgggtcagcagaaagtaccggatctatagcacagccatcagggattgagcagagggatgctgctggaatgtgcaggaacaaacttgtaaatgaatgggacagatgctgtgtagtattggcatcttgcttgtagaagaggccatatgcttttgcaggtgcaatcagtgaatcattccatactgaacactgagaatagcacctcgggttcattctgtatgtgcctacactctagattgtcttttgggtgctcatcacgaaacgtgagcatatcttttggaaacagagacctgcgtttgattcctgtgcttgttatgttgtgattgatcattggggggaggttgagcttttgagccagtataaaaatactgaccggaccatcaatattattgatcattgggagt

SEQ ID NO: 101488 - DNA, 762 bp, Zea Mays
ctctccctttaaatcgagcgccgcttcctctccgccgctttctctccccttcactcgagcgccgcttcctctccccttccatcgagcgcagcgcctgcgccgccgccaccactccgcaccgccgccagttccccacttcctccccacacccgaatcggattgaagccagaaggcaaggtgaagagtgggcttgggtaacggttgcaaagagatatccccaacagttgcagtcactcgcatccagtcggctcagctatggaggaggactcatcagcgatggagccgaataggctgcgcgaggccgaggcggcggctggggagctgaagaggctgcgcgaggccgggcagtctcagtacatgtaccggtctatcgccgacgccagggttgtcggcggccgggtctgcctcttcgccgtcgtctccgagatcggcgctaccgtccacagccgtggcacggatttcactgttacgttgagggtaatagatgaatcatacaagtctggaatatctgtaactttttttgctgacagcactgcactattgccttgtgtgaagtcgtgtggagatgtgatcagtctccataacgtcgtggtatagcataaaactctatttaatatgcaattcgcccttgattattcctcgaagttataaaagtgtcttttttatgtgttgttatttaagcatattttattttctcgtcattttttggaattttagtaacacatctgcactggtgcaatgcctactttaatctgtagataa

SEQ ID NO: 101489 - DNA, 820 bp, Zea Mays
tacagcacattccaccattttcatgtagaaaagccttttaactgaactccgtagatacaaatcttattaccactaacatcaatggagtcctctccctcctcatttaccagctcaaaaactatgtaaacaaaaaaaaagacatcttgcagctgcaaacaacagaagcgggcttacaacatacagtaattatctgtctccgaaaaatgcagttaaaaaggaggcagaaaagttgtttcataggtcccagcggtgagaaccacccccctgggacttaggagtcaagtcacggtgatcacttcacgatgcagatcttgatgacggaggcgacgccgatacgatggagagccacaatggcatcaccaggcttgcaaagttgcttctgcacggccgacttgagcgcagcctccaggatcacctcggttgactctgaatccgtagccttcgcggagccctcagcgaggaggggaatgaggcctctatagatcaggctgtgcctagctgggccctcggagctgatggtccagtcgaaagaatccgtcgttagcacgggtaccacaacagagaggatgggaaccctggggcggtacttggcgaccagtttggccgtggtgccaccgcgagtcaagacgacgatcagtgcggccttggccttgttggcagttcgcacagcagatgatgcaagagactccagagggctcattggaagaggcgcggacctgatcatggccttgaaaactgcctcgtggtccagggaagactctgcctcgatgcagatacgagccatgatcttcacagccacctcggggtaggctccagcagc

SEQ ID NO: 101490 - DNA, 379 bp, Zea Mays
cgtggtaccccctccaccgcaaaatagcacaggaggacagacattggttaaggactgcgccatgcgatgaactggtgtttttatgcttctagtggcttgatttcaggcgcgcaatggggtgttggcagggaggagctgacaatatttcagatttctttaatggaagtggagaatttgtactatttatgccaattatccgtctaatacgaaggcaggattttagtaattgtactccgtcttattctatagagtatatactggttgttgattttggatccgcacgctgtgacctaagtctcgcatccaagggtccctttggaacaaaggaaacatgaaggatttttttatgatccattccctatcggaaaaattcccacgt

SEQ ID NO: 101491 - DNA, 1632 bp, Zea Mays
tttctctcgtcccaaaagcttgcttcgcgctttcgaaaaaccacaccaagtcgggaaggcagaggcacagggagggagccgacagccgagagcaccttccgattccgcccaagaaatctccacccaatctctctgtcctctcctcccttctcatcatttcgccatgctgccatcgcacctcaacggccactccgccctcgggcgccgtcgcccgcgcctctccgccgccgccggggagtctccggcggcagcgggggtagaggcggcggctccgctggaggagcacgaccgcatctacttccaggcctactcccatctcggcatccacgagactatgatcaaggaccgcgtaaggaccgatgcttaccatgcagcgatcatgcgccaccagaaatttatcgaggggaaggttgtgctggatgtggggtgtggtactggaatactctctgtgttctgtgctcgtgctggcgcaaagcgagtgtatgctgtcgaagcctgtgaaattgttgtccaggctcgtgaaattgtaaaagcaaacaacctaactgatcagattgtggtcatccatggacgtgttgaggatgttgaccttgaggaaaaggttgatgttataatatcagaatggatgggctatatgcttctctatgagagtatgctgccaagcgtcctatttgcaagagataaatggcttaagcccgggggtcttattcttccttctcatgctacgctcttcatggcccccgtaacaaatcgtgagagatatgaagacagcgtcgatttctggcgtgacgtctatggcataaacatgtctgctcttgtgccacttgccaaaaagtttacatctgaggaaccctccattgaaacaattggtggagagaatgttataagttggccatctgtgttcaagcgcttcgattgctataattttacagctgaggaattcaaatctatcacttcaaaatacaaagtttcatcaatgatgttagctcccattcatggctttggtttctggtttgaggtggagttcaacgagcctatagagtcctctcataattttccttccagtttggatccacttgagattatacagaagaaaaggagacgatcctcagaagatatagttctgtccacagccccagaggatgagccaacccactggcaacagaccattttgtatttcccggatcctatagaggtgaagcaggaccaaattatagaaggttctgtaacagtgtcccaaagcgaggagaatccacgttttctgaatattcatctagagtgcttcacaggaggacagacattggttaaggactgcgccatgcgatgaactggtgtttttatgcttctagtggcttgatttcaggcgcgcaatggggtgttggcagggaggagctgacaatatttcagatttctttaatggaagtggagaatttgtactatttatgccaattatccgtctaatacgaaggcaggattttagtaattgtactccgtcttattctatagagtatatactggttgttgattttggatccgcacgctgtgacctaagtctcgcatccaagggtccctttggaacaaaggaaacatgaaggatttttttatgatccattccctatcggaaaaattccc

SEQ ID NO: 101492 - DNA, 98 bp, Zea Mays
tttgctgaattggtggaaggttaattcacatagatttccagtgctgaatatatactactgctgctggttgagaattgaattgaagggtgggcttgcgt

SEQ ID NO: 101493 - DNA, 3217 bp, Zea Mays
atggcgaccaacaccaagcgcgcctacaagctccaggagtttgtggcgcatgcgtccaatgtgaactgcctcaagattgggaggaagacctcacgggttcttgtcaccggaggagaggatcataaggtcaatctttgggctattgggaagcccaattcaattctgagtttatcagggcacacaagtgctgtggagtcggttggttttgattccaccgaagtttttgtggctgcaggagcagccagtggaacaataaaactatgggatttggaggaggcaaagattgtccgtactcttactggacatagatcaaattgtatgtcagttgatttccatccttttggggaattctttgcctctgggtcattggacactaatctgaagatatgggatataagaaggaagaattgcatccatacatacaaaggtcacacacgaggagtgaatgctattagattcacacccgatgggcggtgggttgtgtctggtggcgaagataatatagtaaagctctgggatcttacagctggaaagttattacatgaattcaagtgtcatgagggtcagatccagtgcatagattttcatccccatgagttcctcctggcaacaggttcagctgataaaactgtcaagttctgggatttggagacatttgagttgattggatctacaggacctgagacgacaggtgttcggtccatgacattcaatcctgacggaagaactctgttatgtgggttgcacgaaagcttaaaggttttctcctgggagccaataagatgccatgatactgtcgatgtgggatggtctagacttgctgatttgaatgtccacgagggaaaacttcttggttgttctttcaatcaaagttgtgttggaatatgggttgttgatctgacgcgtcttgagtcatatgcaacgggtacttcaacaaaattaaatggccattctgaattgaagactgtgtctagtggcactatgcctttacaaaatgatagtggttcaagggctaacatagggcaatcatcagtcttgcaaagttcagagaataacttaaaagcttcctcaggaagactgtcggtttctcagaactcagattctgctcccaaagagactaaatcaacaccctctagcgggttggtcccaagcacaccacaaagggctggatttagctccaataatagatctgttggaaattcaacttttcaatctggtggtaccactaccaccttgaagagaagttcgttgcggagtaacagtgcctctaatgttcacaatttcagtaaagctgatatagtgcctgtcattgttcccagagctagctcaggaggggagttggttacgggttctagaagtgatgctggtgatgtggcacctgttctccctaaggtaaccagaagggctgatccttctagtgattctagaaaagaaagtaatgatgtggaacctgttattcctagagcaagctcaacaatggaaatagcctctgattcagcacccatttctacttccaagtcaggcagaaggttggaggctgcccctgattcaaaaaaagaaagtgctgatacagcacctgctgttcccaatcccagggcaaatgcaagaatggagatggcctctgattctgcacctgctcttttaaagacaaacaaaaagctagattctggtactgattcaaagaaagaaagtgctgatgcagtacctgttattctgatttctgattcaaggagagaaccctctgctggaagagtatcaccattcagaatccagtcaagatatgctgagctgcggaagctagcccatgccaaaattgacagaggaagtaaaactactggaacagatgacttcaattgccaaatatttcttccccgtaaaaatggtgtttttcaaacaataagttctgaagaaacccgtaaagatgtaaaatgtggtccagttgacaggacggaattttcaaattcatcagaaccaaatgcaagtgtccgcagtgagaattatgtttctagaatgcgcaaaccacgagataactgctatattgaagtttcaagaaaagggagagcaaggtcaagtgtctgtaattgggaagggcgggaccagtcccctagtcacgaagaaccgatgacagccagttcttcgctggctcctacaggccgtccaaattcatctagaggaagcagtcaagcttctgaaactccaatcatagctaatgatgaagatgttatatctcttttcatggaacaacatgagttatttctaagctcgacaaagtctcggctgacaaaattgcagatcattcatcaaatgtgggaaagaaatgacatcaggggtgtactctctgcgatggaaaggatgggtgatcatgctgtctgtgctgatatggctagcgttctgatggaaaaaagtgatgtaatcacacttgatttatgtacctctatcctacctgccgccactgatcttctggagagtaaaattgacagacacttaggcgtcgcattggaattgttggtgaagcttgtaaggacttttggtccaatgatccattcaacagtatcatcaggtccttgtgttggtgtagaccttgaggcagagcaaaggagggagcgctgcaatttatgcttcattgaattggagaatgccaaaaataagcttccatctcttacaagaagaaaaggggcagttgcaaatgctgcacaagagcttgcgctcgtcttccaggaaatcatgagctgactgacgacatactagacacacagaattagatgggacgttcttccctctgctggcaccgagattggatatcagctgcccatggagcgctaagagctactcagtcttagcgccgtcatcaagctccaaggccacagcagcggtgaagggcattttgctgctgctattcccgcagtctgtacacatgctaacacataatccgtgtcatttgtgaagagaagctgctgccatggacaatggacttcagccacaatattatgtggatgtcgtttcatgggctgccggcgatgctacaggtcccgatcgaatgatgatcagcagatgggaactcgtagttccttgctgtctgcagcacctttctcatgtaccgttagcatgtgcgtgtttgtggttgggttgggttgtttggccgatttactgatcattggcgaatgaagtgagccatgtacatcattttgaagaattaatatcttttcttcttctgagt

SEQ ID NO: 101494 - DNA, 2153 bp, Zea Mays
cggtgtcgccgtgatctgcgatgagattgggcccggcggcgcggtactcgctgcggaggtagacggccatggcgaccaacaccaagcgcgcctacaagctccaggagtttgtggcgcatgcgtccaatgtgaactgcctcaagattgggaggaagacctcacgggttcttgtcaccggaggagaggatcataaggtcaatctttgggctattgggaagcccaattcaattctgagtttatcagggcacacaagtgctgtggagtcggttggttttgattccaccgaagtttttgtggctgcaggagcagccagtggaacaataaaactatgggatttggaggaggcaaagattgtccgtactcttactggacatagatcaaattgtatgtcagttgatttccatccttttggggaattctttgcctctgggtcattggacactaatctgaagatatgggatataagaaggaagaattgcatccatacatacaaaggtcacacacgaggagtgaatgctattagattcacacccgatgggcggtgggttgtgtctggtggcgaagataatatagtaaagctctgggatcttacagctggaaagttattacatgaattcaagtgtcatgagggtcagatccagtgcatagattttcatccccatgagttcctcctggcaacaggttcagctgataaaactgtcaagttctgggatttggagacatttgagttgattggatctacaggacctgagacgacaggtgttcggtccatgacattcaatcctgacggaagaactctgttatgtgggttgcacgaaagcttaaaggttttctcctgggagccaataagatgccatgatactgtcgatgtgggatggtctagacttgctgatttgaatgtccacgagggaaaacttcttggttgttctttcaatcaaagttgtgttggaatatgggttgttgatctgacgcgtcttgagtcatatgcaacgggtacttcaacaaaattaaatggccattctgaattgaagactgtgtctagtggcactatgcctttacaaaatgatagtggttcaagggctaacatagggcaatcatcagtcttgcaaagttcagagaataacttaaaagcttcctcaggaagactgtcggtttctcagaactcagattctgctcccaaagagactaaatcaacaccctctagcgggttggtcccaagcacaccacaaagggctggatttagctccaataatagatctgttggaaattcaacttttcaatctggtggtaccactaccaccttgaagagaagttcgttgcggagtaacagtgcctctaatgttcacaatttcagtaaagctgatatagtgcctgtcattgttcccagagctagctcaggaggggagttggttacgggttctagaagtgatgctggtgatgtggcacctgttctccctaaggtaaccagaagggctgatccttctagtgattctagaaaagaaagtaatgatgtggaacctgttattcctagagcaagctcaacaatggaaatagcctctgattcagcacccatttctacttccaagtcaggcagaaggttggaggctgcccctgattcaaaaaaagaaagtgctgatacagcacctgctgttcccaatcccagggcaaatgcaagaatggagatggcctctgattctgcacctgctcttttaaagacaaacaaaaagctagattctggtactgattcaaagaaagaaagtgctgatgcagtacctgttattctgatttctgattcaaggagagaaccctctgctggaagagtatcaccattcagaatccagtcaagatatgctgagctgcggaagctagcccatgccaaaattgacagaggaagtaaaactactggaacagatgacttcaattgccaaatatttcttccccgtaaaaatggtgtttttcaaacaataagttctgaagaaacccgtaaagatgtaaaatgtggtccagttgacaggacggaattttcaaattcatcagaaccaaatgcaagtgtccgcagtgagaattgtatgatctgcactcatttatatgttttatgtgctcctaccactttcattcacatattgtttcacaattgtcagtggttcttgatt

SEQ ID NO: 101495 - DNA, 92 bp, Zea Mays
ggtaagaaaaaatggcatttcactggagcaaaacaattggcgacactatatagaattcaacttagcctaccaactatctacaggttcacatg

SEQ ID NO: 101496 - DNA, 475 bp, Zea Mays
tcgttgacattgtacatgcattttgcagtgtggggctgatgaatgtcattgtgaaagaccgggagaacatgtcagtgacagatgtagaggaatttgaaaccgtgctggtggtggatctgcctccttcagtcgacgaatacattgagatcctcactggggctgctcgtcatgtgattggaggcgaagtgcatagcatattctgtaacactgatgcttctattgcaaaacctctggctcagcttcttgcagactgcggtcaggtggtgcatgaattccttaaaagcctgaagtcttcatagcagagacttgtgtacgcaatcagagtagtcagatcacatcgtggcgatttagatcattttggagcaattttgatattttcttgttggactgctggtggcgacatggaagtagcatatagatgggccggacaactatgcttaaggtgttgaattatctcctgaaaattatagtgaaa

SEQ ID NO: 101497 - DNA, 1335 bp, Zea Mays
cagggccgggccagcgctagacactcagctgattgcactgagcagtgagcactagctaactctcggccgaatcgctgggcgtctattaagccgacgccaacgacgacggctcctcggcatgcgaggtcctgctcgcccgggggatggcgcctgcagcttcgatcctctcggtcaccgccgtcgccggttccaagcgtccggccgcttccgacgctgagctcccgctcctcgacctcgactcctcctcgctccaccagcagcagggtgacaaggctgggcgcaagggccaggaccaggaccaccaccagcagcagcagctggagtgcccgcgctgccgctccaccaacaccaagttctgctactacaacaactacagcacggcgcagccgcgccacttctgccgcgcgtgccgccgctactggacgcacggcggcacgctgcgcgacgtcccggttggcggggcctcgcgccgcgccggtgggggcggcaagcggcgcagggtctcctccgccgagacctcgtcgtcgtcgccgccggtgcctgcgtcgctcgcggacgcgtgcctgtccgacctcccgtccgtcttcccgttcctcagcgacggcagcttcttcccgcagctcgacctcggcgccgtcgtgcttgcaccgccggccttctcctcctcgtggcggtcggtggccccggacttctacgacgggctcgcgccgtggggcgacatcgccggcctcgacctcagctggacaccaccggggagcgccagccggtcgccgtcttgagggggctccggttttagcagtgcggcctcatgagccatcctagcaagcagtgtgttccgttttgatgagccatcctatcctatcctatccagctaggaaaatttaagcagctcgatcaaaattcgcctatgccttcactgttagatcagtgaataatcttgatctgtagttggagccaggatgtaagatctgtgcagtgatttatcatgacaataaaattaagtatgtgtcaaagcgtctagccctagcatactctagtcgctagatgctaattgctaaacaccattactgctggttcaagcaaaacaccgtggtcgcagaagaatggtttcttgctaaacagacccctaacagcaacaaactagtacattaaaaagatcagctcgtaagatatgatcagttttttctatagctaggtacagaaagaatgaagtgtcaggcaggaaaatgcaaattcatgaatttgaaaaatattttcattttgtacatcactgtgtgtagaaaaatacatgatgagaacaaattaagttgatgtgtgctaagcatacagttacag

SEQ ID NO: 101498 - DNA, 1233 bp, Zea Mays
agccccgccccaacctactataaaaggaggatgcaagccatttcccaaacctccattcccatcccattccccactctactcattcagcagatcccgtcactcgctctccacaagcagagcaccgcagcagaacgaggaaggatgctggccatcttccagaagcaggtggcgcacgcgccgcaggagctcaacagcccccgcgccggcgcgtcgcccagcaagccccggaaccccgacgagatcctgcgcgacttccacgccgcgcacccggccgccgccttctccgcctccttcggcggcggcgccgcgctcgcctgcgtcggcccctcctcctccgccaccgccaccggcaccgccacctaccagcggatgttctgcggcctggaccacatctactgcgtcttcctgggccgcctcgacaacctcagcggcctcatccgccagtacggcctgtgcggccgctccaccaacgaggcgatgctggtcatcgaggcctaccgcacgctgcgcgaccgcgggccctacccggccgaccaggtcgtcaaggacctcgccggcgccttcgccttcgtcgtcttcgacagccgctccggcgccgtcttcgccgccctcggcgccgccgacgccgggggagcgccggtgccgctgtactggggcgtcgcggccgacgggtccgcggtgatcagcgacgaccgggacctggtcaagcgcggctgcggcaagtcctacgcgcccttccccgcgggctgcatgttccacagcgacggagggctcaagagcttcgagcaccccatgaacaggctcaaggccatgccgcgcgtcgacagcgagggcgccatgtgcggcgccaccttcaaggtcgacaccttcaccaagatcaactccatgccccgtgttggcagcgccgccaactgggccgcctgggacgaagccatctagtagatctagccttgccatgtacactgcgctgcctgcaacccgttcgccggtgcccctgcccctgcccgtggtcttttatcatccttccaaccacgagactttgcttctaaaccagaggctccatctgtgtgccgccttgttttactagaaatctttttttttatcctttttcacttttcctgcctagtttttccccttatcctggcattgtacaaataatttctccagtgcttgtagcttgtggacttgggttgtccaacatgtcatgaatacaaactgagtttgcttcaccaa

SEQ ID NO: 101499 - DNA, 1278 bp, Zea Mays
ggcgactagtattaacctaccacaacaccaagtccccccccacctccgcattgtctccgccgcgatttgtcaacgtgacgtcacgccgcgcctccgagagggagccagtgtggtggaggacacgaggctgccggagccgcaggtgttgctccggtcagcatcggcatggcggggcggatggtgcggagctgcgtgcagacggcgctcaaggcggccaactccgtcgtggggctcgccggcatggccgtcatcctctacgcgctctggatgctccgcgcttggtacagggaggtcgccgacctccaacaacacctcccggtcccctggtgcatctacacatttcttggactggggatctttctgtgcctactgacttgctctgggcatattgctgccgaaactgcaaacggtcactgcctctcttgttacatgaccatcgtatttgtgcttattatgctggaaggcgcaatcactatggatgtatttttgaatagcaactgggaagaggatttccccgctgacccatcaggcaagtttgaggatttcaagcacttcgtgagatcaaatttcgagatatgtgaatgggtaggcctctcagtggtggctgctcaggtgttatcgatcattcttgggatggtactcaggacccttgggcctgaccgtgagaccgactatgacagtgatgatgacgtgaccgtgcctgcaaggctgcctcttttgataaatcagtcccagcatggttcatactatgctgaacctaacacgtctggaaggagtgattcatggaaactgcggattttagacaaggtcaacaactaagatcttaaggatctcatacaacagaccctccagtaaagactctctctccaaggggttcgggagaatgataagagtatacctttttcttcatctcatggagagatgattagcagcagcagtagaatagtttacacacatttgaatgcaatccaacatgcacaagtatttgagtagcatgtgacttgacccccccccccccctcctacaaaacctacacaatgtaggggaaggatgtttattgtaccaaaatgtttcagaaaagagataaagggcatgaacggtggtggtgccttcactgaccaaagacagaaatatttgttctcccccccccccctgcctatcagctcagctgcatcatgcatgtgtttttgatctgcttgtcgggccggcaggtttcctatttgcaccaactgtcaatgccaaagggtgaaaaaaaatgaaatgaaaatgtcttgaaat

SEQ ID NO: 101500 - DNA, 209 bp, Zea Mays
ttttttataaatattaataggatcaatactagaaactataatataaatttacgtaacaaattatatatattatttgttaacaatcaaagaaaaaaacccaaaaattaacatctgaataaatattcggatatatccgccggtcctcagaaagaggcgtcaccatgacaatctggcgagatggtgagagggtgttccgtccctagccgacg

SEQ ID NO: 101501 - DNA, 968 bp, Zea Mays
atggttggaggccgtcccctcttcgtgctcttcggctcctccatcgtgcagtacagcttcagcaacggcggatggggcgctgtgcttgccgacatctacgcccgcaaggctgatatcctgctaagaggatatactggctggaacacaaggcgggctgttcaagtcatggataaagtgttccctaaggattcagcagtgcagccgtctctggtgatagtttactttggtgggaacgactccatcgctgcccattcctccggcctcgggcctcatgtgccgctagacgagtacatagccaacatgagaaagatcgcggagcacctcaagagcctctccgagaagacgcgggtcattttcctgagctgcccgcctctgaacgaggagatgcttcggaagtcaaccagcagtagcatagccatactgagtgagatcgtccggaccaacgagacctgccgcctgtactccgacgcctgcgtggctctgtgcaaggagatggagctcaaggtggtggatctctggcatgccatgcagaagagggaggactggatgactgcatgcttcacggatgggctgcatctgtctgaagaggggagcaacgtggtggtggaagagatcctcaaggtgctcaaggaggcggagtgggagccgtgcctgcactggaaggcgatgcccacggagttcgccgaggactcccccttcgacctcgtctcctccagcggcgacgccaccgtcaacccgtcggagtggacagtccacaggagaataccatgggactgactgaccttgtttctggccttatccctgggttggctccatgtctggactggaccaggatgcgtttgttctctgttgtgccttgatggaactggaatggctgggcgttgaagggactgtgtcataccaccatcttatctatttcatcagactatgagtttatcttctactgatgaagtctcagcggatatttt

SEQ ID NO: 101502 - DNA, 1619 bp, Zea Mays
gacttcgaccacgggccctaccagtttcggagtgccccagtctcccacccccagctccaccaagtcaccgcaccgccgcatctaggtcaccgcctcgccggcgtttcgccatggccggggactggcaggacctgggccaagcggcggccataggcctcctcttcgccttcctgctcgccaagctcatctccaccgtgatcgccttcaaggaggacaacctccgcatcacgcgctcccctccgtcctcccccacagccgccgccccagctcccgcgacgtctcccctcccctcccaacacgacgccgcaatcggaagcggcagtgacagcgattgggagggcgtggagagcaccgagctggacgaggagttcagcgccgcctccgccttcgtcgcggcctccgccgcctccggcaccagcgtccccgaggaggcgcagctgcgcctctacggcctctacaagatcgccaccgagggaccatgcaccgggccgcagccgtccgcgctcaagctcaaggcccgtgccaaatggaatgcttggcataagctgggtgctatgcctacggaagaagctatgcaagaatacatcacaattgttcaggagctattccctaactgggatgcaggtacaagtgcgaaaaggaaagatgaagaaagcattacttctgcatcagcttcgaaggggcccatgggacctgtgtttagcagtttgatgtatgaggaagacgaagggaatgattcgtaagtggtgtttacctcatggatgtcttctccagaagtttttattctataaattgttgcccgccttggaccgctgcttgtaattggaacaaactttaatgtatatgcagagaacttgctgacatccatgttttagcgagggaaggagcaactgaggatatagtgaagtttctggcagcgggtgtggaagtcaacatgagagatactgaaggtagaactccgctgcactgggctgttgaccgtggccatcttagtgctgttgaggttcttgcaaaagcaaatgcggacctgaatgccaaggacaacgaagggcaaacggcactccactacgctgctgtttgtgaaagagaagacatcgcagaattgctcgtgaagcatcatgccgaccttcagatcaaggatgaggatgggaacacggcacaggacctgtgccctccgagctggtcttttatgaaccgggcgaactgacaaccaacatgctaccttacattagctgtactctaagctggtaccgcacttggtcatgtgctttttctttatgggggacatatggtgtacctggtgtgccctgtgtgaagtgccgtgcgtggcgcccgctatgacgattgggaaatcagatgagctgttttattttatccacctcatctaactagttgtcaaaactcaaaagtcgagtggttgaagtgttagtgctgggagatacatgtgttgccttacaccaatggtctgttactgttagtgaaaaggaactacaatcatacatgtaccttgtttcctttgtatttattggcccgccgtttgtgtgtttatgtgggacctaaatgttagatggggttggaggcgacagagttccaaaattgatagaagtttttctttttgg

SEQ ID NO: 101503 - DNA, 1496 bp, Zea Mays
gacttcgaccacgggccctaccagtttcggagtgccccagtctcccacccccagctccaccaagtcaccgcaccgccgcatctaggtcaccgcctcgccggcgtttcgccatggccggggactggcaggacctgggccaagcggcggccataggcctcctcttcgccttcctgctcgccaagctcatctccaccgtgatcgccttcaaggaggacaacctccgcatcacgcgctcccctccgtcctcccccacagccgccgccccagctcccgcgacgtctcccctcccctcccaacacgacgccgcaatcggaagcggcagtgacagcgattgggagggcgtggagagcaccgagctggacgaggagttcagcgccgcctccgccttcgtcgcggcctccgccgcctccggcaccagcgtccccgaggaggcgcagctgcgcctctacggcctctacaagatcgccaccgagggaccatgcaccgggccgcagccgtccgcgctcaagctcaaggcccgtgccaaatggaatgcttggcataagctgggtgctatgcctacggaagaagctatgcaagaatacatcacaattgttcaggagctattccctaactgggatgcaggtacaagtgcgaaaaggaaagatgaagaaagcattacttctgcatcagcttcgaaggggcccatgggacctgtgtttagcagtttgatgtatgaggaagacgaagggaatgattcagaacttgctgacatccatgttttagcgagggaaggagcaactgaggatatagtgaagtttctggcagcgggtgtggaagtcaacatgagagatactgaaggtagaactccgctgcactgggctgttgaccgtggccatcttagtgctgttgaggttcttgcaaaagcaaatgcggacctgaatgccaaggacaacgaagggcaaacggcactccactacgctgctgtttgtgaaagagaagacatcgcagaattgctcgtgaagcatcatgccgaccttcagatcaaggatgaggatgggaacacggcacaggacctgtgccctccgagctggtcttttatgaaccgggcgaactgacaaccaacatgctaccttacattagctgtactctaagctggtaccgcacttggtcatgtgctttttctttatgggggacatatggtgtacctggtgtgccctgtgtgaagtgccgtgcgtggcgcccgctatgacgattgggaaatcagatgagctgttttattttatccacctcatctaactagttgtcaaaactcaaaagtcgagtggttgaagtgttagtgctgggagatacatgtgttgccttacaccaatggtctgttactgttagtgaaaaggaactacaatcatacatgtaccttgtttcctttgtatttattggcccgccgtttgtgtgtttatgtgggacctaaatgttagatggggttggaggcgacagagttccaaaattgatagaag

SEQ ID NO: 101504 - DNA, 1234 bp, Zea Mays
agcagtttctcaaacactggccgagcgcaaaatttgaaaaccaaccctcaacctcaatcggggtgccggcgtccgacgaagtcgacgggccatccccattccccacccggcagtcggcagtccccacaccccaagacctctgaagagtcggaagaagaagcgggcgatggaagacggcgacgagagcgcggccgcggcggcggcgctggggctgagcccgcagcttttcgtcaacgaggtccacggcatcatagccgacatcagcgccgaggccttcgagtactgtctccaggcagcagccgcgccaggtgtcgtcggcgccgccacggctgcagagaaggccacggatctccagcggggattaaatgctattcaccatgttgtaaaggatcgactggataagagaatgaccaactgggagaaattctgctatcgacattgcttcgatgtacctgaaggttttgtggccgctgatgatgatagttcttgtgcaaatgaatcacaaaaagatgggatttcggattcagatttggatttggaacttgactctttgaggagaaagtttggaagtgctaacaaggaatctgaaaaccttgaaagagagttgtcctcactggaaaggcaagctacgttcaaaagaagacttgattcttctgtctctgagatagaaaagttgtttgaagaagaaatggtgcagggaaatttgaaagatcttgtgaaggcaataccggttttgcaccagaaaataatagatgcaaatcagagaaggactgagattaggagcttggtagatcaacaggcttggaacacgaagagatcgagagacagcaagccataagcgctggagaagagtactgccagttcccactttccctcttcagttctcccgtgtataattaattaattatgttctctcgtgtatagttatgccatgtatttatatgccagtaaggcggtaaccaataacttatgtagcaggttctactgcatgtgttgaagacattcaagaggttgtcaacatcttacagagcaagtagcttgttgctcttttcctgattcatgttggttccacatagcgcctgcagcttgcttgcttggataaagcagtggtttgcccagttagtcttgttattgatcaaccgctattatttgatactggctccgtcccaaaatattagtcgttttagtattttaccagattcatatcatactcagtgtatgtcttttacatatg

SEQ ID NO: 101505 - DNA, 715 bp, Zea Mays
agcagtttctcaaacactggccgagcgcaaaatttgaaaaccaaccctcaacctcaatcggggtgccggcgtccgacgaagtcgacgggccatccccattccccacccggcagtcggcagtccccacaccccaagacctctgaagagtcggaagaagaagcgggcgatggaagacggcgacgagagcgcggccgcggcggcggcgctggggctgagcccgcagcttttcgtcaacgaggtccacggcatcatagccgacatcagcgccgaggccttcgagtactgtctccaggcagcagccgcgccaggtgtcgtcggcgccgccacggctgcagagaaggccacggatctccagcggggattaaatgctattcaccatgttgtaaaggatcgactggataagagaatgaccaactgggagaaattctgctatcgacattgcttcgatgtacctgaaggttttgtggccgctgatgatgtacgtgcctcatcctaatgttaaggatttgaatccagcatgcttaagttacgttcatactgtggagaagtttcatttgtgttcatgaagattcataatttagaaatctggtgcttctttattgatgtaaacagtaaacatttagttacagatgcccacacactcttgtacagacataaaaacgaagatattgttatcgtaatgtaaatgagtatgtatataatcttcttttcttca

SEQ ID NO: 101506 - DNA, 1868 bp, Zea Mays
gccacgagccaaacttctcgtctcgccatgtggcgcgaaaacacaggactccctcttgcctacattagctctgtgcagatactgatttcgttgcttcgctaggacatcgtgggtgggtgggtgtgtccttcgcacccatgcggcgttagctgatgacgacctcgcctgagaggggagaagcaccacctgcgccgccacgcgattcaccgtgcgaggacgccgccccagctgccgccgtcgttgcctcttcctcctctggctccgagcgcgaggaagacggcggctccaggcagcccaaggcatctgtcctgtccggcgtcttcgcgccccctctcgccatattcgaggggcagcagcaggtctcctcgacgccgtgcgacgccagctcgacaaagccgccctcggggtcctatgcttggtccaggattctgaggaggttcgtgggcagcggctccatgtggcgtcttctgggctgcgccagggtcctgacctccggtgacgtgtggttccttggtaaatgctacagggtgtcgcccgaggaagaggagtctggcggctcggattctgacagcggccatgctgcgtttctggaagatttctcttccaggatatggatcacttaccggaaagggtttgatgcaatacctggttccaagctcactagtgatgtgaactggggatgcatggttagaagtagtcagatgctggttgctcaggcactgatttttcaccatcttggaagatcttggagaaagccatcagagaagccatacgacccagattatatacgggtcttacacctatttggtgactctgaagcttgtgctttctctattcacaatttacttcaagctggaaggaattatggtctggctgctggatcatgggtgggtccatatgctatgtgccgggcatggcagacccttatccgcacaaatagagagcaagctgatgctgtcgatgggaaggaaaatttccctatggcgctatatgtcgtttcgggtgatgaagatggtgaaagaggtggagctccagttttttgtattgatgttgctgctcagctttgctccaatttcaataaaggacaatgtacatggtcacctattcttttgttgattcctctggttcttggccttgacaaaattaatccaaggtacatcccattactaaaggagacgtttaagttcccacaaagcttgggcattttaggtggaaaacctgggacgtcaacatacattgctggggtacaagaagatagggctctctacctagatccccatgacgttcagatggcggttgatattgcaccggataacttggaggcggacacttcctcgtaccactgcagtgttgtccgagatttggctctagaacaaatagacccatccctagccattggtttttactgtcgcgacaaagacgatttcgatgatttctgttctcgggcatctgagttggcagagaaagccaatggagcgccactctttactgtcatgcagtcagtccagccatcgaagcaaatgtataaacaggatgatgggctgtgctgttgttctggcagtagcatggccaacgaggactacgaccttgacgcctctggcgaggcaggagaagagtggcagatcctctaaaccaggggaacaccgatgacatgttgggttgaaaaactcatggaacatgttgcctgaatgccctcgtttgcgtgtgaatacaggggatgatttgttgtctctgagtgtcgttgggtgccaacgtctcttaggaggaaaatgttcaaaacgtgacaggtggaaatgttcaaaacatacacttgtgaatgatcatagataaatgtatttaacattccatttgctaacaccatttcacca

SEQ ID NO: 101507 - DNA, 1624 bp, Zea Mays
atgacgacctcgcctgagaggggagaagcaccacctgcgccgccacgcgattcaccgtgcgaggacgccgccccagctgccgccgtcgttgcctcttcctcctctggctccgagcgcgaggaagacggcggctccaggcagcccaaggcatctgtcctgtccggcgtcttcgcgccccctctcgccatattcgaggggcagcagcaggtctcctcgacgccgtgcgacgccagctcgacaaagccgccctcggggtcctatgcttggtccaggattctgaggagggtgtcgcccgaggaagaggagtctggcggctcggattctgacagcggccatgctgcgtttctggaagatttctcttccaggatatggatcacttaccggaaagggtttgatgcaatacctggttccaagctcactagtgatgtgaactggggatgcatggttagaagtagtcagatgctggttgctcaggcactgatttttcaccatcttggaagatcttggagaaagccatcagagaagccatacgacccagattatatacgggtcttacacctatttggtgactctgaagcttgtgctttctctattcacaatttacttcaagctggaaggaattatggtctggctgctggatcatgggtgggtccatatgctatgtgccgggcatggcagacccttatccgcacaaatagagagcaagctgatgctgtcgatgggaaggaaaatttccctatggcgctatatgtcgtttcgggtgatgaagatggtgaaagaggtggagctccagttttttgtattgatgttgctgctcagctttgctccaatttcaataaaggacaatgtacatggtcacctattcttttgttgattcctctggttcttggccttgacaaaattaatccaaggtacatcccattactaaaggagacgtttaagttcccacaaagcttgggcattttaggtggaaaacctgggacgtcaacatacattgctggggtacaagaagatagggctctctacctagatccccatgacgttcagatggcggttgatattgcaccggataacttggaggcggacacttcctcgtaccactgcagtgttgtccgagatttggctctagaacaaatagacccatccctagccattggtttttactgtcgcgacaaagacgatttcgatgatttctgttctcgggcatctgagttggcagagaaagccaatggagcgccactctttactgtcatgcagtcagtccagccatcgaagcaaatgtataaacaggatgatgggctgtgctgttgttctggcagtagcatggccaacgaggactacgaccttgacgcctctggcgaggcaggagaagagtggcagatcctctaaaccaggggaacaccgatgacatgttgggttgaaaaactcatggaacatgttgcctgaatgccctcgtttgcgtgtgaatacaggggatgatttgttgtctctgagtgtcgttgggtgccaacgtctcttaggaggaaaatgttcaaaacgtgacaggtggaaatgttcaaaacatacacttgtgaatgatcatagataaatgtatttaacattccatttgctaacaccatttcac

SEQ ID NO: 101508 - DNA, 109 bp, Zea Mays
aaaaataattgtttcttctcgaattttctacaaattcaaatgtgttcaaacaatccaaaaaaacatttcaaggattcatcataatgtaaaatattacatgtgcttttgc

SEQ ID NO: 101509 - DNA, 850 bp, Zea Mays
aggaaagtcgcagggtgcgtggaaagagccagaggaggtgctccgacatggctactaggaggggagggggacaatgagggctcgattgccaaggagacgatcactgcacgagggaagacaaggggtccatccatgtgacgagcccggcggtctaggggtggagctcgacgtagtcacgaaggacagagagctcatggcgcgatcgaaggtccacgaaggtgccccggataagctggccatcgtggaggaggacgcgccccaacgacagcgccgggaactgggcagagcccggaggcaccaagggtggtgggaataccgtaggaagtgccaggagcaactacatagggttaagagcagcgggatagggggtcagggtaggggtggtgaggtcgaacatggctggggtagggaggataccgaacgacgcagaggagggggcgtcgaggggcgtggtgaagggttgtggctgccgccgccacaagccgcagcgcgtgcgggcgaggggtgccgccgcagctatggcaaatccgaccgggaagacgcgccttaggccgagccgaattggcagcgacacacaggaggcgggccaaactggccgtactagccggaggtggaggggaagggggcggccgggcgcaggctcgcacactgcggcaccggcgcctgctgagcaggggagaagggttggtggcctgagagcaagcggcgaggaaggcagtcggggaagcacccgacgatggtggtggggcatatccggcggcggcctcgtcgtgggcgtggatccgaagccgtcgatggaggtgcggccggaggcggttgtagggctctgctcgcacaactgagcacgtgc

SEQ ID NO: 101510 - DNA, 849 bp, Zea Mays
ttttttttttctgatgcatattttcttttatcagtgatcgggttgcagctgggcgtgcacttgatcttccagtgtattttggtgattctggaaagcagagaggtactgcacaaaaattggagctgaaagagcttgtgctgctgcaattactttggatactcctggtgcaaactacagagctgtctgggcgttgaacaaatatttcccaaatgtgaagacatttgttagagcacatgatgttgatcatggtgttaatttggagaaagctggtgcaacggcggttgtccctgagaccttggagccaagtcttcagctagctgctgctgtccttgcacaagcaaaactcccaatgtcagagattcaggaaaccatcaacgagttccggaatcgtcatctgtcagagcttacagagttgtgtgctacgtcaggaagttctcttggctatggattttccagagctacgtccaaatcgaagtctttcacctccgacgacgaaaaccaaacagtggatggcacactagcaatctgatgctgatgagataaaatgggatccccttgctagcgctagattggttgcattgttcagtagataatcctgtttcatgtggaaggagggtggaataattattcatataagagctgtcataaaagttggcgtccatttttgtatgttagacacttagtgcttgtttgagagtaatggaagggactgagagggccaaaatcctttatgccccgtttgtttccttttattttgaggacttggaatctaactattggaataggctatttttttaaaatgtgacattccaccacttccaaagttatcatatgagcctatctctaatt

SEQ ID NO: 101511 - DNA, 3641 bp, Zea Mays
gctagtggcaggtggcagcgagtgagaaggtgagctcgcctccctcgcgcctcccattcccccctcgcgcagtcctatcgtaggaatgggatgaggccggggcccctccctccttcctcctcggcgcttctcccgtgacaagcctccattctccagataggggaggatggatttgtccaggttcgcctccggcgtcgggcccagccgcgtggccccgcgggcgggcctgcagatcggcgccgccgagaatggcttccgggcctgctccctgcggcgagcacggcaccgcggcggcgggaacgggaacctcacggccgccgcgtccaccctccgcggccgcggcgggctcttctacctggctcccacgcgccggagtcatcccagtctccggctcttctacctgcttcccacgcgcgggagtcatctcagtctccgcgccagatggcggccgcgctgccagggcaacgactcattggcctacgtcgacggccccttggagaccgctaagggctccggcgaggtcgacgacaacgtgcccaccagctcggggtccgacgacgacaggggcctcgccgacgtcgacggcctcagggagatgctgcagaggtccaggaacgagctggaggtggccagggtcaacagcaccatgttcgaggagaaggcgcagcggatatccgagtcggccatcgcgttcaaggaccgcgccgacggcgcccagagggatgtgtgcgcggccgtagccaccgtgcaggagatcatcagcaaggaggcggacgccaaggaggccgtccagaaggctaccatggcgctgtccatggccgaggcgaggctgcagctggccgcggaggcgctggaggccaaccggggctcggtaggcccgacggaggttagcatcgaaggcatggagcaggaggccctcctgtctgcacaggaagagattaaggattgtcgggcagccctgtcgcggtgcgcggaggagctgagtcgtgtccaggacaagaaaatggagctgcagaaggaggttgataggctgacggatctcgctgggaaggcccagatggatgcgtccaacgccgaagaagatgttgccaatataatggtgctggctgagcaggcggtggctcttgagatggaagcctcacagcgtgtcaacgatgcggaaatggtgctgctgaaagcggagaaggccatagcctcgattgataccgtggtggagctaccgtcacctgctgaagagcagagaagcactgaagaagacagcgtttctgaagggtacgagtatagcagcgatgtcactgatgatgtttatgtaagggatgaggtgtcaagtatcgagcgcctaatggtcggtgacttgactgttcagggctttgagcagcttgaaccatcccgtgaaatatatgatgaagaaagcagtaataagatgtctgttgagcctcagaaagaagctgagtctgattcagataagtcgaaacaagggaagaagcaagaaatggaacgaaaggagcacaccaaggaaccactgagtgctccaaaagcactggtgaagagatcatcccgtttcttctcggcatctttcttctcctccaaagttgatggagagtttacacctacatctgtcttccgagggttaatgaaatcagtgcaaaaacaagctccgaagcttgttgttgggatattgcttctcggtgcaggggcattcttcttaaatagggctgagaagagtcaactatttcagcagcaaggcattgccacaagtattggaaaggtaacctccacaacaaagcccatagttcttgagatacggcgaattccacagagagtaaagaagctaatagagctcttacctcatcaagaggtaaatgaggaagaagcttcacttttcgacatactatacttgcttctggccagtgttatttttgtaccattatttcagaaaatccctggaggcagtcctgttcttggatatcttgctgctggtgtcctcattggtccatatgggctgtccatcatccgtaatgtgcatgagacaaaggcaattgcggaatttggagttgtgttcttactatttaacattggacttgagctttctgtggaaagactaagctcgatgaagaagtatgtctttggcttgggatctgctcaggtgctggctactactgctgctgttggtgtgatagctcattgttttgccgcactaccaggaccagcagcaattgttgttgggagtggcttggctctgtcatccacagctgttgtcttgcaagtattgcaagagcgtggtgaaagtacgtcacgtcatggacgtgctacattttctgtgttattgttccaggatttggctgtggtggttctgttgatattaatacctctcatatcacctaattcttcaaaaggaggggttggtttccaagcaatagcagaagccatgggaatggctgcagtcaaagcagtagctgctataactgccataattgctggaggtcgtctgttgctccggcctatttacaaacaaattgctgaaaatcagaatgctgagatattttcagcaaatacactccttgttatttttggcacaagtcttcttacagcccgggctgggttatcgatggcacttggagcttttttagctggtctgttactagcagaaacagagttctcattgcaggttgagtcagatatagctccctatcgtggtcttctgttaggacttttctttatgacggttggaatgtctattgacccaaagctgcttctgtcaaacttcccagcgatctctgtgatattgagtctcttgataattggaaagacattgttagttacatttgtcggcagggtgtttggggtttctgctatagctgccattcgtgttggcctcttgcttgcacctggtggtgagtttgcttttgttgcctttggagaagctgtcaaccagggtcttctatcacctcaattaacatcgttgctatttttagtcgttggcatttcaatggctctgacaccatggttagctgctggagggcagtttctggcatcaaaatttgagcagcatgatgtgaggagtttattgcccgtggaaagtgagactgacgatttgcaagaccatatcattatattaggctttggacgtgttgggcagatcattgcacaactcctgtcagagcggttaattccttttgttgcacttgatgctggaaggtatggtgcatcttataataaattgaattctaaagaaactacagatagcagcagttcagaaccttagcatctgttctgaattaatatttaaccatgagtatggctgcatgaacctatgcagacttaattctgtaaattactgtgtacagttaagatggttgattttaagctaattagggactgcagttggaatgtattaaatccacaaaataaaacaaactttcgggcagactcttccaggaattcaggaaaatgctggcatgaccagcaatatgaggctctctccagcagatcccctatcgcatccctattttatcttctatttaaaacttcactttacaaacagtgttatctacagttccgcgtcccctattttacattacccactggagacagtccgagaagctcctatcttcattggaaccaaatcatccatgtcaata

SEQ ID NO: 101512 - DNA, 1369 bp, Zea Mays
ttctgatgaatcagcttgattcgtttgcatgttgttgatggaatttataccagaatgggtgattagttctatcaacaaggaataagtaccttccatgaagagatgaaggaagcttcaaacatactgcataactgctcatctcgatccctagttatcatcgatgagcttggtcgaggcacaagcacacatgacggtgttgctattgcttactctactttacactatcttctcaaagagaaaaaatgcattgtcatttttgtcactcattatccaaagatccttgatatacagagagaatttgaaggttctgttggggcataccatgtttcatatctagccactaggaagcttttggaagtgaccgataaacaggtggaaactagcccagaggcaaatgatcttggagaaattattttcttgtacaaacttgttgctggagcttcagatagaagctttggacttaatgttgccctgcttgcacagcttccgtctagatgtatcaagagggcatccgtcatggcagccaaactgcaagaggagttaagtccgcgggaggaaatcaagcttcggaggacaacggatgcacaaactgtggacggaccatctgaaagttccgcagaagttggtttgttttgtgcacatccttatcaacgattggcagaaacatgtcgcaggatactgctgaacatcacgttggctcaaagcaataatgatgtaacgaacacacttccttctttgaaaaatgcacaggaaattgcacagaagacgatatgatgcagcggtccatttgacaactgacatattcttcatcagtgtgaagggaacttatcagtgcaagctacgctactctcggctatggcgttggaaaagttgagaagcagaattttaggggttatatgggacacatcacacaacggtgcagtgcaacaattgcagttctagacttctttttagggaaacacttaagtttatgactacactaaacagcacttgatgtacatttggcacatcatgttctccagagctaacattctttggacgcaggtatcatgtacctttttttgctacggaggatccctaatggtggtaagcattttgctggagccgtttgtgtaacccatactctgccaggatagcgtggttaagcattttggtcacaactcaaagcagtgcctgtgtgtagttggagtgaactccgtgatatatactggagtacttagtatgtaactctatattccgttcattaatttatctagaactcgtttcgttgatgtaaatgcagagaagggacgtgtttactttttttatatctcgtgctctacccgttttctttggcatcctggaccagggctggacaaaaaaaactcaa

SEQ ID NO: 101513 - DNA, 1857 bp, Zea Mays
gcaccgcacgcccccacatttcccgcgccaaccgaccaggcgaacggcggccacgcccacgccatgggcaagcccaagcagcaagtgctctcccgcttcttctcccccaagcccgcgcccgtgctctcgtccgccgcccccgacccgccgcctccgcttcctcccaaccccaaaccctccgcggcgcatccgcccgtctctaccgtcgcctccttctcccccgctaaacgcgcgcgcgcgctctcactctcccccaaatcccccgccgccaaacggcccaatcccacccctcctccttcccgagacgccgtccgccgcaggctcctggagccgctccaccaggagccgcctcgcctcctggaccctacaggtggcggcaagggctacaccccgctggagcagcaggtggtcgacctcaaagcccgccaccccgacgttctcctcatggtcgaggtgggctaccgcttccgcttcttcggcgaggacgccgccgtcgccgccgcggtgctcggcatcgtcgcgcacccggaccgcagcttcctcaccgccagcgtccccaacttccgcctcggcttccacgtccgccgcctcgttgccgcgggccacaaggtcggggtcgtgcgccagaccgagaccgccgccatcaaggccgcggccaggggcgtcggaggcgccccgttctcgcggggcttgtccgcggtctacacgcgcgccacgatcgaggccgcggcaggcgagctggagggtggcggcgccgccgcgcccgaggaggggagcagctaccttgtctgcatcgtggataaggaggtggaggcggcggggagggaggggctccaagtgaaggttgggttggtggcgattgaggtgtccacgggtgaggttgtccacggggagttcctggacagcgactccaggagcggactcgaagctttgctgcttggattggcgcccgtggaggtcatcctcgggacaccactctcttttgccacagagaagattatgatggcatatgtgggacccacctctaatgtgcgggttgagcgtgtatcatgtgaatggtttggcaaagatgctgctttggctgaactgataactttatttgaaaagtctgtaaacaatgcttctagggctgaagatgataggaagctgatagaaacaaatgatgataacaacaattttcatgggattgagggtatcatggcgatgccagagctagttgttcaagcattagcattatcggttcggtatctcaaagaattttccttatcagcaaatgctcttcaacaacttgaggtagtcttttgcagcactttcaaagtaaaagttcctgttttgatatttattacaattctttctcaggtattcaggaacaactcagatggtacaacagaagggtctctgttccaaattatgaacaatacatgcacatcttttgggtctagattgcttagaaactggtttgttggcgttatccagtctatcctcacatctgggaagcagctacagaagcttgttcttgaggatattggcattgtctcgtctccgcataaatctgtgcactcccctttgctaagaaggctaataaatacagcttcatcatccaccatacttaatagtgctgtgaaacttctgtcttgtcttaacaaagatgcggctgatcaaggagatatgctaaacctgttcattgcatctgtggatcagttcccagaggttgcagaaggtcatgtaaatgtaaaaatggctgaacataaacttgatttgttgattgtggagtaccggaagcaatttgctatgcacaacttggagtttaaaactgtagctggaaccacccatttaatcgaactaccagtagataga

SEQ ID NO: 101514 - DNA, 1301 bp, Zea Mays
gtccatccctaaacgaagccctgccccgttctgaattgtgatcgagacgagacccttcgaccttcgcaacgcctccccagcaacctctgctccgccgcctccggcgaccgccggaacccgtggtggaggaggacgtggagagggaagatctcgccagatccaaggaggtggggacaagatggtgagctcctcgtcgtcggtggttaacgtgtacccgctcgccaactacacgttcggcaccaaggagcccaagatggagaaggacacctccgtcgccgaccgcctcgctcgcatgaaggtcaactacatgaaagaaggaatgcgtacaagtgttgaagcaatcctattggtgcaagagcacaaccaccctcacatactgctcctgcaaatcggaaatacattctgcaaacttcctggtggacggttgaagcctggagaaaatgaaatcgaaggtttgaaaagaaagttgtgcagcaaacttgctgtgaactcgccttcctttccacctaactggcaggttggagagtgtgttgctgtgtggtggaggccgaattttgagactgtgatgtatccttactgccctccacatatcaccaagcccaaggagtgcaagaaacttttcatcgttcacctatccgaaagagagtattttgctgttccaaggaatttgaagctgcttgctgttccgctctttgaactctacgataatattcagcgatatgggcctgtcatctccaccatccctcagcagctttctaggttccagttcaacatggtgagctcttagacggtgtccagcagtttacccatatagtcatccaaaacattgtttttgtactatagactgcactgttcccagagtggagtttaaatataggtatgtggatgagtaagctgctgagatagacttagggtgatgacacaagaagatagtgtggccaagacagctattttgttgacttccgttgagatggatcttcaacatgctgagctagctgatcaacgtgccttgactggtttcatttcattgtgctggattttttttatctagacatgtatttcttattgtatttttgttgaattactgtgttacgtatcatcccaggggcagatccactttaggtcacatgtacacctggtagcttttgttttttctttttccatttaaaaaagcgaagttagtgtgtataaagcatatgcatgtaactggatcaaatcctcatgcaaatagcctgcctttgggagggtttgaggtactcggtttaggcgtttaggccctctccaactgattttccgtatac

SEQ ID NO: 101515 - DNA, 1151 bp, Zea Mays
ttgaaacggctgcgagatggatcgtacggttcacgttaacagctgcccggtgtcccggaccatcctgtccatccctaaacgaagccctgccccgttctgaattgtgatcgagacgagacccttcgaccttcgcaacgcctccccagcaacctctgctccgccgcctccggcgaccgccggaacccgtggtggaggaggacgtggagagggaagatctcgccagatccaaggaggtggggacaagatggtgagctcctcgtcgtcggtggttaacgtgtacccgctcgccaactacacgttcggcaccaaggagcccaagatggagaaggacacctccgtcgccgaccgcctcgctcgcatgaaggtcaactacatgaaagaaggaatgcgtacaagtgttgaagcaatcctattggtgcaagagcacaaccaccctcacatactgctcctgcaaatcggaaatacattctgcaaacttcctggtggacggttgaagcctggagaaaatgaaatcgaaggtttgaaaagaaagttgtgcagcaaacttgctgtgaactcgccttcctttccacctaactggcaggttggagagtgtgttgctgtgtggtggaggccgaattttgagactgtgatgtatccttactgccctccacatatcaccaagcccaaggagtgcaagaaacttttcatcgttcacctatccgaaagagagtattttgctgttccaaggaatttgaagctgcttgctgttccgctctttgaactctacgataatattcagcgatatgggcctgtcatctccaccatccctcagcagctttctaggttccagttcaacatggtgagctcttagacggtgtccagcaaagatagtgtggccaagacagctattttgttgacttccgttgagatggatcttcaacatgctgagctagctgatcaacgtgccttgactggtttcatttcattgtgctggattttttttatctagacatgtatttcttattgtatttttgttgaattactgtgttacgtatcatcccaggggcagatccactttaggtcacatgtacacctggtagcttttgttttttctttttccatttaaaaaagcgaagttagtgtgtataaagcatatgcatgtaactgga

SEQ ID NO: 101516 - DNA, 372 bp, Zea Mays
agacggcttcgcatcagccgaggaggcgatagcggctgtggttgagccaactggtgatgagatgtgggtgccaagtgccattgacatgagaactcagatgctgattcttttggttgagctgagctgattgttttggttttcttcagtcaggagttttaattctgtagccgactttcgacagtaaggactcgtttggttactttagtttaggaactaaagtttagttagaagactaaagtttagttagaagactaaagtttagtccctagttctaatgactaaaagtattcaaaatgcgttaaatgaatcataagatgactaaattatcattaacattcttccgatattagcgcagctgaaataaaggatgaa

SEQ ID NO: 101517 - DNA, 1943 bp, Zea Mays
acaagccccaaacagaaagagactcacccaccgcgccacgcaacagcccatctccgctctgctctctcgcccaccccgattcccccccatggctatggcgacgacggaggccaccacgctgacggcgctgctcaaggaggcggcggccgccttcccgacccgccgcgcagttgccgtaccgggcaggctggagctcacgcacgccgccctcgacgctctcgtcgacgcggcggccgcacgactcgccgccgacgccggagttctcccgggccacgtcgtcgcgctttccttccccaacaccgtcgagctggtgatcatgttcctggcggtaatccgcgcgcgcggcgtggcggcgccgctcaacccggcctacacgcaggaggagttcgagttctacctctccgactcggaggcgcgcctcctcgtcaccaacgcggagggcaacgcggcggcgcaggcggccgctgccaagctcggcctcgcccacgccgccgccagcctccacgacgcggccggccctgtccacctcgccggcctcccggcccatgctccggagaacgggtcccacggcggcggcgcggcgggctctctctcccccaacgacccgtcggacgtggccctgttcctgcacacctccggcacgacgagccggcccaagggcgtgccgctgaagcagcgcaacctggcggcgtcggtgcggaacatccggtccgtgtaccgcctcgccgagacggacgccacggtggtggtgctgccgctgttccacgtgcacgggctcctctgcgccctgctgagctcgctggcttcgggcgcgtccgtggcgctgccggcggcggggcggttctcggcgtccacgttctgggccgacatgcgggcgtcgggcgccacctgctgcagcgcgtcgctggcgccggcgatcctggagcggctggaggcggcgttcagcgcgccggtgctggaggcgtacgcgatgacggaggcgtcgcacctgatgacgtcaaacccgctgccggaggacgggccacggaagcccgggtcagtggggcgcgcggtggggcaggagctggcggtgctggacgaggaggggcggctcgtggcggcggggagccccggggaggtgtgcgtccgcggggacaacgtgacggcgggttacaaggggaacccagaggcgaacgaggcggcgttccggttcgggtggttccacacgggggacatcggcgtggtggatgaccaagggtacgtccggctggtggggcgcatcaaggagctcatcaaccgcggcggggagaagatctccccgatcgaggtggacgccgtgctgctgggcctccccggtgtggcgcaggcggtgtcgttcggggtgcctgacgacaagtacggggaggagatcaactgtgcggtgatcccgcgggacgggtcggcgctgcgggaggaggaggtgctggcgcactgccggcggaacctggcgtcgttcaaggtgcccaagaaggtgttcatcacggacgacctgcccaagacggccaccggaaagatccagcgccgcatcgtggcgcagcacttcgtgcagccgaccagtgcctgatcgttgatcctggtgcttgccaagtcatgggtcgacggattggaatttcgctacactagctagcattttgccgttgttcccgcattgcgaggtggacatggcctgactgaacctgaataaacaaacacatgcatcgtctctctctcgtcgtcgttctttgcgttccgcgtatgtgtcggctcatctcctgtcgtttaccggacggcatggtgccaacaatcggtgggcaggtgtcatcaggcgtgcattgtttttttctttttattaccggttgatttggaaccgtaatttaggtttatcgattagaaaaacgtttgggaaaagtgccacatgcctttgttgaaaaggacttctttctgtt

SEQ ID NO: 101518 - DNA, 567 bp, Zea Mays
gggagggaggctgggtgaagggcatggagcacatggcgatgccctcttccccctgcctctgcggggcctggtgtgtgagaggcggcgtgctggacacctcggcctcctcctcctcctcctccgggtcgaaggtgatgaagggggcgcgggcgagaaggtcttcctgcgaggcggagatgcggaggaagtccgcctccgcatccgcggcgtaccgagcggagacgaaggcaaacgagggcatgccgccgaggcaccaacggtggctagggttggatggaacagcgcgtggggactgaagtcagatggagaggctggctgagtgctgtggctccgccggccaatgcggaaggaggcgtagcgtcgggtgtgggccgaaatttactgggcggggccaatggatacggaacggaaggaggcgtagcgtcgggtgcgtgcttggatggacatggactatgcacccatctctgccccatgaaccgttggtatgctttttcgtgtacaagcactgtacaaaatattgcagaacataagtgataatataatacgtgcagcttgggctaacaaaaa

SEQ ID NO: 101519 - DNA, 2104 bp, Zea Mays
ctggccgggtagcgacagcccaccgccctcccccgcgcgcggctggcatggcctggcctggcgatggcgagggaggggaaaacgaacgaacggaccgcgacggcgacggcggcggcaacggagcgccggaaaccgcggcaacggagccgctagcttttcgtcgggcgcacgggaaatcttatcggctctgtggggtggggtggggcgcgggaccgggtgcagacgtgcagtgacagcccatgcccatccatcagtccatcctcaacgattgaacgcacagcgcccggcgcgctacttgcagcagctgccagccatcgtgccctactgcggccgctctcgccgcccgtcccgtcccgtgtaggccaccatcccaccccaaccgtgtcgtcgtcatcgccttatctctctctctctctctcccatcatttatctgtctatcttgatctcatctcctatcttcttcctcctagattctttcttccgcgcgccctctctctctctctccttcctgccttctgcctgcgggcggcccatgtccgtggcgcccctcctgccctgcgagctgcttctccagcgaaaaggttgctgcgccttgacgcaccaccgatccaccgccgcccaacccgagcgttctgtccggcagctaggtagcgagctgcgcggtggctgcgaccggaagcagggaggggaacagggcagcgaacgcccggcgattgccttgcttgcctgtgtgctccggccggcgcgagttggtcggtcgttccatgcatggatgacaaggaacttatctcacagtccgacctgcagtcattctaccagcagcagcagcagcaccaccgggccttcggcggcggcggcggcgggcagcatagcccgtcctcgctggccgggatgcactccgtcattcgccccatgcccaacatgaacatgagcccgtcggcgatccttaactctatcggcgggggctccttcaccggtatgcagttccaaatggacccgccgccgccaccattgctgcacaccgccgccatgggtgcctcggctcctacctccacccccggtgccgtccccgcggcccccacggagccggtcaagcgcaaaagagggagaccgcgcaaatacggtcccgacggcaccatgaagcagcagcagctcgtcgccgcacagccaaggatagggccgtctggtcccaacatgatcagcagcgccgggatagaggactcttcgcagaagaagcggcgcggccggccgccgggcaccgccaagaagcatcagccctcgccctctcaaggcaatgcgttcgccggttcagctggaacgagcttcactccgcacatcatcacggcgtctccttcagaggacgtggcggcgaagatcgtcgcgttcgccacccagtcgtcaagggcggtgtgcgtgctctcggcgatgggctccgtctccagggccgtcctccgccacccggccgacggctctcccatggcgagggttcacgcgtcgccgcagccgtacaacaacagcccagccatctacgaggggttctacgagatcatgagcctaaccggctcgtacaacctggccgagggctcacaacaagaacagtgccagggccagggccagccgagcggcgggctcagcgtcacgctctgcagccctgagaggaatgtgatcggaggtgttttgggcggcccactggtagctgcaggaaccgtgcaggtggtactggggagttttcaccaaggagggtcgaaatccaagtccaagaaaggcgggaagcagcagcaggcgccggcgccggcggccgccttcagttccgactcgctcaccggcggccaggaggcgtcgcccagctctgggcacaaccaaaatctaacgccgccgccgccgccgccctccgtgacgggagggtggcccacctccgggatgtttgacaccagcattgatatcaactcatctagaggatagctcatttcatttgtcgataattccagccctcgagaaattttctgttctcgcacaagaatgatcgaaaccatacttcgaaatagattattcggtttctcccttttcccttttgagcaagaaaaacggaatttctatagaattt

SEQ ID NO: 101520 - DNA, 2214 bp, Zea Mays
ctggccgggtagcgacagcccaccgccctcccccgcgcgcggctggcatggcctggcctggcgatggcgagggaggggaaaacgaacgaacggaccgcgacggcgacggcggcggcaacggagcgccggaaaccgcggcaacggagccgctagcttttcgtcgggcgcacgggaaatcttatcggctctgtggggtggggtggggcgcgggaccgggtgcagacgtgcagtgacagcccatgcccatccatcagtccatcctcaacgattgaacgcacagcgcccggcgcgctacttgcagcagctgccagccatcgtgccctactgcggccgctctcgccgcccgtcccgtcccgtgtaggccaccatcccaccccaaccgtgtcgtcgtcatcgccttatctctctctctctctctcccatcatttatctgtctatcttgatctcatctcctatcttcttcctcctagattctttcttccgcgcgccctctctctctctctccttcctgccttctgcctgcgggcggcccatgtccgtggcgcccctcctgccctgcgagctgcttctccagcgaaaaggttgctgcgccttgacgcaccaccgatccaccgccgcccaacccgagcgttctgtccggcagctaggtagcgagctgcgcggtggctgcgaccggaagcagggaggggaacagggcagcgaacgcccggcgattgccttgcttgcctgtgtgctccggccggcgcgagttggtcggtcgttccatgcatggatgacaaggaacttatctcacagtccgacctgcagtcattctaccagcagcagcagcagcaccaccgggccttcggcggcggcggcggcgggcagcatagcccgtcctcgctggccgggatgcactccgtcattcgccccatgcccaacatgaacatgagcccgtcggcgatccttaactctatcggcgggggctccttcaccggtatgcagttccaaatggacccgccgccgccaccattgctgcacaccgccgccatgggtgcctcggctcctacctccacccccggtgccgtccccgcggcccccacggagccggtcaagcgcaaaagagggagaccgcgcaaatacggtcccgacggcaccatgaagcagcagcagctcgtcgccgcacagccaaggatagggccgtctggtcccaacatgatcagcagcgccgggatagaggactcttcgcagaagaagcggcgcggccggccgccgggcaccgccaagaagcatcagccctcgccctctcaaggcaatgcgttcgccggttcagctggaacgagcttcactccgcacatcatcacggcgtctccttcagaggtacgtgtactccctccaccaccctctgaatctttccaagaaacagaatgccgctttcggttcggttcggttcgggcgggcgtactggagctcaccgttggtttcgccaggacgtggcggcgaagatcgtcgcgttcgccacccagtcgtcaagggcggtgtgcgtgctctcggcgatgggctccgtctccagggccgtcctccgccacccggccgacggctctcccatggcgagggttcacgcgtcgccgcagccgtacaacaacagcccagccatctacgaggggttctacgagatcatgagcctaaccggctcgtacaacctggccgagggctcacaacaagaacagtgccagggccagggccagccgagcggcgggctcagcgtcacgctctgcagccctgagaggaatgtgatcggaggtgttttgggcggcccactggtagctgcaggaaccgtgcaggtggtactggggagttttcaccaaggagggtcgaaatccaagtccaagaaaggcgggaagcagcagcaggcgccggcgccggcggccgccttcagttccgactcgctcaccggcggccaggaggcgtcgcccagctctgggcacaaccaaaatctaacgccgccgccgccgccgccctccgtgacgggagggtggcccacctccgggatgtttgacaccagcattgatatcaactcatctagaggatagctcatttcatttgtcgataattccagccctcgagaaattttctgttctcgcacaagaatgatcgaaaccatacttcgaaatagattattcggtttctcccttttcccttttgagcaagaaaaacggaatttctatagaattt

SEQ ID NO: 101521 - DNA, 2190 bp, Zea Mays
ctggccgggtagcgacagcccaccgccctcccccgcgcgcggctggcatggcctggcctggcgatggcgagggaggggaaaacgaacgaacggaccgcgacggcgacggcggcggcaacggagcgccggaaaccgcggcaacggagccgctagcttttcgtcgggcgcacgggaaatcttatcggctctgtggggtggggtggggcgcgggaccgggtgcagacgtgcagtgacagcccatgcccatccatcagtccatcctcaacgattgaacgcacagcgcccggcgcgctacttgcagcagctgccagccatcgtgccctactgcggccgctctcgccgcccgtcccgtcccgtgtaggccaccatcccaccccaaccgtgtcgtcgtcatcgccttatctctctctctctctctcccatcatttatctgtctatcttgatctcatctcctatcttcttcctcctagattctttcttccgcgcgccctctctctctctctccttcctgccttctgcctgcgggcggcccatgtccgtggcgcccctcctgccctgcgagctgcttctccagcgaaaaggttgctgcgccttgacgcaccaccgatccaccgccgcccaacccgagcgttctgtccggcagctaggtagcgagctgcgcggtggctgcgaccggaagcagggaggggaacagggcagcgaacgcccggcgattgccttgcttgcctgtgtgctccggccggcgcgagttggtcggtcgttccatgcatggatgacaaggaacttatctcacagtccgacctgcagtcattctaccagcagcagcagcagcaccaccgggccttcggcggcggcggcggcgggcagcatagcccgtcctcgctggccgggatgcactccgtcattcgccccatgcccaacatgaacatgagcccgtcggcgatccttaactctatcggcgggggctccttcaccggtatgcagttccaaatggacccgccgccgccaccattgctgcacaccgccgccatgggtgcctcggctcctacctccacccccggtgccgtccccgcggcccccacggagccggtcaagcgcaaaagagggagaccgcgcaaatacggtcccgacggcaccatgaagcagcagcagctcgtcgccgcacagccaaggatagggccgtctggtcccaacatgatcagcagcgccgggatagaggactcttcgcagaagaagcggcgcggccggccgccgggcaccgccaagaagcatcagccctcgccctctcaaggcaatgcgttcgccggttcagctggaacgagcttcactccgcacatcatcacggcgtctccttcagaggacgtggcggcgaagatcgtcgcgttcgccacccagtcgtcaagggcggtgtgcgtgctctcggcgatgggctccgtctccagggccgtcctccgccacccggccgacggctctcccatggcgagggttcacgcgtcgccgcagccgtacaacaacagcccagccatctacgaggtgcgtgcaacaaacccggtggaattcaggaccccatgattctttctccaacttacatacaactctcgttggttccatgatcgcaggggttctacgagatcatgagcctaaccggctcgtacaacctggccgagggctcacaacaagaacagtgccagggccagggccagccgagcggcgggctcagcgtcacgctctgcagccctgagaggaatgtgatcggaggtgttttgggcggcccactggtagctgcaggaaccgtgcaggtggtactggggagttttcaccaaggagggtcgaaatccaagtccaagaaaggcgggaagcagcagcaggcgccggcgccggcggccgccttcagttccgactcgctcaccggcggccaggaggcgtcgcccagctctgggcacaaccaaaatctaacgccgccgccgccgccgccctccgtgacgggagggtggcccacctccgggatgtttgacaccagcattgatatcaactcatctagaggatagctcatttcatttgtcgataattccagccctcgagaaattttctgttctcgcacaagaatgatcgaaaccatacttcgaaatagattattcggtttctcccttttcccttttgagcaagaaaaacggaatttctatagaattt

SEQ ID NO: 101522 - DNA, 1938 bp, Zea Mays
ctggccgggtagcgacagcccaccgccctcccccgcgcgcggctggcatggcctggcctggcgatggcgagggaggggaaaacgaacgaacggaccgcgacggcgacggcggcggcaacggagcgccggaaaccgcggcaacggagccgctagcttttcgtcgggcgcacgggaaatcttatcggctctgtggggtggggtggggcgcgggaccgggtgcagacgtgcagtgacagcccatgcccatccatcagtccatcctcaacgattgaacgcacagcgcccggcgcgctacttgcagcagctgccagccatcgtgccctactgcggccgctctcgccgcccgtcccgtcccgtgtaggccaccatcccaccccaaccgtgtcgtcgtcatcgccttatctctctctctctctctcccatcatttatctgtctatcttgatctcatctcctatcttcttcctcctagattctttcttccgcgcgccctctctctctctctccttcctgccttctgcctgcgggcggcccatgtccgtggcgcccctcctgccctgcgagctgcttctccagcgaaaaggttgctgcgccttgacgcaccaccgatccaccgccgcccaacccgagcgttctgtccggcagctaggtagcgagctgcgcggtggctgcgaccggaagcagggaggggaacagggcagcgaacgcccggcgattgccttgcttgcctgtgtgctccggccggcgcgagttggtcggtcgttccatgcatggatgacaaggaacttatctcacagtccgacctgcagtcattctaccagcagcagcagcagcaccaccgggccttcggcggcggcggcggcgggcagcatagcccgtcctcgctggccgggatgcactccgtcattcgccccatgcccaacatgaacatgagcccgtcggcgatccttaactctatcggcgggggctccttcaccggtatgcagttccaaatggacccgccgccgccaccattgctgcacaccgccgccatgggtgcctcggctcctacctccacccccggtgccgtccccgcggcccccacggagccggtcaagcgcaaaagagggagaccgcgcaaatacggtcccgacggcaccatgaagcagcagcagctcgtcgccgcacagccaaggatagggccgtctggtcccaacatgatcagcagcgccgggatagaggactcttcgcagaagaagcggcgcggccggccgccgggcaccgccaagaagcatcagccctcgccctctcaaggcaatgcgttcgccggttcagctggaacgagcttcactccgcacatcatcacggcgtctccttcagaggacgtggcggcgaagatcgtcgcgttcgccacccagtcgtcaagggcggtgtgcgtgctctcggcgatgggctccgtctccagggccgtcctccgccacccggccgacggctctcccatggcgagggttcacgcgtcgccgcagccgtacaacaacagcccagccatctacgaggggttctacgagatcatgagcctaaccggctcgtacaacctggccgagggctcacaacaagaacagtgccagggccagggccagccgagcggcgggctcagcgtcacgctctgcagccctgagaggaatgtgatcggaggtgttttgggcggcccactggtagctgcaggaaccgtgcaggtaccattccataacaacatcatcctcctcctccctctggttgtttacgtttacatacggtgccttgcatgcctggtttgtgcaggtggtactggggagttttcaccaaggagggtcgaaatccaagtccaagaaaggcgggaagcagcagcaggcgccggcgccggcggccgccttcagttccgactcgctcaccggcggccaggaggcgtcgcccagctctgg

SEQ ID NO: 101523 - DNA, 316 bp, Zea Mays
cgacgcccgacacgggctagatgcacgcgggccacaactatggcacaggcacgtcatgccggcctgctaactgtgtcgggccagcccgttagcccgtcgatccatttaattaaattagcgtaaaatgtcaaaaaacgatgcaggaggtagggttcgaacccatgccctgatggaagaagggcgggagacactgggtgaaactgtctaaccagtagaacatcacgttaagatgtttttaatattgaatataaattgtatataggtatatacgttttttgtaaaataaaaaaataatcgtgttgggtcgggccagcac

SEQ ID NO: 101524 - DNA, 106 bp, Zea Mays
gtcaaacagagtaatttggccatggaatatagtgggtcattggtgcgacactacttgttgtggatgatcgttttttgccttttctttttggttgacacagatttag

SEQ ID NO: 101525 - DNA, 153 bp, Zea Mays
ttcgttgtcgcgatgctctgccccagctcgcgtccgccgccgcgtcacccccgcctccccacgctcatcccctccgcccccctgcccgtgcgtcccctccccctcccttgcagcccctgccccctcacgctagcctccgctgcccacccccac

SEQ ID NO: 101526 - DNA, 1071 bp, Zea Mays
caccaatgtcgcaacgtaccatcttcttctcctccttcccccgtccctacccgcgcgcccgcccacctccagcctttaaaacgcctcgctccctgcccctggcctgggtgccgctgccacctcgtcttcaggctccaagggtcagcttcctcacattgcggttgcgcccatctctcgtgcgcagcagcagcgagggaagccatggtcaggaagctcgcgctggcctccctcttcttcttcaacgccagcagcgagggaagccagcgcctttcctccacgtcgtccacgtccgccgcctccttcagctcggcggtgtcgtggcagtggccgtcttgcacgcaggcgaggacgcgctccttccgcggcgacaccagcccggagatcgtgtccatgcgccacgacaccagcagcagcaagcgagaggagcaggaggaggggccgtacaattacaacaacaactacaagacgagcatgaacccggcctacgtccacgacgactactcggccgccgacgctgattgctactcagccgcgacccagagccttaccctttccaacgaggacgaggcgatcatccacggcctccgctcctccactacccggcggatcctgttcgagcccgagtccacgagctccatcatgaagaagacgaaaaagaaggcggcggcgttcgacggtgccacggcgctgtccatcgagtccgctgacccgtacggcgacttccggcggtccatggaggagatggttctgagccacggcgccgacgactgggtctggctggagaagatgctcgggtggtacctgagggccaacggcgagaagacgcacggcctcatcgtcggcgccttcgtggacctgctcgtggcgctcgcctcctcctctggtcccagtcccgccgtctgctcctccagcttcaagttgaagcagagccgccgtcatcttcagctgtctgtcaggacgggcgaacaccactgaacgcagacagagcaggcgaatgcatgtgtgcgactgatttcattttgtgtgtaaacttcaaaagaggtgtaggttgcactcgtggccatccctgtc

SEQ ID NO: 101527 - DNA, 1034 bp, Zea Mays
atatatacgcacacgcggtgggagtgggagggggagactctgccctgaccacagcaaacaacctcctctttcctttccatccatcggaccatcgatcacaattttcatggcggtcaaggactgcggcgggcacaagggctgcgagtgcgagcgggagcggctgtaccggcggtgctgcgcggcggtcgtggctctgatcctcctggtcctcttcatcgtgctcgtcgtgtggctggtgctgcgcccccacaagccccggttctacctgcaggacctgtcggtgctgtgcctgaacgtgacgccgccggcgtccacgtacctgttcacgacgatgcaggcgacggtggcggcgcgcaacccgaacgagcgcgtgggcgtgtactacgaccaggcggacgcgtacgcggagtacaagggcgtggcgatcacggtgccgacgcggctgcccgtgcagtaccaggggccccgggacgcgtccgtgtggtccccgttcctgcgcgccccggaaggcggcgtgcagctcccgccgcagctggccgtggcgctggcgcaggacgagacggcgggctacgtgctcgtcgacgtccgcgtcgacggctgggtccgctggaaggtcggtaccagctggatctcgggtcactaccacctccgcgtcaactgccccgcgctgctcaccgtcaacgacggcaggggcagctacggcgccaacaccggcggcggcaccggatacttccgcttccagcaggcagcggcatgcgccgtagacgtctagcagtgctctctctctctctgtaccagctagctgtgtttgccaattcgtcgatcgaatcaaaggacgatgcttccttcgtcggtgttcatcactcacgcactagctagcttctttctgcgactgccgacttttcgtccggttggttggttggttggttggttgattgattgatatcactactatatcagctagcttttcgatcgatcgattcgtgtaaaagcaaagcaaaggaaaggaaatgaaaaaggctatcttttttttt

SEQ ID NO: 101528 - DNA, 1389 bp, Zea Mays
ctcaccccggcgcctctctataaaaccctccgccttgtcgacccttcttccttctattcccaattcgcaacagcccaaacagatagacccggtccgggtggcggccgtttcaattcgaggcttgtggccggccgccgctgaagcaggaaggagcgtgcgtcggacatggaggacgcacgcgtgctggcggttgtcttcgtcgacggcgagcagagcgtggacttgggcacggtgaccgtgcagccgtcgtttggcggcgtgaagcggcttcaggccgtcgtggcagaccgcgtgggcgccgcgccgcaccagatctcggcgtccctggcgcggccccgccgcgcccgccatgtgcccctcgacgacgccaccgacctcgccgccgccgtcgcgcgggagggttccgggtgctacgtcatcgctgggttccgccgctcccgccggggcggccggtcccgccgcgacaggaagggagtcaacggcgcggccgtggagaagaccatcctgaagcgcctcccgcccacggatctggcgtctctggtcagccctctccctctccctccccgcgccagtgccggtgcctcgcccgggccgctcgtgctctacgacgactacgaggcgcggctgcgggagctgcagcggcagcgcgactggtacttgatgagcaccgcgggtgcgggtccgggtctggaccccgcctacttgcacttgtcggtggcggcggggcatccggataacgaggacccacagcagtggtccccgaggcgacgaccgtccccgtgccccgagtgcgaggcggcggcggcggccatgcggcagccggcgttccactggtgcgtgcgcgacgcggtggtctccgcgggattccgctcccacgtgggccccatcgagcccccgccgaagaagactccgtctcctctgtcgccgccgagccccggccgccgcccgggccttgtctactaatccatcggccagcagctgatccaattccatccatagtactctgtctagcagcaatttgtatgtaagacaaagtcaagcggagatgggattggggacgaatcatggatggtggaggttgcgtgtgggagttgcgcatcgcgacagggaggaagaggatttcttcgccgtagagttgctttgtttgtttttcctttttgccctggactcttctgttttccttcttaacgagaggaagctgtttctggtacaatgcagaaagaaggcttctggtaatttttagaagttggtgttaagtaaccctagttagggttatgtgggcaaatacctgctttgcccctgaggggtctcacatctctatataaggaacctgtacaccccttcatatgacagagatcagaaagagaccagaggcccaaccctatatcc

SEQ ID NO: 101529 - DNA, 1412 bp, Zea Mays
agggtttcgcacccaacacccggagacgaggtgcagagggcagcggtgagcagttggaacgagcttgactatgaggcggaagcgcgtttggtggcggaggcgagggcgtcgtgggataggaaggcaaggggggaggaggaggatgaagaagaacatgatcctgagatgaccttggactactacgcctaccaggctaaaaagtttcgcaacacctggaacatcctctatttcggccacttcggtcgcttcgaggacaccacaaggatccctcctatgcgctttacagagaagccgcctgactccccggcgtacccgcgcactacactgcaggtcttttcgatcaaagttgcagggatagaggggggtttacagtggccactccatgtgtttgggaaggttgccctacgcgacgcagttgatcacaatcgcaatatggtcttcgatcgcactagagacaactgccaaatccttacaaaagaggttccaaatttgaaactgacaggtcctagccgtgctgttctgctggtggatcctgtgactattgaggctgacctgaaagttaaaggccgtactgaatctgaggataaacacttgagctttctagcagtgccattcttggtcatgatcccgctcgagtcatgcctgcgtacaagagatttcaccagcaagcttagcacgctgaggtttgctctcgcaattgttgttctctcagtggaggctacaattagtgtgcgagttcgtggtgggtcatggcctgatggtctccgtgcccagtttgctgcccacacggtgagtataggtcgtgaggaagttgtcttgcttgattctggggacgataaactgcctgtttctgatgatggcactatcaaacttggtcgtcgagttgcatctgttgaagtgagtggggagctgaacgtttctgtcaaggcatggcaaggtggtgaagtctttacgcacagagagaggggtttcaaacctaaagaggcaggttggagttatggcactcttgacgttggcttctgccaaatggatgtatctgtggcctggtcgcttctttcgtcgtacggtgaaaatgaagctttgtaagagtcggtgttagccgtggtcgttgcttcgattctctagcatgtaatgataagttcacattgggatatgcttgctgttttgctgtaatgataagttcacattgggatatgcttgctgttttgctttttatttatttttcttgatcctctagcatgtaatagagtatcctccaagtagagtttttttttccttgatctccctgcataaagcccaagttgctcattgcttatcctaattgttttcttgtttctagtactgcaaggctaaacctggaattatgagtaactactgcacactggttgagcaaaaaaaaaaaaaataccaga

SEQ ID NO: 101530 - DNA, 1622 bp, Zea Mays
aacaatctcgctctcgctcccgctccggtccttccctttcctggacgattccattccattccgttccgtgggtaatggatgacaagtgggcccgttattgacatatggcattggcaggcctttgtttctcagtcctataaggccgagaacaggcagagcaccgggatctagggtttcgcacccaacacccggagtgagcggcggcgagggatcggatcgtcggcggcgatggaggacgaggtgcagagggcagcggtgagcagttggaacgagcttgactatgaggcggaagcgcgtttggtggcggaggcgagggcgtcgtgggataggaaggcaaggggggaggaggaggatgaagaagaacatgatcctgagatgaccttggactactacgcctaccaggctaaaaagtttcgcaacacctggaacatcctctatttcggccacttcggtcgcttcgaggacaccacaaggatccctcctatgcgctttacagagaagccgcctgactccccggcgtacccgcgcactacactgcaggtcttttcgatcaaagttgcagggatagaggggggtttacagtggccactccatgtgtttgggaaggttgccctacgcgacgcagttgatcacaatcgcaatatggtcttcgatcgcactagagacaactgccaaatccttacaaaagaggttccaaatttgaaactgacaggtcctagccgtgctgttctgctggtggatcctgtgactattgaggctgacctgaaagttaaaggccgtactgaatctgaggataaacacttgagctttctagcagtgccattcttggtcatgatcccgctcgagtcatgcctgcgtacaagagatttcaccagcaagcttagcacgctgaggtttgctctcgcaattgttgttctctcagtggaggctacaattagtgtgcgagttcgtggtgggtcatggcctgatggtctccgtgcccagtttgctgcccacacggtgagtataggtcgtgaggaagttgtcttgcttgattctggggacgataaactgcctgtttctgatgatggcactatcaaacttggtcgtcgagttgcatctgttgaagtgagtggggagctgaacgtttctgtcaaggcatggcaaggtggtgaagtctttacgcacagagagaggggtttcaaacctaaagaggcaggttggagttatggcactcttgacgttggcttctgccaaatggatgtatctgtggcctggtcgcttctttcgtcgtacggtgaaaatgaagctttgtaagagtcggtgttagccgtggtcgttgcttcgattctctagcatgtaatgataagttcacattgggatatgcttgctgttttgctgtaatgataagttcacattgggatatgcttgctgttttgctttttatttatttttcttgatcctctagcatgtaatagagtatcctccaagtagagtttttttttccttgatctccctgcataaagcccaagttgctcattgcttatcctaattgttttcttgtttctagtactgcaaggctaaacctggaattatgagtaactactgcacactggttgagcaaaaaaaaaaaaaataccaga

SEQ ID NO: 101531 - DNA, 1321 bp, Zea Mays
ttttggtgctagcctcagattatttctgtttgagagttatgtaaggtactactaactctgcattttttagttatggtttcgaaacatgtattttcaaaccatgactaatcaagtatattctccaccattaattcctctaggcatgacctggaaaactgcttagctgatgctgtaacattttgatgtctctgttctctgctttctggaggtgccatcccctctctttggggaggcttctggttaaacttgcttcagtcacgatgttactgtgctggataaagaagatgccaaagctgaactttgaggttgctaaaccatgcacccagaatcggagttttgtagttgaagctccatgtgagttgagatacttgcaactatacacaatagaatgttcttcgaacctcaagctgcagctcttgctccaactattacttgcctactttgtttttcctatcacgtcttcttgtctccctcgacattgcccgtctgcttccttgcgccttgcttgtgctgtgggctcccttgtctcgcctcttttccagccgtggccaattgtgtccattgctgggtttgccaccaccttcccgtgtcaaggcaaacccctccatttcgagcacgttccaaacccaaacttcacattgccttcttttgagagctacgtaaggttccaaatttgaaactgacaggtcctagccgtgctgttctgctggtggatcctgtgactattgaggctgacctgaaagttaaaggccgtactgaatctgaggataaacacttgagctttctagcagtgccattcttggtcatgatcccgctcgagtcatgcctgcgtacaagagatttcaccagcaagcttagcacgctgaggtttgctctcgcaattgttgttctctcagtggaggctacaattagtgtgcgagttcgtggtgggtcatggcctgatggtctccgtgcccagtttgctgcccacacggtgagtataggtcgtgaggaagttgtcttgcttgattctggggacgataaactgcctgtttctgatgatggcactatcaaacttggtcgtcgagttgcatctgttgaagtgagtggggagctgaacgtttctgtcaaggcatggcaaggtggtgaagtctttacgcacagagagaggggtttcaaacctaaagaggcaggttggagttatggcactcttgacgttggcttctgccaaatggatgtatctgtggcctggtcgcttctttcgtcgtacggtgaaaatgaagctttgtaagagtcggtgttagccgtggtcgttgcttcgattctctagcatgtaatgata

SEQ ID NO: 101532 - DNA, 3559 bp, Zea Mays
cagcattcagcagcccccctctctccttccccaacactccaagctagtccaagaggcgagcagcagagagggaaagcgaatcccctcctctcctcctcccactcttcaatgctctccccgtcccctccgccatggacgccgccgccctcgccctctccatcatcctgctcgccgccgccgccgccaccactctcgcccgcggggccacgcacccggcggaccaggcggcgctggaggaccttcggaaatcgctgacgaacccggacgcgctggggtggcccgacgacggggacgcgtgcgcgtggccgcacgtctcctgcgaccgcaccggccgcgtcgacaacctcgacctcaagaacgccggcctggcggggacgctcccgccgtcgctcccctcgctcgcggcgctgcgcgacctcagcctccaggggaacagcctctctggcgcgctcccgtccttccggggcatggcgtccctccagcgcgccttcctcaacgacaacgacttcgacgccatcccgcccgacttcttcgacggcctcgccgacctgctcgagatctcgctcgccaacaacccgcgcctcaacgcgtcccagggcggctggacgctcccgcggggcctcgccgactcgtcgctgcagctgcaggcgctctccctcgacaactgcagcctcaccggcgggatcccggactccctcgcccgcctcacgggcctccagaacctcacgctctcctacaacaacctctccggccccgtccccgccgcgctcaacggctccgccatccagaggctgtggctcaacaaccagcaaggggacgccaagctctccggcaccctcgacgtcgtcgccaccatgaccggcctccaggagctctggctccacggcaacgacttctccggcccggtccccgacgccatcgccagctgcaaggaactctacaccgtcaggctcaacaacaaccagctcctcggcctcctgccgcccggcctcgccgcgctccccgcgctccgggagctcaagctcgacaacaacaacctactgggccccgtcccggcgctcaaggcccccactttcaccttctccgggaacgagttctgcgccgccaaacccggggaagcctgcgccccggaggtcatggcgctgctgcacttcctcgccgaggtgcagtacccgaacaggctggtcgggacctggtccgggaacgacccctgcgcgggctggctcggcgtcacctgcgtccagggcaaggtcactatgctcaacctgccggggtacggcctcaacggcaccgtcagccagagcctcgccaacgtcaccacgctctccgaagtgaacctcgccgggaacaacctcaccggccgagtgccggacagcctcaccaggctggcctcgctccagaagctggacctgtccatgaacgacctgtatggcccgctgcccgcattcagtcccaccgtggatgtgaacgtcaccggcaatctcagcttcaacacaacggatacgcagccaacggatgcgcagccaaacggcgagtccccgcggcctcgtcctacgcctggcgcatctgctggtgctgggggtaatactagtgcaggggggatccctgggagtgggaagaaggcctcatcagctgtgttgctgggcacaaccattccagtcgcggtgagcgtggtcgcactggtctccgtgggcgccgtgttcttgtgcaagagaagagcgtcggtgccgccgcaggcagcctccgtggtggtgcatccccgtaatagctctgatccggacaacctggccaagatcgtggtggccaccaacgacgacggcagcagcagcggcacgtcccatagcgggagcagcagcggccaggctggcgacgtgcacgtggtggaggccggaagtttcgtgatcgcggtgcaggtcctccgtggcgccaccaggaacttcgcccaggacaatgtgcttggccgtgggggatttggggtggtctacagaggggagctgcacgacggcaccatgatcgcggtgaagaggatggaggccgtggcggtgagcaacaaggccttggacgagttccaggccgagatcgccgtcctgaccaaggtccggcaccgcaacctggtgtcgatactgggatacgcgatcgaagggaacgagaggctgctggtgtacgagtacatgcccaacggggctctgagcaagcacctgttccactggaaacagttgcagctggagcctctctcgtggaagaagcgtctcaacatcgccctggatgttgcccgtgggatggagtacctgcacaacctggggcaccaccgcttcatacatagggatctcaagtcagcgaacattctcctcggcgacgacttccgggccaaggtggcggacttcgggctcatgaaagatgcgccggatgggaactactctgtggcgaccagacttgccgggacgttcgggtacttggctcctgagtatgcagttaccgggaagatctcgacgaaagcagacgtgttcagcttcggtgtagtgctgctggagctgataacagggacgacggccatcgacgacagccgcgtgggcgagggcgaggagacccggcacctggcgtactggttcagccagatacggaaggacgcggagcagctgcgcgcggcgatcgacccggccctggacgtgggcgacggcgagacaatggagagcatcggcgtgatcgcggagctggcggggcactgcacggcccgggagccgtcgcagcggccggacatggggcacgcggtgaacgtgctggtgcccatggtggagaagtggaggcccgtgaaggacgaggccgaggactacctgggcatcgacctgcacctgccgctgctgcagatggtgaagagctggcaggacgcggaggccggcggcctgacggacggcggcgggagcgtcatgagcctggacgacagcaagggcagcatccccgcccgccccgccggcttcgccgagtccttcacctcggccgatggccggtgatcggatgcatgcaatgcatgcatccatgtgtctctcaaatgtctctcgtctcccggtccctcccttgcctgttttcgcacattcgttgctgtaggtacaaaagaaagcagtacatgggatcgtcgtccatgtgcacaaccttgtgcttcttcttcttctcctgctctgctttgcctgtgcttcttcctctcctgctctgctctgctctgctttgtagatacatgattttttttttgcattggtggtaggcatctcttttgcttcttttttctgtgtaattccagtcagtgttgagactcgagtctctggctttttccgtcgaacagaatctggtcgctggtcggtcaagacataatgcttcctccatacctgatgaagcatgcatgcaaatggatggaggtggtagcagcagcaggagtactgcacgcacaatgaatggaccgtctagtctagtccggtccagcaatgatcaatgagtgtcatttttcttttttgctgaggggacacatcatcgtcatcaacctacattacatgatgtagaatcagatggg

SEQ ID NO: 101533 - DNA, 1431 bp, Zea Mays
gcctggcgcatctgctggtgctgggggtaatactagtgcaggggggatccctgggagtgggaagaaggcctcatcagctgtgttgctgggcacaaccattccagtcgcggtgagcgtggtcgcactggtctccgtgggcgccgtgttcttgtgcaagagaagagcgtcggtgccgccgcaggcagcctccgtggtggtgcatccccgtaatagctctgatccggacaacctggccaagatcgtggaagaagcgtctcaacatcgccctggatgttgcccgtgggatggagtacctgcacaacctggggcaccaccgcttcatacatagggatctcaagtcagcgaacattctcctcggcgacgacttccgggccaaggtggcggacttcgggctcatgaaagatgcgccggatgggaactactctgtggcgaccagacttgccgggacgttcgggtacttggctcctgagtatgcagttaccgggaagatctcgacgaaagcagacgtgttcagcttcggtgtagtgctgctggagctgataacagggacgacggccatcgacgacagccgcgtgggcgagggcgaggagacccggcacctggcgtactggttcagccagatacggaaggacgcggagcagctgcgcgcggcgatcgacccggccctggacgtgggcgacggcgagacaatggagagcatcggcgtgatcgcggagctggcggggcactgcacggcccgggagccgtcgcagcggccggacatggggcacgcggtgaacgtgctggtgcccatggtggagaagtggaggcccgtgaaggacgaggccgaggactacctgggcatcgacctgcacctgccgctgctgcagatggtgaagagctggcaggacgcggaggccggcggcctgacggacggcggcgggagcgtcatgagcctggacgacagcaagggcagcatccccgcccgccccgccggcttcgccgagtccttcacctcggccgatggccggtgatcggatgcatgcaatgcatgcatccatgtgtctctcaaatgtctctcgtctcccggtccctcccttgcctgttttcgcacattcgttgctgtaggtacaaaagaaagcagtacatgggatcgtcgtccatgtgcacaaccttgtgcttcttcttcttctcctgctctgctttgcctgtgcttcttcctctcctgctctgctctgctctgctttgtagatacatgattttttttttgcattggtggtaggcatctcttttgcttcttttttctgtgtaattccagtcagtgttgagactcgagtctctggctttttccgtcgaacagaatctggtcgctggtcggtcaagacataatgcttcctccatacctgatgaagcatgcatgcaaatggatggaggtggtagcagcagcaggag

SEQ ID NO: 101534 - DNA, 1568 bp, Zea Mays
gtcgcgaacttgttacgtgtcactttctctcgggaggcgacgtgtcgagtggagcgacgtctccaccatcttcttgccttttcctccatccccgcccttacgaatttctccgcgatttcagcgcgcttcctcccgccggctcctccccccgcctccgctctcaccgcggccggccagccatggagcaaggccaggggccgccgccgccgaagccgcctgcgacggagcgcgacatcggattcgccgagcgggccgtggcggcggcaggcgcggccgtcgtgtcagccgtcctcgtcaaccccctcgacgtcgccaagacgaggttgcaagcacaagctgctggagttgtttataacccgatatggtcagattttaggtgctatccatcatgcagcactggtggaatcaatggtttaggcccatgctcgtcctgcagtcctgaatgctttcagtacagaggaactatggatgtgttctctaaagtcactagacaggaaggaatttttagactatggagaggtactggtgcaagcctggcattggctgtaccaacggttggaatatatctgcctagttacgatttattgcgcaattggattgaagaatactcggaccgcaattgtcccaagcttagaccatatgctcctcttatttctggctctattgcacgatcattggcatgcataacttgttgccctattgagttagcaagaacacgtatgcaggccttcaaagaatcaaatgttggagggaagccccctggaatgtggaagaccttgataggtgtgctttcatcaagacagagcatcaagagccctgaaaacgtgcgaggataccacctcctatggactggtctgggagcgcaactagcacgcgatgcgccctactcagctatatgctggacagttcttgaaccaattagacgacatgtgacacgactattcggtgatcaaagcaacgcgacagttatattgggggcgaacttttctgcaggctttattgctggggttatctctgcgggcgctacctgccctcttgatgttgccaagacacgcagacaaatagagaaggatcctgaaagggtattgagcatgaacacaaggcgcatattgcttgaggtttggaggaaggaaggtgtggaaggtctgttcagaggcgcaggccctcgaatggggcgcgcaggcccgtcggtgggcatcgtcgtctcctcctacgaagttgtgaagcacctcatgcacaagaacacgagcaatgcagcagacctatgattcgatgagctcgattagcacgccctaatggcacaagtaggattaggaatgtcgctattcaaagaaacacatttttttacggtagtccatgacagataaatgttatccctccattccattacaaactgttacttctaagatgggtttttatgcatctagtggctagcttataacctgagttatatcgcaacgagatctacgtatctagccacgtatgtagtggctaggattttatgtacaagtggcaaaggtttatgttctaacagattgctcaacacatgagtcgcacactatgtaatt

SEQ ID NO: 101535 - DNA, 443 bp, Zea Mays
ccttctgttgttgctcgtaaaaagtgccggtgagattcattacattatttgctcttttgtcgaaatgcagagggtgaagaagttttcgctggcagaaccaagctccaccacaaccaccgaagctctgaagagcgatacgaagccctgagcattctgcaaagaaaactgtatcatctgattgggcgcggttgatgataagtctatgcctgttaatgtagcgttagatttgtacttttgaacccatgccagatgtacttgtgccagaaatcaccaatctgttgaactgaaaacgttacccgatgtccacacaaatgatacagtccatgatgccatttcgataagaaaggcaccatccatccaaggttttctaacattttgctgcgctgttgcttgaccgatgaatgttatgctggcccaatgcaatgcaactcagatttgcatca

SEQ ID NO: 101536 - DNA, 740 bp, Zea Mays
gcatttggtaacgagaggagcggagaaggagcttcttggagaaagacggctcgagagagagctttccgattgcgatcccatcaacggccgccgaccgccgctggttttctttcttctcgcccaagccgcgccgccggcgcggtcctttgtaaaggcctcgcggcacgggagcggcctgcgctccctctctctggattaggcaaagcatcctcctgtttggatcggcatggagaagacgacgacgacggcgcagccggtctgcgcgcaggagtcgctggctctgctcaactgcgtcgcctcggtcccctacgaccgggataggtgcctcgccctcgtcgacgccctccgtgaatgcatcgtgcgcaagagggtgaagaagttttcgctggcagaaccaagctccaccacaaccaccgaagctctgaagagcgatacgaagccctgagcattctgcaaagaaaactgtatcatctgattgggcgcggttgatgataagtctatgcctgttaatgtagcgttagatttgtacttttgaacccatgccagatgtacttgtgccagaaatcaccaatctgttgaactgaaaacgttacccgatgtccacacaaatgatacagtccatgatgccatttcgataagaaaggcaccatccatccaaggttttctaacattttgctgcgctgttgcttgaccgatgaatgttatgctggcccaatgcaatgcaactcagatttgcatca

SEQ ID NO: 101537 - DNA, 249 bp, Zea Mays
gcaagcatatcccaagtgtgaacttatcattacagcaaaacagcaagcatatcccaatgtgaacttatcattacatgctagagaatcgaagcaacgagcacggctaacaccgactcttacaaagcttcattttcaccgtacgacgaaagaagcgaccagcgcagatactccatttgcagaagccaacgtcaagagtgcatactcaactgctcttaggttgaaaccctcctcttgtacgtaaagactcac

SEQ ID NO: 101538 - DNA, 1439 bp, Zea Mays
gtgatttgccgtgctctcccgtcttctcgcgatggggagcaccggcgacacgacgatggccgaggcggaggcgccggcgccggtgggtgactacgagctgctggagcgcctgggggggcgtcccccgtacacgtccgtgtggcgagcggtctcccggtccaccggcacgcccgtggctgtgaagcaggtgcggctcaccggcctccccgcgcgcctccgcgacagcctcgactgcgaggtccgcttcctcgccgccgtcagccaccccaacatcatccgcctcatcgacgtcgtccagacccagagctgcctttacctcgtcctggagctctgcgagggcggggacctggcggccttcatccggcgcaatgggagcgtagacgagcgcgtggccagaaattttatgaaacagatcggagctggcttacaagtgctgcaccggcaccatgtcgtccaccgggacttgaaacctcagaatatcctgctctcttctccgagaagcagcgatgcgatcctcaagatatctgattttggtcttgcaaggtttcttggacccggggagtacgcagacacatcttgtggttcttgtttgtacatggccccagaagtgatgctgtttcaaaagtacaatgacaaggtagacatgtggagcatcggcgcgatcctatttgagctcttgaatggctacccgccattctatggcagaagcaacgtgcagctgcttcagtacatcaacagaagcacgtctctcccgttctcggaaccactggcgtctaccttaggccccgattgtgtcgatatatgcaccaggctactatgcactaatccagtgaagcgtctgtccttccaagagttcttggaccaccgcttcttcagagtatgagtgcccaagccatggggaccaccgggcagcgacatgatctgaagaacatcaagaagtttcttgtccttggagtgctgactgactctgttataaagcgttcagaaattgatgcccagtgctcgtcgtcttggttttctgttcgcgtccatttccttctccaaagagccatgtggccaacgtttcaatctgttgtgatctggtctgtactgtttcaatctgctaacagtaggagttttaaagatatttagtccaaaacagaactccatcttttattcaaagcggcataaactatcccattttattgagcaaacatatgcctatcctttccttgtaccaaagaaaaaactacagggagacaaacaaaccacagaaatgcgaagtggctatcggttcagccactaaactttcaattcaacatcaacaataacccagacaccatgctctcttacgctcggctcgacttctaataaaatgcaatgaatcaagtaccagcatgcatcagttcacagcagccacttccttcagtgactccactgtcttcaagacttcctccccc

SEQ ID NO: 101539 - DNA, 1245 bp, Zea Mays
gtgatttgccgtgctctcccgtcttctcgcgatggggagcaccggcgacacgacgatggccgaggcggaggcgccggcgccggtgggtgactacgagctgctggagcgcctgggggggcgtcccccgtacacgtccgtgtggcgagcggtctcccggtccaccggcacgcccgtggctgtgaagcaggtgcggctcaccggcctccccgcgcgcctccgcgacagcctcgactgcgaggtccgcttcctcgccgccgtcagccaccccaacatcatccgcctcatcgacgtcgtccagacccagagctgcctttacctcgtcctggagctctgcgagggcggggacctggcggccttcatccggcgcaatgggagcgtagacgagcgcgtggccagaaattttatgaaacagatcggtaatcaagttgttgatccatgattgtttgactcaattgtgtcgtccaccgtctggggatgtgatctgtgagaaatggcccctgtggcaggagctggcttacaagtgctgcaccggcaccatgtcgtccaccgggacttgaaacctcaggtttcttggacccggggagtacgcagacacatcttgtggttcttgtttgtacatggccccagaagtgatgctgtttcaaaagtacaatgacaaggtagacatgtggagcatcggcgcgatcctatttgagctcttgaatggctacccgccattctatggcagaagcaacgtgcaggtggctgcccctcttgtctatctggaattctgaattcaacaacactgatggccgtctcccttcagctgcttcagtacatcaacagaagcacgtctctcccgttctcggaaccactggcgtctaccttaggccccgattgtgtcgatatatgcaccaggctactatgcactaatccagtgaagcgtctgtccttccaagagttcttggaccaccgcttcttcagagtatgagtgcccaagccatggggaccaccgggcagcgacatgatctgaagaacatcaagaagtttcttgtccttggagtgctgactgactctgttataaagcgttcagaaattgatgcccagtgctcgtcgtcttggttttctgttcgcgtccatttccttctccaaagagccatgtggccaacgtttcaatctgttgtgatctggtctgtactgtttcaatctgctaacagtaggagttttaaagatatttagtccaaaacagaactccatcttttattc

SEQ ID NO: 101540 - DNA, 1135 bp, Zea Mays
gtgatttgccgtgctctcccgtcttctcgcgatggggagcaccggcgacacgacgatggccgaggcggaggcgccggcgccggtgggtgactacgagctgctggagcgcctgggggggcgtcccccgtacacgtccgtgtggcgagcggtctcccggtccaccggcacgcccgtggctgtgaagcaggtgcggctcaccggcctccccgcgcgcctccgcgacagcctcgactgcgaggtccgcttcctcgccgccgtcagccaccccaacatcatccgcctcatcgacgtcgtccagacccagagctgcctttacctcgtcctggagctctgcgagggcggggacctggcggccttcatccggcgcaatgggagcgtagacgagcgcgtggccagaaattttatgaaacagatcggagctggcttacaagtgctgcaccggcaccatgtcgtccaccgggacttgaaacctcagaatatcctgctctcttctccgagaagcagcgatgcgatcctcaagatatctgattttggtcttgcaaggtttcttggacccggggagtacgcagacacatcttgtggttcttgtttgtacatggccccagaagtgatgctgtttcaaaagtacaatgacaaggtagacatgtggagcatcggcgcgatcctatttgagctcttgaatggctacccgccattctatggcagaagcaacgtgcaggtggctgcccctcttgtctatctggaattctgaattcaacaacactgatggccgtctcccttcagctgcttcagtacatcaacagaagcacgtctctcccgttctcggaaccactggcgtctaccttaggccccgattgtgtcgatatatgcaccaggctactatgcactaatccaggtctgtcacccgttcccatctagcccacctggggtaacctaggccagctaatgatctatggcaaacgtttcagtgaagcgtctgtccttccaagagttcttggaccaccgcttcttcagagtatgagtgcccaagccatggggaccaccgggcagcgacatgatctgaagaacatcaagaagtttcttgtccttggagtgctgactgactctgttataaagcgttcagaaattgatgccc

SEQ ID NO: 101541 - DNA, 1292 bp, Zea Mays
gtgatttgccgtgctctcccgtcttctcgcgatggggagcaccggcgacacgacgatggccgaggcggaggcgccggcgccggtgggtgactacgagctgctggagcgcctgggggggcgtcccccgtacacgtccgtgtggcgagcggtctcccggtccaccggcacgcccgtggctgtgaagcaggtgcggctcaccggcctccccgcgcgcctccgcgacagcctcgactgcgaggtccgcttcctcgccgccgtcagccaccccaacatcatccgcctcatcgacgtcgtccagacccagagctgcctttacctcgtcctggagctctgcgagggcggggacctggcggccttcatccggcgcaatgggagcgtagacgagcgcgtggccagaaattttatgaaacagatcggtaatcaagttgttgatccatgattgtttgactcaattgtgtcgtccaccgtctggggatgtgatctgtgagaaatggcccctgtggcaggagctggcttacaagtgctgcaccggcaccatgtcgtccaccgggacttgaaacctcagaatatcctgctctcttctccgagaagcagcgatgcgatcctcaagatatctgattttggtcttgcaaggttccctgcagggttcttggactagtcttttgaaatgaaatctaaataagaaaaaaactgaaaacatggacggattagtattttgacctagatgagattccctgcaggtttcttggacccggggagtacgcagacacatcttgtggttcttgtttgtacatggccccagaagtgatgctgtttcaaaagtacaatgacaaggtacgagtggcatgtgtgttcagaaagttgctagcagtatgaacctacctgtgttatgcacaggtagacatgtggagcatcggcgcgatcctatttgagctcttgaatggctacccgccattctatggcagaagcaacgtgcaggtggctgcccctcttgtctatctggaattctgaattcaacaacactgatggccgtctcccttcagctgcttcagtacatcaacagaagcacgtctctcccgttctcggaaccactggcgtctaccttaggccccgattgtgtcgatatatgcaccaggctactatgcactaatccaggtctgtcacccgttcccatctagcccacctggggtaacctaggccagctaatgatctatggcaaacgtttcagtgaagcgtctgtccttccaagagttcttggaccaccgcttcttcagagtatgagtgcccaagcc

SEQ ID NO: 101542 - DNA, 3106 bp, Zea Mays
aagattctgccaaaagatcctctcggatgcccccgcccccgcccacccatttcgccagtcgccatcgagctctcgcttccgccgcccgctgccgctctatcaccccggtgctgagccctaggatgtgactggcggacgtctctatggccgagccgtaggtggaggcggcacctcggcgccgtgggagatggaggacgatgacaccgagggtgtaggcgagagcacctgtccccccgccgccgaccgaggaggctcctcctcggccggcggcggcggcggcgactcgcacagttacactgacatagagaaggaggtcttcgaccgtctcatggagaagagaatcccggaggtcgtcgcggacccggtggccttccgcgaagagctccgccgccacttcgagcgcctgccgctgagctacgccgtcgatgtgaacgtcgacaaggcggaggacgtgctgctgcaccggaggattctcaacgagtgcgctcaccctgaaaatcgccccatcttccatgtgggcttcctgaactgcatcccgccctcggtggatccacagtataacactcagtccatctctacgagcgaaaacggtaattgtgggggttctcaggattccactttgagaaaatttgagccatgcgaagggatcgaggacctcagtttaactggacaaaaagttgtggttgactctgtggccagttcttcgaggggagatgaagaaatcctccatgttcatgaaattattttttctaccattgacaaaccaaagctcctcgctcagctatctgctttgttgtctgaagttggactgaacatccgtgaagctcatgtcttctcaacgactgatggcttttgtttggatgtatttgttgttgatggctgggatacaaaggagacagatactttgctacagattctcaaggagacagcggcacgaaatcatgcctcattatcaaacccaaccaattctgcagcctcagaaagagtactggaactacaagagaagattggtgattcaaatattgacaggaattttctgcagattggggagaagattgcatctggatcttccggggacttgcatcgaggaacttatcaaggtatggatgttgcagtaaagttcctcagaaccgaacatgttaatgactcgtcaaaggtggagtttttacaagaaataattattctaaagagtgttaatcatgataatgttgttcgattctacggggcatgcacaaagcagagaaaatatgtcatcgtgacagagtatatgcctggaggcaatctgtatgattttcttcacacgctaaaaaatactttggatctcccaacggttctcaggattgctatcggcatctccaaggggatggattatttgcaccaaaataacatcatccatcgggacttgaagactgccaatttgcttatgggctctgattatgttgtgaagattgcagactttggagtctcaaggaatccatctcaaggtggagacatgactgctgaaactggtacctacagatggatggcacctgaggtaataaaccataagccgtacgatcacagggcagatatcttcagctttgctgtggttctgtgggagctggtcacttcaaagataccatacagaaatctgacacccttgcaagctgcactgggagtaaggcagggaatgcggttggagatcccgtcatgggtcaatccacaactgtctaaactgattcagcgttgctgggacgaaaatcctaacctgcgcccctctttctcagagatcactgcagagctggaaggcatgttaagggatcatcaggcctccaagggaagcaacaaacattcgaaggcaaaggcacacaaaaaatcgcagagagaggcagaataacgaggttgtcagttaccaccttgtgaaaagcttagtggagcttggctatcatcgtccaagattctgaggctactacaaagatgctgctagtgtacaattgtcaaatattgtatatgattggtgtgtgtgtgtgtttctattactcccaaaaacactatatacgggagaagcgtcgacaatacagcgggacaagcaaagacacggaatccttgtacaaaatggcttgcaagcagcataaaatgccctctagtttttgtatacaaaacatgaaaaatatatgtgcatgagccgtgcgtgcttcctgtgattctgtatctccatgaatcctgttctttgattctacatctcctgccaaagttacatttcttcttgaatctgaaagtagctctgacgttttctttctgtttcatgagccattgcattcttgggcctggtctgtttgctctataagggcagtaggagaaagggcccacataacgatcatgggccgttatcgtatttacttacgtgatttgccgtgctctcccgtcttctcgcgatggggagcaccggcgacacgacgatggccgaggcggaggcgccggcgccggtgggtgactacgagctgctggagcgcctgggggggcgtcccccgtacacgtccgtgtggcgagcggtctcccggtccaccggcacgcccgtggctgtgaagcaggtgcggctcaccggcctccccgcgcgcctccgcgacagcctcgactgcgaggtccgcttcctcgccgccgtcagccaccccaacatcatccgcctcatcgacgtcgtccaggtacgacgccgtctccttttctctggcactccccgccgatcgacttggacctcctagttcgatctccttctctatttgggtgcctggcagacccagagctgcctttacctcgtcctggagctctgcgagggcggggacctggcggccttcatccggcgcaatgggagcgtagacgagcgcgtggccagaaattttatgaaacagatcggtaatcaagttgttgatccatgattgtttgactcaattgtgtcgtccaccgtctggggatgtgatctgtgagaaatggcccctgtggcaggagctggcttacaagtgctgcaccggcaccatgtcgtccaccgggacttgaaacctcaggtcatttttttttcttcttcttctgtttgtgactggattgggtcaacaattcaagtaacggatgtgct

SEQ ID NO: 101543 - DNA, 2163 bp, Zea Mays
gtcctccgccttcttctcactgacatccgggcctccctgcacagcgacagtgaaggacccacatcagtcgggaaacggagcccacagccacagcgtgtggtacgcgagtggattgaactaaccacccccggcctcgtcttcttctccgcgccccggtgtgttccccacctaaccccaccccgaatccaccatggccgccggttctggccccgccccgcccgcggaagcgcagcccccgccgccgatccaccacctgccgccggacgcgctccacaacgtgctgctccgcctgcagctgcgcgacgccgtcgtgtgccgccccgtctcgcgcctcttccacgagaccctctcgccgcagctcctcgcgctgctccccagcctgcgcctcctcctcctccgccacccgcgtcccgacggcggcggctgcctccacgccttcgaccccgcgcgccgcacctggctccgcctccccttcgcccacttcctcccctaccactccttctcccccgtcgcctcatccacgtccctcctctacctctgggtcgagacctcctcctccacctcgcccctggccctccccccgtccacctcctccgcgtcttccgcctcgcccgtgcacccgcccaaatcgctcgccgtctgcaaccccttcgccggcacgtaccgcctcttgccccagctcggatccgcctgggcgcgccacggcaccgtcctcgccggccccgccggcacggtgctcgtcctcaccgagctcgccgcgctatcctacaccccctccggatccgccaagtggatgaagcatcccctctctctgccgtccaagccgcggagccccatactggcctccgacgccgtcttcgcgctctgcgacgtcggcacgccgtggcgcagccagtggaagctcttctcctgcccgcttgccatgctcacggggggctgggcgcccgtggagcgagcggcgtggggagacgtcttcgaggtcctcaagcgtccccggctcctggctggggccggcggccgccgggtccttatgatcggcgggctcaggtcctcctttgccatggacgcgccatgctccacggtcttaatactccgcctagatctggccaccatggagtgggaggaagctgggcgcatgccgcccaatatgtaccgctgcttcactggcctatgcgaggctgcctcgcagggaggcgccataccggccgctgctgccgggggtaacaataaggtcaaagttttcggaggcgatgggaaggtgtggttcgctggtaagcgagtgcgcgggaagcttgcaatgtgggaggaagatgagatggggagcagtgggaagtgggactgggtggatggtcttcctggctatggtgatggtgtataccgtggatttgtgttcgatggcgggttcacagcgattccttgaaaacgaatcctagtctggtgggtgtccgctcaaattgcgccggtttactttgacccaggacatctacctatcttatctcatgcatgatgaaaactctagttgttgtacttgattattggaaaagatcagtaagctgtgtgtttcagacaataaaatgatgtagaccatactctatttacatatcaaaaacttgaaatagtgcctgccatttggtaagcatttcccatcttggtcatatgcaaggtaagtagacacatcatcataataccttgatatgtcaaagctgttaatcggatgtttgctttaaaatgcagttgtgagttactctgggttgtcaagggttttgatatatattatagggctagtgatggtgttagcctaacacttgcattgcatcatacagtaacacacggtttcatgtctttccctgctagttctccactggatgatgcttattttgtttaatataaactgtggttacctacctattatttgatccacttaggcctttgatgattagctctaggctctatagctggtcgatatagtgatatatatgacaaattacgtgggccttcagaggatattagtaagtaataggcgtaggctatcctattctcaatgtgttaccttgatggagcacaacatttgttgatgtaattgagctgggatgaaccattgacctatcctattcctagactcttctgtttacatctttaactgctgacattgtggggatggat

SEQ ID NO: 101544 - DNA, 763 bp, Zea Mays
ggaaaaaagcagagctaggagcagcagaagctagcgagctgtcctccttcatatgccgctggccttgaagagcctcatgaggccgaaggtgacggccatggcggcccagccgccgcttaccacgcgcgcgcacgacctcgccacgggagctcgccccagcacggcgcccacgcagccgaacgcggccagcgtcgcggtggccacggcggccaccaccccaatccgcagcctgtagtcggtgacgaacccggcggccagcagcggcaggagcgcgcccacggagaaggcgagcgcggacgccgcggcggcctgcacggggctgggcagtgccttctcctcctcggcgccgcggtccagccgcgccagctccacgtcgcgctgggagcacacggacacgaactcgccgatggccatgctgcacgcgcccgccaggaggcccgcgaacccggagatgaccatggcgcgcgcgtccgccttcacggcgcccacgcccagcatcagcgacgccgtcgacaccaggccgtcgttggcgcccagcaccgccgcgcgcagccagttggcgcgctgcgacaggtcgtcgtcgtccaccgcgcacggcggccccacgacgacggtggccgccgggttctcggtgtccaccacggcagccatcttgccgacgctgctggccatggcgatagatgtgtgtgtgatcggatcggagtgactagctcgtgatatatagcaggagtagcacgcagctagcagtgtgccagacacacgc

SEQ ID NO: 101545 - DNA, 1573 bp, Zea Mays
ggaatattccccgtttatccgcaacaccgttcaaaatggcccccctgcattaggctgcaaactaaactagggactggaaagagaaaagagaacgagcagacggggtgataagttaaaaaagagaataaggacgggggttttaagtgaaaaaggccagccaacagaggccggtggaaaggagagaatcgagcagagccacccggttgctcctcatttccactttccactctgcctccgctgccgatcgccgtccccgaccgcagcgcaggtgaggatccaaccccaacaaacttccaggcgacggactgaggatgagtgaagaggataaggctgctgcttctgctgagcagcctaagagggcccctaagctcaatgaaaggatcctctcctctctgtccaggaggtccgtagctgctcatccatggcatgatctcgagatcggtcctggtgctcctgctgtattcaatgttgttgttgagatcacaaagggaagcaaagtcaaatacgagcttgacaagaaaactggactgattaaggttgatcgagtcctttactcatcagttgtataccctcacaattatggtttcattccaaggactctttgtgaagacaatgacccaatggatgtgttggtcctgatgcaggagcctgttgttcctggttcgttcctgagagctagagcaattggccttatgcccatgattgaccagggtgaaaaggatgacaagataatagcagtatgtgctgatgatcctgaataccgtcactacaacgacatcagcgagctgtctcctcaccgcctgcaagagatcaagcgcttctttgaagattacaagaaaaacgagaacaaagaagtcgcagttgatgcattcttgcccgcgacaacagctcaagaagccattcagtactccatggacctgtatgcccagtatattttgcaaagcttgaggcagtagattgcaagcaacaatttatctatcatgcgtcttggatgggggcgtgattttaataagccaaatcgcttgctatattgggaaccttggaattgagaacagcgtcactagctgtgattcgctcctttctcgttaaattatcatatgaataggccaagtccatacgtttaccgtgtggcgctctgtcagtcttcgtctacccaagtagctagctgcatggagggatgtctagcgttgctatgagatggcactcgtgggtctgcgggctggctacatgggtccgttcctgtgttttccgtaaaataaaattataattctatataattgaatcatttaatttatgtgatctttttgtgtattccaatcagttattgagtgtgacgacggtgtttttggctaaaattgcatcgcgtggtgatgtcatgaagcaagtgtgtgtgtttgttatactgagatccatccatataccaaaccccatagagatgtgtttgttaagcaagtgttagcgggtgctcggtttctgtccctaaagttttctatcatattagatgtttgaatgctaattataaatattaaatatagtttaattataaaaaacaaattatacaaatgaagactaa

SEQ ID NO: 101546 - DNA, 1924 bp, Zea Mays
ggaatattccccgtttatccgcaacaccgttcaaaatggcccccctgcattaggctgcaaactaaactagggactggaaagagaaaagagaacgagcagacggggtgataagttaaaaaagagaataaggacgggggttttaagtgaaaaaggccagccaacagaggccggtggaaaggagagaatcgagcagagccacccggttgctcctcatttccactttccactctgcctccgctgccgatcgccgtccccgaccgcagcgcaggtgaggatccaaccccaacaaacttccaggcgacggtgagatccatggctcccgtttttttcttagatcaaggggcgggagggaggcaaggacggactggcggggtgggagacggccggggggcccagacggggcgaggcaacttgaccggagcggttgccgtggcaggggcggagccggagccggtggcagctctccgccgctggcgacgggtgctggatggtggggcggggccggaccgggtagcgactggctggactcgtgtttctgtcgtgacttctgaagagagcgaccgccgcacgggaggacggagggaaggaacgaggccgtgggatcgcaggtgtacggctgggattggtcgtctgagatggtggcaaaaatcttctgcctccctgcatattctagttgcctcatggatctggcctgccatttggtggctgctgctgggattctaggaccagttcgagatctgtagggtgtcctccattcgtgtgttacaactttttacatcgggcctaggaaaatcactgcttcatgtttctcagtgaacaaaaatactaatactaataatgtaggtcttgatttttgcttcttttccatgcacaggactgaggatgagtgaagaggataaggctgctgcttctgctgagcagcctaagagggcccctaagctcaatgaaaggatcctctcctctctgtccaggaggtccgtagctgctcatccatggcatgatctcgagatcggtcctggtgctcctgctgtattcaatgttgttgttgagatcacaaagggaagcaaagtcaaatacgagcttgacaagaaaactggactgattaaggttgatcgagtcctttactcatcagttgtataccctcacaattatggtttcattccaaggactctttgtgaagacaatgacccaatggatgtgttggtcctgatgcaggagcctgttgttcctggttcgttcctgagagctagagcaattggccttatgcccatgattgaccagggtgaaaaggatgacaagataatagcagtatgtgctgatgatcctgaataccgtcactacaacgacatcagcgagctgtctcctcaccgcctgcaagagatcaagcgcttctttgaagattacaagaaaaacgagaacaaagaagtcgcagttgatgcattcttgcccgcgacaacagctcaagaagccattcagtactccatggacctgtatgcccagtatattttgcaaagcttgaggcagtagattgcaagcaacaatttatctatcatgcgtcttggatgggggcgtgattttaataagccaaatcgcttgctatattgggaaccttggaattgagaacagcgtcactagctgtgattcgctcctttctcgttaaattatcatatgaataggccaagtccatacgtttaccgtgtggcgctctgtcagtcttcgtctacccaagtagctagctgcatggagggatgtctagcgttgctatgagatggcactcgtgggtctgcgggctggctacatgggtccgttcctgtgttttccgtaaaataaaattataattctatataattgaatcatttaatttatgtgatctttttgtgtattccaatcagttattgagtgtgacgacggtgtttttggctaa

SEQ ID NO: 101547 - DNA, 1318 bp, Zea Mays
ggaatattccccgtttatccgcaacaccgttcaaaatggcccccctgcattaggctgcaaactaaactagggactggaaagagaaaagagaacgagcagacggggtgataagttaaaaaagagaataaggacgggggttttaagtgaaaaaggccagccaacagaggccggtggaaaggagagaatcgagcagagccacccggttgctcctcatttccactttccactctgcctccgctgccgatcgccgtccccgaccgcagcgcaggactgaggatgagtgaagaggataaggctgctgcttctgctgagcagcctaagagggcccctaagctcaatgaaaggatcctctcctctctgtccaggaggtccgtagctgctcatccatggcatgatctcgagatcggtcctggtgctcctgctgtattcaatgttgttgttgagatcacaaagggaagcaaagtcaaatacgagcttgacaagaaaactggactgattaaggttgatcgagtcctttactcatcagttgtataccctcacaattatggtttcattccaaggactctttgtgaagacaatgacccaatggatgtgttggtcctgatgcaggagcctgttgttcctggttcgttcctgagagctagagcaattggccttatgcccatgattgaccagggtgaaaaggatgacaagataatagcagtatgtgctgatgatcctgaataccgtcactacaacgacatcagcgagctgtctcctcaccgcctgcaagagatcaagcgcttctttgaagattacaagaaaaacgagaacaaagaagtcgcagttgatgcattcttgcccgcgacaacagctcaagaagccattcagtactccatggacctgtatgcccagtatattttgcaaagcttgaggcagtagattgcaagcaacaatttatctatcatgcgtcttggatgggggcgtgattttaataagccaaatcgcttgctatattgggaaccttggaattgagaacagcgtcactagctgtgattcgctcctttctcgttaaattatcatatgaataggccaagtccatacgtttaccgtgtggcgctctgtcagtcttcgtctacccaagtagctagctgcatggagggatgtctagcgttgctatgagatggcactcgtgggtctgcgggctggctacatgggtccgttcctgtgttttccgtaaaataaaattataattctatataattgaatcatttaatttatgtgatctttttgtgtattccaatcagttattgagtgtgacgacggtgtttttggctaa

SEQ ID NO: 101548 - DNA, 994 bp, Zea Mays
gtgacttctgaagagagcgaccgccgcacgggaggacggagggaaggaacgaggccgactgaggatgagtgaagaggataaggctgctgcttctgctgagcagcctaagagggcccctaagctcaatgaaaggatcctctcctctctgtccaggaggtccgtagctgctcatccatggcatgatctcgagatcggtcctggtgctcctgctgtattcaatgttgttgttgagatcacaaagggaagcaaagtcaaatacgagcttgacaagaaaactggactgattaaggttgatcgagtcctttactcatcagttgtataccctcacaattatggtttcattccaaggactctttgtgaagacaatgacccaatggatgtgttggtcctgatgcaggagcctgttgttcctggttcgttcctgagagctagagcaattggccttatgcccatgattgaccagggtgaaaaggatgacaagataatagcagtatgtgctgatgatcctgaataccgtcactacaacgacatcagcgagctgtctcctcaccgcctgcaagagatcaagcgcttctttgaagattacaagaaaaacgagaacaaagaagtcgcagttgatgcattcttgcccgcgacaacagctcaagaagccattcagtactccatggacctgtatgcccagtatattttgcaaagcttgaggcagtagattgcaagcaacaatttatctatcatgcgtcttggatgggggcgtgattttaataagccaaatcgcttgctatattgggaaccttggaattgagaacagcgtcactagctgtgattcgctcctttctcgttaaattatcatatgaataggccaagtccatacgtttaccgtgtggcgctctgtcagtcttcgtctacccaagtagctagctgcatggagggatgtctagcgttgctatgagatggcactcgtgggtctgcgggctggctacatgggtccgttcct

SEQ ID NO: 101549 - DNA, 1914 bp, Zea Mays
gcatttggatcttttagtctagacatgcatgctttgaacttgagttccacctcggtattgggcatcgacctagttttgtgccatccattgttgttagtgttagctagcaaacatggccttaatcccatgatgagcaggtgcaggtgcagatagcatcatccccaaaaacataaagctgcagcaacaactagcctagaaataaagcatcctagctcttttcctcctccaccaccacttctcaagtactcccatccaacacgaacgaacatctagagcttggaagaaagctagctagcgagaggaataggatcgcaatggtggaacggccgggcagatcggcaggcgtcagggaggccaataagacttccgctgccgccatggtgaagacgacgacgacgaccaataaggaggagctggagagcccgtcctacaggttagcagcgttcaagagcctcttctcgtgcaggaacagccacgcgcggccgcgggcgccggacaccggcaccggcagcaggagcaagaggctgggctgctccgcgccgtccatctgcaagctcaaggacgacagcgtgcccgtgccgcccaaggaaaccacgggcacggcgtcggcaggcgagccctgcaagcgccgcgcgtccgtgagcgggagcagcgatcggtgcgtgaagaagccccaatgtggcgctggcagcaacaagcagctgcagcgtggcgggtcgtcgtcgtcgtcgggcgggtcgtcgttcagggccggcatgcagctgaggcggctttcggggtgctacgagtgccacatggtggtggcgggcagcgcctccatgagggccaccaccatctgcccctgcccggactgcggcgaggtgttcgtcaggcaggagagcctccagctccaccagtccatcaggcacgcagtgtccgagcttggcactgatgacacgagccgcaacatcatcgagatcatcttccagtccagctggctcaagaagcagagccccgtgtgcaaggtcgaccgcatcctcaaggtgaacaacacgcccagaacgctggcccgcttcgaggagtaccgtgacgctgtcaaggccagggcgggcgccgagcagctggcggtagcggcggccaacagcaacaggcacccgcgctgcaccgccgacggcaacgagctgctccggttccactgcgccaccctggcctgctcgctcggcctcaacggcgccacgcacctctgcgacgccgcggggacctgcgcagcgtgcggcatcatccgcgacggcttcagcagcggcggggtgctgaccatggccacgagcggccgcgcgcacgacgctgcggaggctggcgccggactggatgaggaaaccactccaagggcgatgctggtgtgccgggtcatcgcgggaagggtgaagcggcccaaagaagcggtaccagaggaggaggccgtcgccgacgccgccgaggagtcagagtacgactcggttgcggggtcggccggggtgtactccaacctggaggagctgctggtgttcaaccccagggccatcctcccatgctttgtcgttgtctacaaggcttagctactggtggttacactttacaatccatgcaatgcagtccttgtattaagtaacaaacaattcatgataaacctaatgtattgactgacgaatggtcactcttaactgcttgctatttgtgacatccatgcaacgtgttgagagcagtgacatgacatagcgggttttaacccaagacagacagacagaccagaccatagggtccctcccatcctcctactcccactccaccgttgcaggcggcttagatgtgatgtcctggcaaacgcggttgatgccacgcacattgttgcaaatcttgtttaccacatctaccaggaatgcatgctcaaaatagtac

SEQ ID NO: 101550 - DNA, 1422 bp, Zea Mays
accactgaatattttcatcaataccatcaccattatgatagtgtatagtttgactgaaattcatgttacaggcacgcattacaacacaaaactaccaatggcaggcaagatactaagagtcagatttggagtctgctcataatcatgtcgaactctccgctggcgtgcacctgccgcaccgttctgtcgtagtcgtcgtcatcgtcatggtcgtcttcttcttcctgttgctctgcttcgtcgggcctggacggtggcttgggcaccgtctgcgcctcctgcacgatcctcaagatctcctccacgctctgcgacgagtaggcgggtgctgctgtcgcattattgctgctgctgctgctgctgtctccctggcggctgtagtagtaggctgcctgcgcctcctccttgagctccctcggcaggttcttgaggtaccaggggtgggtcttgatctcgctcatggtgatcctcttgtacgggttctggacgaagatgcgggagaggaggtggcggcagttgtgggagacgtgcacgtactcggggatcttgtactgaaccgacatgatgcgctgtattgtcttcctgaagttctttgggtcctttggatcctcgaacgggtacgcccccaccagcatgacgtagagcgtgactccgcacgaccagacgtcggcgtgcttcccgtcgtactctcgccgcgacagcacctcgggcgcgatgtacgccggcgtgcccaccgttgacttcggtcgcgagtgcagcaccgaggacttggagtagccgaagtcgcagatcttgaggcgcggcgccgggctgccgtccagcagcgtgttctccagcttgaggtcccggtggcagatgttcatggcgtggcagaagctgacgccgcaaaccagctgctggaagaagtagcgcgcctcgtcctcgtggaaccgcccggcgtcgcagatgcgctcgaacagctccccgcccgcagcgtactccatcacgatcgcaaggtgcgtgggagtcagcaccacctccttgaaccggatgatgttggggtggcggagggagcggtggttcacgatctcgcggaacacgttctcgtcgatctatcaattaatccatcaattagatactagctagcaaagaagacgcgacggctagactgactactcaccctgtttcctcgctctatgaacttcatggccaccagctccctcgtgtccttgttcctcatcagcttggccaccccgaagttgcccgccccgatctcgcgaacgggctcgtacttgtccatcggatcccttgccttcctagctagcttatcttgccttatcgtggattggaggtcagctagcagggagggagaagacgacgaagggggatgtgggtggagctgagtcactagtcagtcagtccagacggaggagcaggtgctgc

SEQ ID NO: 101551 - DNA, 3569 bp, Zea Mays
aagcttgtggatgtgaaggataataattctgtatcagcaacgaagcgcctcgcaacaactgatcaaacgtaccaaccctctgtattccaaactcctgctcctactcgcaaaggtctgtcagtagcagtagattctcctacttcatttcattgtggccggacaaacttcaactatgtttctactgaaaacttggacaattctcaaagcacaccaggaacgttgatcaccacaacacttcctggtgtgaatgatcaacaatcaggaaatttggaacgtatgacacttgactcactggttgtacaatacttgaaacatcaacaccgccagtgtcctgctccagttacaactttgccaccactttctcttttgcaccctcatgtttgccctgagcctagtcgcagccttagtgcacctgcaaacatagctgctcgtatgggtagccgtgagataagaaggcagtttagtgggatccagatacctcgtagggatcgtcattttatatacagtaggttcaagcagtgtcgggtttgccgtgatgaggcatcactattgacttgcatgacatttcttggagatgcatctcgagttgtggctggtaaccacacaggtgaattaaggatatttgactgcaacacggcaaatctcctagagacccaaacatgccacctacatcttgttacaacgatggaggcgacatgttctggtggacacgagcttattctcacatccagcctaaatgaggttaagatctgggatgccttctcggtatctgcagggcctttgcacacatttgaggcctgcaaagctgctaggtttaaccactctggaacttcatttgctgccctttctactgatacagctcaacgggaggttcagttgtatgatgtgcagacatatactcttgctacacagcttcctgataacactagcagttcaggttcgggccggggttacatacaacccattatacatttcagtccttcagacacaatgttgctttggaatggagtcctgtgggatacaaggcagccaaattttgtacatcagtttgaccagttcacagattactgtggtggtggcttccatccggcaggaaacgaggtgatcttaaattcggaggtgtgggatctgaggaagttcaagcttttacggagtgtcccttccctggaccagacagtaataaagttcaacggcactggtgatgttatctatgccatcctgaggcgtaatcttgatgacgtgacatcatccatcaatgctcggagggtcaggcatcctcttttccctgcattccgcacgattgatgcggtgacttactcggatattgcaaccgtccaaatcgaccgctgcgtacttgatcttgccactgagcccaatgattctcttattggggtggttgctatggacgatcaccaggagcttttctcttctgcccgcttgttcgaagttggcaggaagcgaataaccgatgacgattcagacccggaggatgcaggtgaaaccgacgatgacgacgacgacgatggcgactctgatgatgatgttctccttgcgccggtgctggaaggggatacagattccgaagagattagtagcagcagcgatgatggtgatgaagatggtggtgacgatgatatccccagttcggatgacattgaagatgacccagagtacattgatggtggtggtgattttgaagggggagggggcttgatggatattttgggtgatgacgaaggggaaggcgatgagagtgatatgatggaatcctttagcagtggcgacgaggagggttggatcatgtagtttttttttgggtagtgcagccctgccgaagatggagcatggccctgtacaagtcaatatttatacgctcacattatgattgtaattattatttcctggttcttttgagcagctcctgccctgctagggaaatgtggaacataatggaagatggtgtaagtaaaggtgggaagagaacaatctaataccaatcgattaaaaatctatctatctattaattaattaatttatttgtggtgtgtgatctgactttggttgtggtgctcactgtcaatgaaggtcgatgctaactgctgatacctgcttccttttcttgttaagatgtcatgagagagaatcctaccactgaatattttcatcaataccatcaccattatgatagtgtatagtttgactgaaattcatgttacaggcacgcattacaacacaaaactaccaatggcaggcaagatactaagagtcagatttggagtctgctcataatcatgtcgaactctccgctggcgtgcacctgccgcaccgttctgtcgtagtcgtcgtcatcgtcatggtcgtcttcttcttcctgttgctctgcttcgtcgggcctggacggtggcttgggcaccgtctgcgcctcctgcacgatcctcaagatctcctccacgctctgcgacgagtaggcgggtgctgctgtcgcattattgctgctgctgctgctgctgtctccctggcggctgtagtagtaggctgcctgcgcctcctccttgagctccctcggcaggttcttgaggtaccaggggtgggtcttgatctcgctcatggtgatcctcttgtacgggttctggacgaagatgcgggagaggaggtggcggcagttgtgggagacgtgcacgtactcggggatcttgtactgaaccgacatgatgcgctgtattgtcttcctgaagttctttgggtcctttggatcctcgaacgggtacgcccccaccagcatgacgtagagcgtgactccgcacgaccagacgtcggcgtgcttcccgtcgtactctcgccgcgacagcacctcgggcgcgatgtacgccggcgtgcccaccgttgacttcggtcgcgagtgcagcaccgaggacttggagtagccgaagtcgcagatcttgaggcgcggcgccgggctgccgtccagcagcgtgttctccagcttgaggtcccggtggcagatgttcatggcgtggcagaagctgacgccgcaaaccagctgctggaagaagtagcgcgcctcgtcctcgtggaaccgcccggcgtcgcagatgcgctcgaacagctccccgcccgcagcgtactccatcacgatcgcaaggtgcgtgggagtcagcaccacctccttgaaccggatgatgttggggtggcggagggagcggtggttcacgatctcgcggaacacgttctcgtcgatctatcaattaatccatcaattagatactagctagcaaagaagacgcgacggctagactgactactcaccctgtttcctcgctctatgaacttcatggccaccagctccctcgtgtccttgttcctcatcagcttggccaccccgaagttgcccgccccgatctcgcgaacgggctcgtacttgtccatcggatcccttgccttcctagctagcttatcttgccttatcgtggattggaggtcagctagcagggagggagaagacgacgaagggggatgtgggtggagctgagtcactagtcagtcagtccagacggaggagcaggtgctgc

SEQ ID NO: 101552 - DNA, 2048 bp, Zea Mays
aagcttgtggatgtgaaggataataattctgtatcagcaacgaagcgcctcgcaacaactgatcaaacgtaccaaccctctgtattccaaactcctgctcctactcgcaaaggtctgtcagtagcagtagattctcctacttcatttcattgtggccggacaaacttcaactatgtttctactgaaaacttggacaattctcaaagcacaccaggaacgttgatcaccacaacacttcctggtgtgaatgatcaacaatcaggaaatttggaacgtatgacacttgactcactggttgtacaatacttgaaacatcaacaccgccagtgtcctgctccagttacaactttgccaccactttctcttttgcaccctcatgtttgccctgagcctagtcgcagccttagtgcacctgcaaacatagctgctcgtatgggtagccgtgagataagaaggcagtttagtgggatccagatacctcgtagggatcgtcattttatatacagtaggttcaagcagtgtcgggtttgccgtgatgaggcatcactattgacttgcatgacatttcttggagatgcatctcgagttgtggctggtaaccacacaggtgaattaaggatatttgactgcaacacggcaaatctcctagagacccaaacatgccacctacatcttgttacaacgatggaggcgacatgttctggtggacacgagcttattctcacatccagcctaaatgaggttaagatctgggatgccttctcggtatctgcagggcctttgcacacatttgaggcctgcaaagctgctaggtttaaccactctggaacttcatttgctgccctttctactgatacagctcaacgggaggttcagttgtatgatgtgcagacatatactcttgctacacagcttcctgataacactagcagttcaggttcgggccggggttacatacaacccattatacatttcagtccttcagacacaatgttgctttggaatggagtcctgtgggatacaaggcagccaaattttgtacatcagtttgaccagttcacagattactgtggtggtggcttccatccggcaggaaacgaggtgatcttaaattcggaggtgtgggatctgaggaagttcaagcttttacggagtgtcccttccctggaccagacagtaataaagttcaacggcactggtgatgttatctatgccatcctgaggcgtaatcttgatgacgtgacatcatccatcaatgctcggagggtcaggcatcctcttttccctgcattccgcacgattgatgcggtgacttactcggatattgcaaccgtccaaatcgaccgctgcgtacttgatcttgccactgagcccaatgattctcttattggggtggttgctatggacgatcaccaggagcttttctcttctgcccgcttgttcgaagttggcaggaagcgaataaccgatgacgattcagacccggaggatgcaggtgaaaccgacgatgacgacgacgacgatggcgactctgatgatgatgttctccttgcgccggtgctggaaggggatacagattccgaagagattagtagcagcagcgatgatggtgatgaagatggtggtgacgatgatatccccagttcggatgacattgaagatgacccagagtacattgatggtggtggtgattttgaagggggagggggcttgatggatattttgggtgatgacgaaggggaaggcgatgagagtgatatgatggaatcctttagcagtggcgacgaggagggttggatcatgtagtttttttttgggtagtgcagccctgccgaagatggagcatggccctgtacaagtcaatatttatacgctcacattatgattgtaattattatttcctggttcttttgagcagctcctgccctgctagggaaatgtggaacataatggaagatggtgtaagtaaaggtgggaagagaacaatctaataccaatcgattaaaaatctatctatctattaattaattaatttatttgtggtgtgt

SEQ ID NO: 101553 - DNA, 3755 bp, Zea Mays
gcatagcctattctggagttctttatgcaccaatttagttttattttgcccgttaattgtatgactaagcgatgttacttcaaacctatcaacaggacaatgacgagttttatgagttggtgttttgtaaattcttgtccgacacctcctactctgttgctgtacaagccgctgctgctaggctgctcttgagctgtcactctgcctggacgcctccgtatcctcatgtctttgaagactctatcatagataatattaaaaagtgggtaatgaaggatcctgaagcatctaatgaatgtgagtggaagtatctaggaaaaaataaacccacagatgctgagatgctgagaacatatgcgattgggttgcttgctatggcattgtgcagtggtgggcaattggtagaggatgtcttgactttgggggtgccagcaaagctcatgcactttctgcgcataagagtccttggtgatgcctcatcttctcaaagagatgctaatcatccacaagacaccaaatatcctcgaggcagagacgataataggggtaaatcacgtctggcccaagatggttctcggttggatggaacaagggttgggtatggaatattgaccaacccaacagcagagaaggacaatgaacctggtgttgtaatgaggcaagcatatggagaaaggtcattggatggcacttttgcctcatcagataattctgacgtccctgaggttgattggaccaatgataactcttatggcacaattgtttgtgacacaaagtcaaaatatggggaaaagacttctgtgacaagggctcttaaagatgaagagatcagcgaaaatggtgaactgttgaagagaaagctgagtcgagccccctctcgacttagagtgaagggaaaagcaggagacaacttgcctgaatgtgaaatgacacctttatcaccaacctctggattgagaatcggaggtcgggcttccagagacaggaatgtggtgagggttgatgacccaaagaaggcaactgatgtgaacaatagttctgcaggcctcgagttgtttagcgctatttccaaagaagaatatgaagatcgtttgagggattgcattattggcttgaaggatatatctgacatcgttttgaaggcagtgagagctgctgaggctgaggccagatctgcaaatgcacctgatgaagctgtgaaagcagcaggtgatgctgctgccgagcttgtgaaatctgctgctttggaggtttggaaagccgaaaataatagtgatgcggttatagtagcggcagagaaagctgcatctgcagttgtagaggctgcagtgtcgactagtgtctcacgaagcacaaatcaagttggtgaagaacgtgcagcggaagaagctgtacaaaccagcgaagaccaggatttggaaaattttgttatcagtgacaaatcacagctcttacaacttagagaaaaatatagcatccagtgtctacagattttgggagagtatgttgaagctttgggtcctgttctccatgaaaaaggtgttgatgtttgcctcacattattgcaaatgagcatgaaagaccaggagggatgtgaccactttgctcaactccctgatgttcttaaattaatttgtgcattggctgcccatcgaaaatttgctgcactctttgttgatcgtggtggtatacagaagatcctctctattcctagaattacccagacatatatgggtctttctgcctgcttattcactttcgggtctcttcagtctaccatggaacgtgtttgtgcgctctcctctgacacacttgacagtgttgttgaattagcacttcaacttcttgagtgcccacaagatttagctagaaaaaatgtgggcatctttttcgctgctgcttttgtgttcaaagctgttcttgatctatttgatgcacgagatgggatgcaaaagcttctcgatatcctatatggttgcgcatctggaagatctggcagtaattctggaggagcaggatcctccaatgtaaatcaagggaatgatcggtcacctgctgaagctttgactgcatcagagaagcaagttgcataccatacttgtgttgctctacggcaatactttagagctcatctccttcagcttgttgactccattcggccaagcaaaagcatccgcagtattgctcggaacacttctagtgcacgagctggctacaaaccttttgacattagcaatgaagctatggatgctgtctttcgtcagatccagcgggacagaaagttaggccttgctcttgtgagagttcgttggcctgtgttagacaaattttttgcctcaaatggtcacgtgactatgctggagttgtgtaagtttcaggcacatggtgatcgctatttgcgtgatttaactcaatatgcaattggagttcttcacatcataacacttatgccacaaccacatgtccgcaaatcaatagtgcagggaacattaagcaacaatcgtgctggtatggctgtcttattagacacggtgaaaagttttgactacattgatcatgaggtgatctgtccagcactgaatgtcctcgtcaatcttgtatgcccgcctccttctatcagcaacaaaccattgtcaactgccaatcagcaacctgcagccgcgcaagcacttgcttcagaaagcagagataggaacttcgaaaaaagtatttcagataggaatctactagcaaatcagggtgaatatcgtgaaagatctggtgatggcaaccctgctgaaaggaacaataccttgcatcaaggaactcctaacacacctgttgtgacatctggagtagtcggtgatcgaagaataacattaggtgttggaggtggtggtcctggtcttgctgctcaattggagcaaggataccgtcaagctcgagaagttgtaagagccaataatggcataaaaattcttttacagcttctcggttctcggatggttacacatcctgtggctatagattctattcgagcgcttgcctgccgtgtcctgcttggcctggctagagatgatacaattgcacatatactgaccaagctccaggtggggaagaaattatcagaactgatccgtgataccagtgcccagacatctgcgggcgatagtggaagatggcaagctgagctgacccaagtggcaattgaactaattgcggtattgacaaattctggaaaagaaacaacattagcagcaactgatgctgctgctccagcattgaggcgcatcgagcgagctgggatagctgctgctactcctatctcctaccactcaagggaactgatgcagttgatacatgaacatcttcttgggtctggtttcactgccactgctgccatgctgcagaaggaggctggccttgcacctttaccattgatagcagcggtgcttcctgcccaccaagttgctgccctggaagcatcatctgttcagcaacagtggccctctggacgtgttcagggatttctctcagataaaataaatatgtcgacagatcaatctgcccatagatcagattctatcccgccttcatctaagaaaaaagcactgaccttctcatccagtttctcacgaagagctcagactccacattctgtttctggcagcagaacaagcaacatccttaaaagtcctgtacctattgcggctgatactagagatgcagaaatgttgaataagacaccactgtcgctgccacttaagaggaagctt

SEQ ID NO: 101554 - DNA, 3948 bp, Zea Mays
atggcggagtcggagaagggcgccgccgcaaccaccaccgccgccgccgagcctgggtccggcccgccgcacgaggacgaggatgcgctgctcgcccgtgcccacactgtcatctccaggatcctcgaccgcgagctcgaccccaaccctcgcctcctccacaccctcgccaccatgtgcgagctccacgaagccagatatcttgagttacgtgcagctgacccaacgttcaataacacgaacacaaggagcacatttacaattgggaagctggccaatttgctccgggacaatgacgagttttatgagttggtgttttgtaaattcttgtccgacacctcctactctgttgctgtacaagccgctgctgctaggctgctcttgagctgtcactctgcctggacgcctccgtatcctcatgtctttgaagactctatcatagataatattaaaaagtgggtaatgaaggatcctgaagcatctaatgaatgtgagtggaagtatctaggaaaaaataaacccacagatgctgagatgctgagaacatatgcgattgggttgcttgctatggcattgtgcagtggtgggcaattggtagaggatgtcttgactttgggggtgccagcaaagctcatgcactttctgcgcataagagtccttggtgatgcctcatcttctcaaagagatgctaatcatccacaagacaccaaatatcctcgaggcagagacgataataggggtaaatcacgtctggcccaagatggttctcggttggatggaacaagggttgggtatggaatattgaccaacccaacagcagagaaggacaatgaacctggtgttgtaatgaggcaagcatatggagaaaggtcattggatggcacttttgcctcatcagataattctgacgtccctgaggttgattggaccaatgataactcttatggcacaattgtttgtgacacaaagtcaaaatatggggaaaagacttctgtgacaagggctcttaaagatgaagagatcagcgaaaatggtgaactgttgaagagaaagctgagtcgagccccctctcgacttagagtgaagggaaaagcaggagacaacttgcctgaatgtgaaatgacacctttatcaccaacctctggattgagaatcggaggtcgggcttccagagacaggaatgtggtgagggttgatgacccaaagaaggcaactgatgtgaacaatagttctgcaggcctcgagttgtttagcgctatttccaaagaagaatatgaagatcgtttgagggattgcattattggcttgaaggatatatctgacatcgttttgaaggcagtgagagctgctgaggctgaggccagatctgcaaatgcacctgatgaagctgtgaaagcagcaggtgatgctgctgccgagcttgtgaaatctgctgctttggaggtttggaaagccgaaaataatagtgatgcggttatagtagcggcagagaaagctgcatctgcagttgtagaggctgcagtgtcgactagtgtctcacgaagcacaaatcaagttggtgaagaacgtgcagcggaagaagctgtacaaaccagcgaagaccaggatttggaaaattttgttatcagtgacaaatcacagctcttacaacttagagaaaaatatagcatccagtgtctacagattttgggagagtatgttgaagctttgggtcctgttctccatgaaaaaggtgttgatgtttgcctcacattattgcaaatgagcatgaaagaccaggagggatgtgaccactttgctcaactccctgatgttcttaaattaatttgtgcattggctgcccatcgaaaatttgctgcactctttgttgatcgtggtggtatacagaagatcctctctattcctagaattacccagacatatatgggtctttctgcctgcttattcactttcgggtctcttcagtctaccatggaacgtgtttgtgcgctctcctctgacacacttgacagtgttgttgaattagcacttcaacttcttgagtgcccacaagatttagctagaaaaaatgtgggcatctttttcgctgctgcttttgtgttcaaagctgttcttgatctatttgatgcacgagatgggatgcaaaagcttctcgatatcctatatggttgcgcatctggaagatctggcagtaattctggaggagcaggatcctccaatgtaaatcaagggaatgatcggtcacctgctgaagctttgactgcatcagagaagcaagttgcataccatacttgtgttgctctacggcaatactttagagctcatctccttcagcttgttgactccattcggccaagcaaaagcatccgcagtattgctcggaacacttctagtgcacgagctggctacaaaccttttgacattagcaatgaagctatggatgctgtctttcgtcagatccagcgggacagaaagttaggccttgctcttgtgagagttcgttggcctgtgttagacaaattttttgcctcaaatggtcacgtgactatgctggagttgtgtaagtttcaggcacatggtgatcgctatttgcgtgatttaactcaatatgcaattggagttcttcacatcataacacttatgccacaaccacatgtccgcaaatcaatagtgcagggaacattaagcaacaatcgtgctggtatggctgtcttattagacacggtgaaaagttttgactacattgatcatgaggtgatctgtccagcactgaatgtcctcgtcaatcttgtatgcccgcctccttctatcagcaacaaaccattgtcaactgccaatcagcaacctgcagccgcgcaagcacttgcttcagaaagcagagataggaacttcgaaaaaagtatttcagataggaatctactagcaaatcagggtgaatatcgtgaaagatctggtgatggcaaccctgctgaaaggaacaataccttgcatcaaggaactcctaacacacctgttgtgacatctggagtagtcggtgatcgaagaataacattaggtgttggaggtggtggtcctggtcttgctgctcaattggagcaaggataccgtcaagctcgagaagttgtaagagccaataatggcataaaaattcttttacagcttctcggttctcggatggttacacatcctgtggctatagattctattcgagcgcttgcctgccgtgtcctgcttggcctggctagagatgatacaattgcacatatactgaccaagctccaggtggggaagaaattatcagaactgatccgtgataccagtgcccagacatctgcgggcgatagtggaagatggcaagctgagctgacccaagtggcaattgaactaattgcggtattgacaaattctggaaaagaaacaacattagcagcaactgatgctgctgctccagcattgaggcgcatcgagcgagctgggatagctgctgctactcctatctcctaccactcaagggaactgatgcagttgatacatgaacatcttcttgggtctggtttcactgccactgctgccatgctgcagaaggaggctggccttgcacctttaccattgatagcagcggtgcttcctgcccaccaagttgctgccctggaagcatcatctgttcagcaacagtggccctctggacgtgttcagggatttctctcagataaaataaatatgtcgacagatcaatctgcccatagatcagattctatcccgccttcatctaagaaaaaagcactgaccttctcatccagtttctcacgaagagctcagactccacattctgtttctggcagcagaacaagcaacatccttaaaagtcctgtacctattgcggctgatactagagatgcagaaatgttgaataagacaccactgtcgctgccacttaagaggaagctt

SEQ ID NO: 101555 - DNA, 717 bp, Zea Mays
gacgatggagaagacgacggagaagcacaccattcgtttcatagagcagaatatgaatatagtagtagcagcagcaacagtaattaagagcagtagcacaaacaaaaaaaatcaaaaagacagacaggtgatgattactaaccaggacgtagagggtgcaggcgatgatgacggatcggtagcggcccaggtaggcgtcggcgaggaaggcgccgagcaggggcatgatgcaggccgtgccggaccaggcgttgacggaggcggcggcggaggcgttggactgtcgtagcggaccagtcaggtacgtgattaggttggcagagatgccgaagtaggcgaagctaccggcgatctcgacgcctgattaatttggaggcggggcgggggattattatggccgattggatatccagtttcaaacaaacaagagcaagcaaatactgtacccacgacgaagagcgcggatctccatcccccggagcttccgcggtgcacggaccgcccaaggtagtcggagacgccggcgagaggatcctgctgctgcttgctggactgcgagaggggaaggaggggatcgccgaggatggtgtcgccgccgccgttggggtccatagccacggcctcggcgcgccgcctaaacgaccttcccttccctttcgttcgtggatggtatttgggaggtttggttgttatccccgtggtggtcgtcgtctacct

SEQ ID NO: 101556 - DNA, 115 bp, Zea Mays
tcattttcttatagtagtctcagttaaatgtttttctttctctcttcatctcggtggtacactatttttttctttcttctattgtgcctccaccgctacctagggtctcacaagc

SEQ ID NO: 101557 - DNA, 580 bp, Zea Mays
aatatcgatttggattagaagttagcacgtgcgatataagcgctaaaactccaatggcgacctaggggtttatggagtcaaacaagaagcttcgaagtctctagtatcatcgaaaaaaatcctaggttttgctgacggcgtggctatcggaagaagctagcgagcgattgagatgaagctggcactaggaggaaaggacggatcacctctccgcgggccaggatgaagagtaggtaattgttgaagtcggggaactggctgtactgctggagctgctgccagatgcgggcctggtcagagttgggtgagatatgcgcctccaggtgggcgcagatctcgcggagcccctgctcctgcggctgccacaacgccgacgccgccatcgacgattcccgggggcggagcaagggcgggcgatggggatgagataaagataagatgagcagcggcggcggctgggggaggagaggaggtggaggaggaaggaatcggcggagctcaggaagtccgaatccaaactagtgaaaagcgcaagactaatgatgtgcttctatggctattgatatgatttttgcttctt

SEQ ID NO: 101558 - DNA, 2920 bp, Zea Mays
tctcattatatgatcatgaacaaacattaataatattgaattacatttgtatcttcggcttgacagaatgtaagaatccaagagcgacgtgcgagtgattacaaatcagcgtgaacaatattgtgttactgttcatctatttataggcacaggacgcagcctgggtaaaattacattcatgtccttgacatttactattgactaaggagtaatctgtcgaggactaagcagtcttttcccctttaggtcggtttcattctccatcaccgtctttgcgctaagccgaagcttcttcatccatagcttcggaactgattcatcaatcttccagaccgtgcctttcataccgtgcgcatcttcatctcaaagtcgaaggttcctgtaacagtatattatacttgaaaaacatgttagtcgtgtttttgaggacctttggaagacgaaggcccccaacaattacctttccctacttttttgcattttgtgttccaccatgtgttcctcgaatccttacatgttaatatgtttaatgcaggccaactgaaatccatgaaaagcttggtgttgctgtgaaagaaggtgataccgattgtgatgcttaattgattgagaagatgtaaagaaataaaaatcaacatgcttattgtaaaaaaatcagtaagattttgttgatgtaatcctttagtaacatgttatctttattagcaagtgaagtatggtattggatagactgcaaagtgaatggtgagttgtcctagaatagtgaattgcccatagcatagtatctgaatttgctcctggttgtattctatataatgccatgtaatatatttgagcactagatatctgccttcaatttgctcctgacgttcccttgcattattatatattccttattaataattaggatctggtgcatgcacgttcccttgcctgattattgtggttccttttttattttatgtttccttttctagggcatccatgattattatattccttaattaggatgtgttgcatgcatgattgacgattccttaattaggatcgggtgcatgcacattccctttgcctcattattgtgtttctttttttattctctgtttcctttttagggcatgcatgattatattccttaattaggatatgttgcatgtatgattgatgtttccttgtctgacttattgtgtttctctatttatactgtgtttcccatctgtagggtcgttggagtctcatcaatttttctgtagcataccacgggcacgtacgtagtttcaaattaacccgctgcacgtcagttccctccgcgcaaccaacctccacgtcctaaaacacacctccgcatatagatggccaaacgatatcaaggcacgggtccgacgtccgtaggccacaactctggcctaggcacggccggcctgctgattgttttttcaaattcttgggtggttatcaagtagccctactgatatagaaagtcatattagaatattaaagcatcactttcaatggtcgtcccatatcatctttttataaataacccctcgcatatatttcaaattaactcgatgcacacttgttccctccgcacaaccaacctccacgtcccaaagcacacctccgcatatagatggccaaacgataaccaggcacgggcccgacgcccgcgtgccacaactctagcccaggcacggcatgccggcctgctaactgtgacgggctggcccgttagcccgttgggctatttggttaaatcagcgtaaaatgtttaaaaaagcggtgcatgaggtggggttcgaacccacgccctgatagaagaagagcgagagacactgggtgaagttgtctaaccagtagaacatcatgatcaagtacctttaatattgaatataaattgtagatatgtatatacatttttagtaaaataaaaatatataattgtgtcgggccggaccagcactacgggccgaggctacagcccaagcacagcgctcgtgccgggctggcccaggtacggcccgtcaaacacaacccatttggccatctatacctccgcacgataatgatggttctcgcctcagttgccgccacctcgttcgtcatcctgcttcttttctctctcccctcatgcctccgcttccgcaccactccattctcggcagagggtgtggaagcagacgcctcctccccgtatttgtccgacaccagccccgacaccgacccgcgcagtggctattgcacgtccacgaggacgtttcacagcatgcgcgcaccatcatcggacgtcccgttcgtcttctcggccttcgccatcgtcggatgtctcattcgtcttctcggccttcgccttgttcttcctccccaacctaccgccatcgcccacggtcacagtcgcgagccaaccgacttattttagaaactagagcttacaaacttcttttgtctctgtatggtaaaattatgtcattatataatctccatacattcagtcaatcgttgtgaactctattataatcgatccttttattggctgtgttgtaccaagacatattggatgaagtaaacaatattaattagtcaaataaaaaaatattatgcggagagtagagacaatcaataaaaaaatcttaggatctttttggtggatagtttacgtggatattattgtgagccgtggtaatgcacggacaaccaactggtataccttggtcgtgtggtttcatcaatatttttcaaaaaaacaccttaagagtgtagattaaatatggactagttatatggccgtgcattgctacggtttttatatataacatagaataaattttattttaataaaacataaaatatatgttattgattatgtgggtgtgaatgtagagccaacaaggttcaaacactaacttatacatgatttcac

SEQ ID NO: 101559 - DNA, 450 bp, Zea Mays
tgatcaagtacctttaatattgaatataaattgtagatatgtatatacatttttagtaaaataaaaatatataattgtgtcgggccggaccagcactacgggccgaggctacagcccaagcacagcgctcgtgccgggctggcccaggtacggcccgtcaaacacaacccatttggccatctatacctccgcacgataatgatggttctcgcctcagttgccgccacctcgttcgtcatcctgcttcttttctctctcccctcatgcctccgcttccgcaccactccattctcggcagagggtgtggaagcagacgcctcctccccgtatttgtccgacaccagccccgacaccgacccgcgcagtggctattgcacgtccacgaggacgtttcacagcatgcgcgcaccatcatcggacgtcccgttcgtcttctcggccttcgccatc

SEQ ID NO: 101560 - DNA, 4784 bp, Zea Mays
atggccgccgggagaggccacgcggaggacatgctgggcttcaaggaggacgacgccatgcgcttcatcttcggcgaagacatcatgggaatggaggaccacggcgccttcgacagatccctcatggagcttcaggttttcaaggaggtcttctgcggggccgcccataacgtcgccgccaccacccatctgcccaccgagatggaccttggattcgtccacaccagcgccgccgctgcccacctcaaggccacggagacctcgccctctccatttgtctcccatgcgcagcagcagcagcctgctgccgctgccactgctgatccacagctcacaatggatcgtagccagccaaactatggacctcgccacgaccttcacccccaggttcaggagcacgcgcacactcgtgcgcagcaaaacgggaccgagctggatgatgctgcgttcatgcacagattcatgggttcctggcagcctggggataagcacgcgatccatctgctcggcctatccgatgaccaacacccattcgtcggcgcagatttggatgtgcacgcgcaagatattggagctgggatgtgcaatgctcccgggctgggctgcagcagcagcactagcgcggttgatgaccccatgccttccttcatagaagcgctagcggagatttctgaattccagagtgccactctccttccagatccctttttgcatcagtggttccaggagcagcagcaattccctaccaatgcatgcttctcttacgatcaaggccagatggatgacaccacttatcccctatgtgcaagtacaaaggatttccctgacagagagcagcatctgtgttacagtgaagaagctcatagtactccaacaatacctcatcagtcccatatttggttcagccctggtcagttcacccagctcgatggcaccaccatttgccaggaaggcacgcctgatgcgaatattagttgcccggatgaaattgatgttcatggatgcggcagcagcgcggtacactttggctcggcagctgctgtttccaagaaggccttgggcagggatattcctgaccagctggaagcacatgcgcatcgccttttcaaggacgctggatggactattaagccacggaaaaggaatgacagggctaagatggcgtcctacttcacagctccaaacaaggaagcggttcatacctcactaacccaggcttggaagttttgtggcaaaaagttatatgaagcttccccagatacagaaaggggaaggtatccaaaggagtggtcagatgttgattcgttttggaaggatctcacagatgcaatgacctatgttgataggatgcttgcaaaccagcaaaatgcactcacgcttctccaacgttggcagattttggatccttttgtagctgttgtgttcatcagtaggaaaatcactgctctgcagcaatataaaactcttagagctgtcgacagttcaacctttgttcttgatggcagctcagacacatcatcggtaagtaagatcatgcacaaagccagtgagcttttgacaagccgaatgatccggttgactccactgatcacagactctgattgcagcacacttgcaactgagagctacaacgggcatcaatctttacagagctgtcatgatgtagaagacaacaactatagggatacggacccaaagctttcctgcaatgagagtctgaattacaatgcaagtgacgagacaaaacatcacatcgatgcaagtaatgatggaagacaaacttatgctcaaccaaaaactcttaatagctctgtaaaaatgtcaagcaagaaaccgaaaagaatatttgatattagtgcagatggactggacgagaccaatgtagcaactatggacatggctgacccaggagacactaatgcctttgaggaacacattatgtattcaggtgttagcacactaaaagacgatatgaaagctgaaacaaaatcagaaaagctagataaagatgatcaaagcagcaagtgtgacatgctcctctcttcagtggtcaagcaacttaaggattacagtacattctcagatacccattgtactacaagggagtcacagtcagatgccacaacattctgccatgatgacaaggtctggaaaaagatagtcccatcccatggagaattttatgaggattcacagagtgagccaacaggaaatactgcacctgttgaattatcccatgatgttctgggaacttatctaatctgtgactcacaaatctgcgagagaggcactgccaaaatgaaaacgaaggattggttgaagtacatgaagaaaagacctcgcgagttgcggatcaatgatgaggaccttttgatgacagctatagtgaaaaacaaggaccttggcacctgtcacaaatttgcttcaggttcttcagccgcaaagaagtttaagaagctgaagagccacaagaaaggtaacaagctactttctaaaattgggaaagctggcacaaacctattgggtggaaagagagtaagtttggcccgtaaaactgtaatctgctggttgcttgcgactggctttctgagcgtaaaagatgtgatacagtaccgggatccaaaaagtaataaaattataaaggatgggatggttacctgggaaggtattgtttgcaattgctgcaaaaaaaacttatccgtatctgatttcatggctcatgctggtcgtagtcacccacagtcctcattgggcctctttctagagtctggcaagtcatacactttgtgcctggttgaggcttggtctgctgaatctatgagcaggagaagcaatgcatggggtagaaaagttgaggcaatagatgaaagtgatgacacctgtggtttctgtggagatggtggtgaattactttgctgtgacaattgcccatcgacatatcatcaagcttgcttgtctgctaaggagcttccagaaggtagttggtactgccataattgcacttgtcaggtttgtggggggccatttagtgaaaaggaggtttcaacattctcggcgattttcaaatgtttccaatgcggagatgcataccatgacacttgcattgaacaagagaagctacctcttgaggatcaaatatctcagacatggttttgtgggaaatactgtaaagagatattcatagggctgcgtagtcatgtcgggacagataatattcttgacagtgacctttcatggtccatactgagatgcaacaatgacgggcagaagctacattctgttcagaagattgcctgtttggcagaatgtaatatgaaattagcagtggctcttactctattggaggaatgtttcattcgtatggtggatcctagaactggtgtggacatgataccccatgttttatacaacaagggatcaaactttgctcgtgtggattatcagggattctatactgtaatcctggagaaaggtgatgaaatattatgtgtggcttctatcagagtacatggaactaaagccgctgagcttccttttattgctacttctgtagactttcgacggcaaggaatgtgccgaattctaatgagcatcattgaaaagatgctctgttcatttaatgttaagatgttggtcctttctgccatcccagagttggttagcacatgggtgtcaggatttggcttcaaacctatcgaagatgctgaaaggaaacaacttcataatgtaaacttgatgttgtttcctggaacatccttactaacaaagagattggatggatttattatggccacaaaaccaggcgaggaaaaggatatacatgaagtttctggagtgcctaatcttaagcgtatgcctaatgggaaagcaaatgagcatttcaaactccatgaccttgatttgtccgggacagagtttaaagctgaggtttccgtgaatggtccattcagaacactgaaacatgaatgtggttcagcagcatggtttcagtctactaagttagctgttggggaagtgtgatattcttacacaaattatctgggctcatgctctgcatcgatactagctgctttgtgttggccaatttcgtcttcccacttcatggctcaaattaatttgcagcagcaaaatcattcgaacacttgctgctgcatgaactcatccttttcaagtaaagttctcacaagactactgggaaatggttgggatgacgcaggcatccatgaatttgggttgagcaaagttgaagaaaccacagattggtgtggtctgttctgcatcgagaaaatggaaattataactgtctctcctgggtgaagtgctctcctgagactgggtaaagtacgcaacacctgagttgatattgcttgcacgttgaacaaagaggatgtatttgcactccaacgtacaaagtgtaacgcattcggccccttttcaaagtaagccatgataggaattaatctaagctgtttggtatatacatcaaaagggtactgcagtaacatgtttggtaccttctcttgcgagttttattttgatatatgtgttttatatgtgtctagattaatcatcatctatttaaatatagacataaaaagaattatattctggaacggagtgagtattattttgccatatgtgctgttaggttgaggcccaaatggcaatgcaatgcatctgtcggcagttgattttcctgagtgccagattggttttgtaatccttgcggctatggaacgattgttcgtcaagtccttaagttattttggtttgtgattaaataa

SEQ ID NO: 101561 - DNA, 1517 bp, Zea Mays
gtaaaattgtatttcctctggctggcgagcggaggacgacggagcagaagcagctggcctcagccgctggacagtgggcctcgactagcagcagataggaaaccgggatagagctgccttccccttccggctccgctcagtcaggcctcagatcggtcgaatccagcaccccctccagatttgcgtcaccaatcttcttcttcttccgccgccgccgccgctcccccacaaggaggttagctgctatccccaaatcgattcatcaatcatccgtgtccttccatttcattccagtcggtcgccgcagcacggaccgagaacagagcatcacgtcacatcaaactaacctaaccagcctcgtccctcgctgcgtatctgctgcactttcatcaacaccagtctttctcctcctggattgcattgcccaggcaagagaacgcacgcacaccgaccggaatagccatgatcttctgatccaatccaagatgggcctcaaggagcagcagctagacgccactgaccaaactcgtgatgccgccaactccctcgcttctgtttctgacgagcaccacgagggaccccgtgtctcaagctgcagcaccgacaaggattctggccttccaagttgccgagtctgccattgcgtggaacccgatctaagaggcgagtccgccctcggattcttgggcatcgtgcccccttcccctcccaggactgacactggggggccaaaggatgatgctgccaccagccccaagggggagatattcgtgtgcgctactgacgtcgaattgcagcagcagcaggaccatcttgtggatctagggtgttgttgcaagaacgagcttgcccttgcgcactatgcctgtgcgttgaagtggttcatcagccatggatccaccgcctgcgagatctgtggaactgttgctgcaaatgtaaggcctgacgatttcaacaaggttctcgcgtccctcaaggattaccaagctctcagggaaagtacatccacatactggtggttgcagcagcatagtggtgttgatccagacgctgttgcagcaatacgaaggcacgagatctcatcctggttcaatcctcacgtgcctatctcccaaggccacattgatcaaccgcatccctcaaccaataattcttctgttcttgagcagcatactagtgttgtggcaaacacaagatggagtttggagagtactggagtttttattgctatctgcctggttgtcattattcttgcatggttggtcgctccacatgttggcaagaaagctgctgtaatctgtcttcatatgcttcttggaggtctatgcatattgactgtagtaatatccctgagatttgttttcccgagaatccagtatgggtctatgcaatattgggcaatcttgtttgtgtcctggttccttgtgtttggtgtttgggcttcacgaacacgcggcgcgcgttcctcatgagtatattcttgtgtacttgctatgtaaaataatgcttgtcttttc

SEQ ID NO: 101562 - DNA, 1464 bp, Zea Mays
gtaaaattgtatttcctctggctggcgagcggaggacgacggagcagaagcagctggcctcagccgctggacagtgggcctcgactagcagcagataggaaaccgggatagagctgccttccccttccggctccgctcagtcaggcctcagatcggtcgaatccagcaccccctccagatttgcgtcaccaatcttcttcttcttccgccgccgccgccgctcccccacaaggaggttagctgctatccccaaatcgattcatcaatcatccgtgtccttccatttcattccagtcggtcgccgcagcacggaccgagaacagagcatcacgtcacatcaaactaacctaaccagcctcgtccctcgctgcgtatctgctgcactttcatcaacaccagtctttctcctcctggattgcattgcccaggcaagagaacgcacgcacaccgaccggaatagccatgatcttctgatccaatccaagatgggcctcaaggagcagcagctagacgccactgaccaaactcgtgatgccgccaactccctcgcttctgtttctgacgagcaccacgagggaccccgtgtctcaagctgcagcaccgacaaggattctggccttccaagttgccgagtctgccattgcgtggaacccgatctaagaggcgagtccgccctcggattcttgggcatcgtgcccccttcccctcccaggactgacactggggggccaaaggatgatgctgccaccagccccaagggggagatattcgtgtgcgctactgacgtcgaattgcagcagcagcaggaccatcttgtggatctagggtgttgttgcaagaacgagcttgcccttgcgcactatgcctgtgcgttgaagtggttcatcagccatggatccaccgcctgcgagatctgtggaactgttgctgcaaatgtaaggcctgacgatttcaacaaggttctcgcgtccctcaaggattaccaagctctcagggaaagtacatccacatactggtggttgcagcagcatagtggtgttgatccagacgctgttgcagcaatacgaaggcacgagatctcatcctggttcaatcctcacgtgcctatctcccaaggccacattgatcaaccgcatccctcaaccaataattcttctgttcttgagcagcatactagtgttgtggcaaacacaagatggagtttggagagtactggagtttttattgctatctgcctggttgtcattattcttgcatggttggtcgctccacatgttggcaagaaagctgctgtaatctgtcttcatatgcttcttggaggtctatgcatattgactgtagtaatatccctgagatttgtaagtaggcggtgacatatttcatttttccttttagccagatttttcacctctgactgagtttaaatgtcaaaaaaataaataaatatgcaggttttcccgagaa

SEQ ID NO: 101563 - DNA, 1548 bp, Zea Mays
gtaaaattgtatttcctctggctggcgagcggaggacgacggagcagaagcagctggcctcagccgctggacagtgggcctcgactagcagcagataggaaaccgggatagagctgccttccccttccggctccgctcagtcaggcctcagatcggtcgaatccagcaccccctccagatttgcgtcaccaatcttcttcttcttccgccgccgccgccgctcccccacaaggaggttagctgctatccccaaatcgattcatcaatcatccgtgtccttccatttcattccagtcggtcgccgcagcacggaccgagaacagagcatcacgtcacatcaaactaacctaaccagcctcgtccctcgctgcgtatctgctgcactttcatcaacaccagtctttctcctcctggattgcattgcccaggcaagagaacgcacgcacaccgaccggaatagccatgatcttctgatccaatccaagatgggcctcaaggagcagcagctagacgccactgaccaaactcgtgatgccgccaactccctcgcttctgtttctgacgagcaccacgagggaccccgtgtctcaagctgcagcaccgacaaggattctggccttccaagttgccgagtctgccattgcgtggaacccgatctaagaggcgagtccgccctcggattcttgggcatcgtgcccccttcccctcccaggactgacactggggggccaaaggatgatgctgccaccagccccaagggggagatattcgtgtgcgctactgacgtcgaattgcagcagcagcaggaccatcttgtggatctagggtgttgttgcaagaacgagcttgcccttgcgcactatgcctgtgcgttgaagtggttcatcagccatggatccaccgcctgcgagatctgtggaactgttgctgcaaatgtaaggcctgacgatttcaacaaggttctcgcgtccctcaaggattaccaagctctcagggaaagtacatccacatactggtggttgcagcagcatagtggtgttgatccagacgctgttgcagcaatacgaaggcacgagatctcatcctggttcaatcctcacgtgcctatctcccaaggccacattgatcaaccgcatccctcaaccaataattcttctgttcttgagcagcatactagtgttgtggcaaacacaagatggagtttggagagtactggagtttttattgctatctgcctggttgtcattattcttgcatggttggtcgctccacatgttggcaaggtatgctgcaacttctgctaaagagtagttagtactacgtacttgtcctttacaaatcataaagcggagaagcattttctgtgcagaaagctgctgtaatctgtcttcatatgcttcttggaggtctatgcatattgactgtagtaatatccctgagatttgtaagtaggcggtgacatatttcatttttccttttagccagatttttcacctctgactgagtttaaatgtcaaaaaaataaataaatatgcaggttttcccgag

SEQ ID NO: 101564 - DNA, 1818 bp, Zea Mays
aacccctactgccttgccagcgcgaagaaccttcgcctcgatatcaatctcttcctgtaaaaaaacatctcatgtctgtcagtgtcaatcataccaattgggtaatcttgttgcagtcaatcataccaattggataatttgcttactcacatcagcaaaagcagcatcaaggtaggagatgttcatctcaaggggtgagcccctggtgcgtagcccggcagtggcgaaggcggcggaggcaaccagatccacgagggaggcggttgcgccgccgtgcaggaagccgcccgagttctgcctcattcagggatcagggaggattcagaactcgactcgggggcagagagagagagagagagagagagagagagttggctcacgagtagtctggagggcacgttgaagtggcagaggagtgtgccgggctggagggcctggacgacgcggattcccctcaggacgaaggcgtcgtagaaccccgagggcaagctcggtagcgcctccgcctctgcctcactcgtgaaggtctcctccagcagccgcctcgccgtttccaacgacttgttctccccaccgaaatcgcccgagtcggaggccatcgcaattggattcccctcccgctcccgttccctttccctccccaccagaatcgttaatcgaggaggacgaccaaagcgagaaagaaagagacaggcggagaggcgcccgccacgtctttacgctttcaaaggcaactcacgtaatccctacgtgaacagcgtcttccttcctgccggcgccgatggcgagcatggcagccgtcttcggcgaggccaagccggacaaatccaacaaagatgccgatgctctcctgcgccgacccgtgctcttccacgcccactcccagggcggcctccgcgtcgtcgccaccgacctccactccttcgcttggcatcgctccctcgacctcgacggcctccgcgacctccaagatgacgttggcatcgctggctcctgctccgacttcctcgactacctctattcttccttgtcttccgaccaagtcaggctcttcttccctgccgcggccctaggtcctgatactgctgagcttgtggctaccaaggcaaagggactacctcgcatcactctctctctcgatagagttgccgcatctgcgctcaaagatgtcattgctgatttctcccttgcgctctatgaatcttacaagaccaggcaggaacatgcatccagagaacaagaacgagtgtcacagctcatggaaaatctagactctgaaagagaaaaaaacgaagtaatgcaaaagcaacttgaagccctttcattcctcgacaaaagaaaggctacaaagccaaagcttgtgactgataagtttccaagtgtgtcgggtgcacctccaagctctgatcaaatgattgttgctgtacagcagcaaacaccagtggctttacctagcaaagttcctcctgctaaaggtacgaagcgcgtggcccctttgcctcggagggcaagagtacgaggagctttgttgcaagatactgaagaaaatgctgatgataatacttagatattgctgatttatcagcattgattaactctttggcatgtaaacttattagtacatttctgctggacttatgtcaaacttgtggaattaaagtacacgcagctcatggtgtagaaaaggtatgagactgtgttcctacaagaaaggattgtttccctagaatattgtggcttttgaactcgtctgtgatgctgctttgatctcgatgagcttagggtgcctatcaatacacatctatagctgtttcagtg

SEQ ID NO: 101565 - DNA, 1044 bp, Zea Mays
aagagcacacggaagaagagtagtgagcacggaaccccaccaggcagaggcagtaagccaccagctgcagccgccagcacagcgcagggcagagggagagggagggcaccggcacaccatggccgtggggggccttctgcggggcctcgtttcgccccccgcctggctaccctgccatgagctcttcgcctcctggcaccactggcttccctccctcccgcgcctccgcccgcccgcatccgacggcttcaagcttctcttggtgctgctgctcttctccgccgctctagccgaggtccgctacatcgcctcctcctccatggcgcccacgcttcgtccaggcgaccgagccgtcgccgagaaggttacatacttgttccggaggccatctattggggatatagtgtttttcaaagtaccgactgctgtgcagaattatggtgtcaataaggatgttgtctttattaagagagtattggcaacaccaggagacttcattgaggtaaaataaaatgcatcactagctccattgaggtaaaaacgcatcctcctcctcttatgttgtttacaggtccgacaagggcagcttattgtaaatggtgtcgcactaaaggagcattacgcagcagcaacgtcattgtacacaatggaagcaatgcgccttcctgaaggtcacgtatttgtcatgggtgacaaccgcaataacagctgtgattctcgtgcctgggggcctcttcccgttgccaacatcgttggaaggtacatgacatcatttacaagatcctctttccagtaactggggttccactcaatgttcgtcctcataaatcaatcatagttagagagttgtggagccaggcggctgctatcttgtcaatttgtagcgatgtttgttgtatatgattctcacttaatttggacatgcatgattgtgtacttgtgttgttataaagtaagcatgttttgttgttgtatatgatcgcacttaatttggacatgcatgattgtgtacttgtgttgttataaagtaagcatgttttgttc

SEQ ID NO: 101566 - DNA, 1324 bp, Zea Mays
aagagcacacggaagaagagtagtgagcacggaaccccaccaggcagaggcagtaagccaccagctgcagccgccagcacagcgcagggcagagggagagggagggcaccggcacaccatggccgtggggggccttctgcggggcctcgtttcgccccccgcctggctaccctgccatgagctcttcgcctcctggcaccactggcttccctccctcccgcgcctccgcccgcccgcatccgacggcttcaagcttctcttggtgctgctgctcttctccgccgctctagccgaggtccgctacatcgcctcctcctccatggcgcccacgcttcgtccaggcgaccgagccgtcgccgagaaggttacatacttgttccggaggccatctattggggatatagtgtttttcaaagtaccgactgctgtgcagaattatggtgtcaataaggatgttgtctttattaagagagtattggcaacaccaggagacttcattgaggtaaaataaaatgcatcactagctccattgaggtaaaaacgcatcctcctcctcttatgttgtttacaggtccgacaagggcagcttattgtaaatggtgtcgcactaaaggagcattacgcagcagcaacgtcattgtacacaatggaagcaatggttggtttgtgcatacatctctaaacctggctgtgagcattgtctccttgaacaacattgaggagttgatattgccaggtccagagatctttaaaagtcacaagaaagaagatgatcaaaaactggactggctgctccatgttgttgacttcttgagtgccccgttgtaatcaatcgatcaatgggcctcagatggtggatgatctttttcttattggatggatgggtgggtacctggatcctcagtcagctgaaagtaagtattctcgtactcctgcagcgccttcctgaaggtcacgtatttgtcatgggtgacaaccgcaataacagctgtgattctcgtgcctgggggcctcttcccgttgccaacatcgttggaaggtacatgacatcatttacaagatcctctttccagtaactggggttccactcaatgttcgtcctcataaatcaatcatagttagagagttgtggagccaggcggctgctatcttgtcaatttgtagcgatgtttgttgtatatgattctcacttaatttggacatgcatgattgtgtacttgtgttgttataaagtaagcatgttttgttgttgtatatgatcgcacttaatttggacatgcatgattgtgtacttgtgttgttataaagtaagcatgttttgttc

SEQ ID NO: 101567 - DNA, 975 bp, Zea Mays
aagagcacacggaagaagagtagtgagcacggaaccccaccaggcagaggcagtaagccaccagctgcagccgccagcacagcgcagggcagagggagagggagggcaccggcacaccatggccgtggggggccttctgcggggcctcgtttcgccccccgcctggctaccctgccatgagctcttcgcctcctggcaccactggcttccctccctcccgcgcctccgcccgcccgcatccgacggcttcaagcttctcttggtgctgctgctcttctccgccgctctagccgaggtccgctacatcgcctcctcctccatggcgcccacgcttcgtccaggcgaccgagccgtcgccgagaaggttacatacttgttccggaggccatctattggggatatagtgtttttcaaagtaccgactgctgtgcagaattatggtgtcaataaggatgttgtctttattaagagagtattggcaacaccaggagacttcattgaggtccgacaagggcagcttattgtaaatggtgtcgcactaaaggagcattacgcagcagcaacgtcattgtacacaatggaagcaatgcgccttcctgaaggtcacgtatttgtcatgggtgacaaccgcaataacagctgtgattctcgtgcctgggggcctcttcccgttgccaacatcgttggaaggtacatgacatcatttacaagatcctctttccagtaactggggttccactcaatgttcgtcctcataaatcaatcatagttagagagttgtggagccaggcggctgctatcttgtcaatttgtagcgatgtttgttgtatatgattctcacttaatttggacatgcatgattgtgtacttgtgttgttataaagtaagcatgttttgttgttgtatatgatcgcacttaatttggacatgcatgattgtgtacttgtgttgttataaagtaagcatgttttgttc

SEQ ID NO: 101568 - DNA, 1177 bp, Zea Mays
aagagcacacggaagaagagtagtgagcacggaaccccaccaggcagaggcagtaagccaccagctgcagccgccagcacagcgcagggcagagggagagggagggcaccggcacaccatggccgtggggggccttctgcggggcctcgtttcgccccccgcctggctaccctgccatgagctcttcgcctcctggcaccactggcttccctccctcccgcgcctccgcccgcccgcatccgacggcttcaagcttctcttggtgctgctgctcttctccgccgctctagccgaggtccgctacatcgcctcctcctccatggcgcccacgcttcgtccaggcgaccgagccgtcgccgagaaggttacatacttgttccggaggccatctattggggatatagtgtttttcaaagtaccgactgctgtgcagaattatggtgtcaataaggatgttgtctttattaagagagtattggcaacaccaggagacttcattgaggtccgacaagggcagcttattgtaaatggtgtcgcactaaaggagcattacgcagcagcaacgtcattgtacacaatggaagcaatggtccagagatctttaaaagtcacaagaaagaagatgatcaaaaactggactggctgctccatgttgttgacttcttgagtgccccgttgtaatcaatcgatcaatgggcctcagatggtggatgatctttttcttattggatggatgggtgggtacctggatcctcagtcagctgaaagtaagtattctcgtactcctgcagcgccttcctgaaggtcacgtatttgtcatgggtgacaaccgcaataacagctgtgattctcgtgcctgggggcctcttcccgttgccaacatcgttggaaggtacatgacatcatttacaagatcctctttccagtaactggggttccactcaatgttcgtcctcataaatcaatcatagttagagagttgtggagccaggcggctgctatcttgtcaatttgtagcgatgtttgttgtatatgattctcacttaatttggacatgcatgattgtgtacttgtgttgttataaagtaagcatgttttgttgttgtatatgatcgcacttaatttggacatgcatgattgtgtacttgtgttgttataaagtaagcatgttttgttc

SEQ ID NO: 101569 - DNA, 1500 bp, Zea Mays
atgctgcccctctccctcttcgtttccctcttggtgctccatctcccccacgcatccgccgacggcgacatctgcatcatcggcggtggcatctccggcgcctccaccgccttcttcctcaccagctacaccagcaccctcggtggagcgcagctgcgcgtttttgagcgccgtcagaaggtgggcggccgcctgggcaccgtcactctcgcgggcgacagcttcgaggccgggggctccatcatccacccccgcaacctccacgcgcgccgcttcgccgacctcctgggactcgccgtgaagaccggcggcgacgactggctagggatctgggacggcaaaagcttcgtcttccagacggcccgcccacctcctgtcggcagctcctggtggcggcgcaagctgcacagtctcgtcaactcgctgctgctgctcaggcgatatggtctgtccctgctaaagatggacaagtttgtccaggaaatgttgcggcggtttatgctcttctacaatggcatggagtctcgccctgtgtttgccacggttgaggagatgctccaatggacgggtctctatggcctcacccgcaggacccttgaggaggagctgctggatgccggcctcaacacccgaacgatagcagagcttgtcactgttatcacaaggatcaactatgggcaaagcacacacataagtggcctggcaggcgccgtgtccttagctggatctgagtcaggattatgggctgtcaaagggggcaactggcagctagctgccggattgctcaagacctctaatgctaccttgcatcttcaagaaggcatagactccatcactgatgccggggatcactacgttctgagatccaatagtgggagcgaatacgagtgtatggtgacggtggtggcaaccccactcgacgagctgaacattacgtttagccctccaatctccattccgccgaggaagatgcagcacacacatgcgacctttgtgagaggcatattgaacccgggatattttggtctgaactcggcatcagatattccagagctgattggtaccctagagctccctgatatccctttctcctgcatctctgttctgaagaggtacagcgaaggcgacatggcggcgtacaagatgttttcacgggcaaagctggatgatggtttgctggatcagatcttcagatcatatcgtggttgctggcatggcagggctcggatagagacgatccggatcaactgggctgcttacccgcactaccaagccccagaggagtttgctccgatagtgttggacgggaagcagctgtactacgtgaacacctttgagagcgccgcgagcgccatagagacgggtgctgtagcagcagagaacgtggcgcggctcatcatctccaggctctctctactaccgcaggcacagcagcagcagcctcatatcatcaagtcattcgccgaacaagaatcccagcgtcgccatgtagacctgtga

SEQ ID NO: 101570 - DNA, 1028 bp, Zea Mays
ggtggccaacgcggtggtgttcctgcccttccagctggcgctggccgtcgtgttcgcggcgccggtgtactggctggcgggtctccgtcgaacggcggcggcgttcggctacttcctgctggtgatatggctgatcctgtacacagcgaactcggtggtggtgtgcttcgcggcggcggcgccggacttcgtggtggggaacgcggcgatccagggggtgatgggctccttcttcctcttctcgggctacttcatcgcgcggtcggcgatgcccgggtgctgggtgttcatgcactacctgtcgttgttcaagtggccgttcgaggcgctgctggtgaacgagttcgccggcggcgggaggtgcgtggtgcgggcgctgggcgagtgcgtggcgactggggacgaggtgctgcggcgcgaggggctcggggaagagtgcaggtggcgcaacgtgggcgtcatggtggccttcatggcggcctacagggtgttgggctacgccgtgctgagggtgaggtgcagcctcgcgctcaacaagaagggggccgtggccgccggaccacctggcctcggcctcagccgccgcctgagaagacagctagccatcatcggcaccgctgcgtggccctcgccatcgtcttcttccaccccctcgctccctgttaattaaattaaattaaattaaattaaattaaatggcaaccaaatacactagtgtatgtgtgcttacttgttttgttcggtgattcgtacggagtgcttacttaatattgtattgtattatacttggagtaggaagtatggtatccaaagatagcatctgttccaatacatcttgtaatcagactctgctctaactcgtaccaacatgctgagatgtcccaaggcatggcattgtggaatctataaactctccgactataactatatatatgcttattttgtatggtacttgtattttcatgtttgtttggtaattaatcgagggctgagcagttctttggcacacaagacatgtgccgatcaaa

SEQ ID NO: 101571 - DNA, 2436 bp, Zea Mays
aagaaacgggaaagggcccggcccaccgtctacctacggccgccctcgagtatttggagccgctccgcttccgccagcgcccagcagagcagcctgagccagcagcccgagttcgattacctcttcaagctgctgcttatcggcgactccggcgtcggcaagagcagcctcctcctccgtttcaccgccgactcctttgaggacctttcccccaccataggtgttgacttcaaggtgaagatggttaccattggtggcaaaaaactcaagcttgccatctgggacacagccggacaagagagatttaggaccttgaccagctcttactacagaggggcacagggggttattatggtgtatgatgtcactcggcgggaaacgtttactaatctttctgatatatgggcgaaggaaattgacctgtattcaaccaaccaggactgtataaagatgcttgttggaaataaagtagataaggaaagtgagagagctgtgacaaaaaaggaggggattgaatttgctagggaatacggttgtttgtttctagaatgcagtgcgaaaacaaaagtaaatgtagaacagtgctttgaggaacttgtgctaaaggtatgtactgggctatagcatttagatttataataataatattttaattttcacaatatcatgcatgccttgttgttcacaatattccaagcggcacatatgttggactcaagtattgcttgtttagccatggattggctttgactgaaatgaggaagggggcttttatgcatgtgtgagtgtcctcgaagaaattagattgctttatgcatgcttgttgttgcagatattagacacgccaagcctcctcgctgatgcttcgtctggggccaagaagaacatcttcaagcagaagcctccggaagccgatgccgctgcaagcagctgctgttaacatgcttttgccatgctaattccgcgtcctcccgtggatgatgacgatgatatctttgtttggtgtgtcggtttattgtttcttcttcttttggtcctgtatatgctgaatttattacacccacacataactgtacgttggcagcagctatataatatatcgttttttgttgtttctttttgttttgtttaaaagagagagagagagaatagtatatgttttgttttgtttccgtgctccagttgagagagagagagagagagaaatgaagatatttgagaggagtatggatggattcacgggtgggcaagggcaagggaagaggccaggccatcgcaggcaacacccgtgccgtgtgtcgtgtcgtgcgaggtcacgggtcactccagccaaaaaacagatgatgatgatgatgatgtgccatgctgcggggcaacaagaaactgaacaccacggaaatccaaggaccagccagcgcccgccctcgtcccttttgtatgtatgtgctccctctctccctccctccctttgccatttgccgatttgggcagcagcaatgacacttccctgcgccggcggctgcgagatccaagccagcggcattaactaccgcatcgccgtctccacccgacctctcaaggtctggagcagatcagacgacgacgtccattcccaagaccaccacagcgtcgtccgccaggtgctccgggacgtctcctgccgcgcgcgccccggcgagctgctcgccatcgtcggccccagcggcgccggcaagtccaccctgctcgagatcctcgcggggcgcctctccccgtccccgccgccccacctgctacgcatcgacggcgccgccgcccacagcgccgacctccgccgcgtctccgcctacgtcacccagcaggacgtcctcttcccgctgctcaccgtgcgcgagacgctgctcttcagcgcgcgcctccgcctaggcgcgcgcctgccctccaaggacatgcacgcccgcgtcgaggcgctcctcgacgacctcaccctgcgccgcgtcgccgccaccaggatcaaggacctctccggcggagagcgcaggcgcgtctccatcggcgtcgaggccgtgcgtgacccgcccgtgctcatcctcgacgagcccacctccggcctcgacagcgcctccgcgctccacatcgtcggcgcgctccgcgccatggccgaggcgcgtggacgcaccgtgctgctcagcatccaccagccgggagcgcgcatcgtcaagatgttcgactccgtcctcctgctagccgccggctccgtcctccaccatggcaccgtcgaccagctccgcgccctgctcggggacgcgggccttcacctgcccccgcacgtcgatgacgtcgagttcgccatcgactccgtggacgcgcttcgccgccacgccagcagcagcctgcaggcgccgtcctccggagaccgagagggccggtgcacgctgcagcgtctgttccagctgc

SEQ ID NO: 101572 - DNA, 892 bp, Zea Mays
aagaaacgggaaagggcccggcccaccgtctacctacggccgccctcgagtatttggagccgctccgcttccgccagcgcccagcagagcagcctgagccagcagcccgagttcgattacctcttcaagctgctgcttatcggcgactccggcgtcggcaagagcagcctcctcctccgtttcaccgccgactcctttgaggacctttcccccaccataggtgttgacttcaaggtgaagatggttaccattggtggcaaaaaactcaagcttgccatctgggacacagccggacaagagagatttaggaccttgaccagctcttactacagaggggcacagggggttattatggtgtatgatgtcactcggcgggaaacgtttactaatctttctgatatatgggcgaaggaaattgacctgtattcaaccaaccaggactgtataaagatgcttgttggaaataaagtagataaggaaagtgagagagctgtgacaaaaaaggaggggattgaatttgctagggaatacggttgtttgtttctagaatgcagtgcgaaaacaaaagtaaatgtagaacagtgctttgaggaacttgtgctaaagatattagacacgccaagcctcctcgctgatgcttcgtctggggccaagaagaacatcttcaagcagaagcctccggaagccgatgccgctgcaagcagctgctgttaacatgcttttgccatgctaattccgcgtcctcccgtggatgatgacgatgatatctttgtttggtgtgtcggtttattgtttcttcttcttttggtcctgtatatgctgaatttattacacccacacataactgtacgttggcagcagctatataatatatcgttttttgttgtttctt

SEQ ID NO: 101573 - DNA, 1112 bp, Zea Mays
aagaaacgggaaagggcccggcccaccgtctacctacggccgccctcgagtatttggagccgctccgcttccgccagcgcccagcagagcaggtttgccttcgccttcacaattcgcaccacattattgtcttgtgttgcccgcaacccaaagcggatcaaaccctagatctcgtccccgttcctccgatcctcatggattcctcctcctcctcgtccagcctgagccagcagcccgagttcgattacctcttcaagctgctgcttatcggcgactccggcgtcggcaagagcagcctcctcctccgtttcaccgccgactcctttgaggacctttcccccaccataggtgttgacttcaaggtgaagatggttaccattggtggcaaaaaactcaagcttgccatctgggacacagccggacaagagagatttaggaccttgaccagctcttactacagaggggcacagggggttattatggtgtatgatgtcactcggcgggaaacgtttactaatctttctgatatatgggcgaaggaaattgacctgtattcaaccaaccaggactgtataaagatgcttgttggaaataaagtagataaggtaatcaattctaaactctgtctgcaccttttatctcttgtttctgatcgagcagcccctgtcgtgttttaccggccgtttcattttggcaggaaagtgagagagctgtgacaaaaaaggaggggattgaatttgctagggaatacggttgtttgtttctagaatgcagtgcgaaaacaaaagtaaatgtagaacagtgctttgaggaacttgtgctaaagatattagacacgccaagcctcctcgctgatgcttcgtctggggccaagaagaacatcttcaagcagaagcctccggaagccgatgccgctgcaagcagctgctgttaacatgcttttgccatgctaattccgcgtcctcccgtggatgatgacgatgatatctttgtttggtgtgtcggtttattgtttcttcttcttttggtcctgtatatgctgaatttattacacccacacataactgtacgttggcagcagctatataatatatcgttttttgttgtttctt

SEQ ID NO: 101574 - DNA, 1020 bp, Zea Mays
aagaaacgggaaagggcccggcccaccgtctacctacggccgccctcgagtatttggagccgctccgcttccgccagcgcccagcagagcaggtttgccttcgccttcacaattcgcaccacattattgtcttgtgttgcccgcaacccaaagcggatcaaaccctagatctcgtccccgttcctccgatcctcatggattcctcctcctcctcgtccagcctgagccagcagcccgagttcgattacctcttcaagctgctgcttatcggcgactccggcgtcggcaagagcagcctcctcctccgtttcaccgccgactcctttgaggacctttcccccaccataggtgttgacttcaaggtgaagatggttaccattggtggcaaaaaactcaagcttgccatctgggacacagccggacaagagagatttaggaccttgaccagctcttactacagaggggcacagggggttattatggtgtatgatgtcactcggcgggaaacgtttactaatctttctgatatatgggcgaaggaaattgacctgtattcaaccaaccaggactgtataaagatgcttgttggaaataaagtagataaggaaagtgagagagctgtgacaaaaaaggaggggattgaatttgctagggaatacggttgtttgtttctagaatgcagtgcgaaaacaaaagtaaatgtagaacagtgctttgaggaacttgtgctaaagatattagacacgccaagcctcctcgctgatgcttcgtctggggccaagaagaacatcttcaagcagaagcctccggaagccgatgccgctgcaagcagctgctgttaacatgcttttgccatgctaattccgcgtcctcccgtggatgatgacgatgatatctttgtttggtgtgtcggtttattgtttcttcttcttttggtcctgtatatgctgaatttattacacccacacataactgtacgttggcagcagctatataatatatcgttttttgttgtttctt

SEQ ID NO: 101575 - DNA, 1096 bp, Zea Mays
aagaaacgggaaagggcccggcccaccgtctacctacggccgccctcgagtatttggagccgctccgcttccgccagcgcccagcagagcaggtttgccttcgccttcacaattcgcaccacattattgtcttgtgttgcccgcaacccaaagcggatcaaaccctagatctcgtccccgttcctccgatcctcatggattcctcctcctcctcgtccagcctgagccagcagcccgagttcgattacctcttcaagctgctgcttatcggcgactccggcgtcggcaagagcagcctcctcctccgtttcaccgccgactcctttgaggacctttcccccaccataggtgttgacttcaaggtgaagatggttaccattggtggcaaaaaactcaagcttgccatctgggacacagcatgactccttttcctcttgggtggctgtgtgtgacacacaggcgagatggctggtggtacgagcagcatggcaacgtggcggccggcatggcttgtgcgcggggcgataacgcgggagaccagtgtgggctccatcctctcctggctggctcaacttccaggcatctggggaggagcattagggctgcagtggcgcgtggtgagggctgtggcggtgcggtgcgggacagcaagaagcctcgttgtgcagcatgaatggatgttgcactttcttttctaagcaataggatggtgttggatggtgcatagaggcacgaaagttacatggggacttaccagagggcagaggcaggttaccgaatccgagatcaataataccataaaagaatcgttttggtctgtccttttcccccacaattatttcgaagagctaaccattccactggacagtgtcattctcgttctgattttgcccagctttatcctatctatttatacatcttccattctttgagtatgatcgtgtatttgttatcgctgatgattacctgttatgcagccggacaagagagatttaggaccttgaccagctcttactacagaggggcacagggggttattatgggtatgacttgtaacagctgtcctgtaaatatgtaactctattgcattgttgaa

SEQ ID NO: 101576 - DNA, 1690 bp, Zea Mays
aagaaacgggaaagggcccggcccaccgtctacctacggccgccctcgagtatttggagccgctccgcttccgccagcgcccagcagagcaggtttgccttcgccttcacaattcgcaccacattattgtcttgtgttgcccgcaacccaaagcggatcaaaccctagatctcgtccccgttcctccgatcctcatggattcctcctcctcctcgtccagcctgagccagcagcccgagttcgattacctcttcaagctgctgcttatcggcgactccggcgtcggcaagagcagcctcctcctccgtttcaccgccgactcctttgaggacctttcccccaccataggtgttgacttcaaggtgaagatggttaccattggtggcaaaaaactcaagcttgccatctgggacacaggtaccaaaccattgcccccccttacattttttagattaaggaacacaatgtttccggcctacccattcgcaaacgaatgagtacagccacacagcaggactcgaaggatgcttagatctaaatccattaaatgacactcaaaagaacaccagaacttagttctcaattcttctcctatgtctcaactgaaacccaacgactcagcacgtttcaagcagcatatacaggatgaggacttaggattttcagcaaacaaagcacgacaccggttgcacatgtaggaggagagcacagcggcgcgtaggaggagagcaccacaagtgaaccgaaacatcatgagcatgaaactatggcgccagcaccacggcgacctccttggtgaacttggtgccgaggcattagatagcaacctgagacctcatgaagtccaggggtttcaccgtcatctctcaagtcatcatcctatataatgaatagaagtgttgtagtgcagcagcgagagtccttaaacttagcagctcatgcagtgtgaagtcattggagatgtcgaaggcaccattgttgtagaagaacagtcgccgcaccgcggcaagtcgatgtcgaatttaagaatgtgaatggcatgccgttagtgctcatggttgcctgccaacgacgccgagacgtcccacattggcgctggatgtgatggcatcccccaaatgcctatgacagcgcgaaagtgaactaacaccggcgacgatatttcttcctccattgcagcatgactccttttcctcttgggtggctgtgtgtgacacacaggcgagatggctggtggtacgagcagcatggcaacgtggcggccggcatggcttgtgcgcggggcgataacgcgggagaccagtgtgggctccatcctctcctggctggctcaacttccaggcatctggggaggagcattagggctgcagtggcgcgtggtgagggctgtggcggtgcggtgcgggacagcaagaagcctcgttgtgcagcatgaatggatgttgcactttcttttctaagcaataggatggtgttggatggtgcatagaggcacgaaagttacatggggacttaccagagggcagaggcaggttaccgaatccgagatcaataataccataaaagaatcgttttggtctgtccttttcccccacaattatttcgaagagctaaccattccactggacagtgtcattctcgttctgattttgcccagctttatcctatctatttatacatcttccattct

SEQ ID NO: 101577 - DNA, 906 bp, Zea Mays
gtgctcttttatctaattagatttcatattatgtggcatttgtagctccttggcatttttttggcaaagagtgtatgaaaagaccagttgaacagaagatgggatcattcttttctctgctagaattcatggacattgacatttaattggcaaacacaactcaagctctcatggcatgcatatccctatctgaatttgaagcaagctgaattgggttcggtaaatacttgtccctcgaatagcagagataatttccataggatcaccagatcttatttttacattcactaccgcaattacagttatatttgttctagcggactacataaatcttacttgctctcttgaaatagtagattccatagatagattaattgatcttcttggtgcctgtgaagataattcaactctagtcaacttctcttctattgtggccaagatatctgagcatgttgatggcacaattactgatgaaatttgacaagaattcccatggatcaaattgtagatctcttgtttgtagaaaatgagcaatgtatgaaaatgtgtttgcaagacttgcatcttttgataaaggttggaaagttgaaggttgttgagacaatgattgaatcgggaattgacaagaaacttcttgtgcttctaggcaatggttctgagatcctgtagcaccacgtgattaccacgctaaaaacattcggtgaacttggtgctccactttaagggtgcatggggcctgcagtgttgcttcatttgccttggcatgctcggatcagtttggaaagatttgttttatttgatagaaatatattgcaaccaccaaagccccaacaattatttgaggtgattcttcataatatccttcagagagacaacaaaaatatcattgaaaccatccaatgttta

SEQ ID NO: 101578 - DNA, 2698 bp, Zea Mays
agttgcattgttagcgaggaacaatgcaaaactcacaaaccgacagatcggcaagcatattacagcagtatacgtcgcatttacatgcacatgatttttttttgtttcggaaaagggtttttaattcgccaccgacagtgccaactgccccttcctagcagagcaaggaaggggaaaccggggaaggccaggctccatggagcacggatcgggtcaggtcaactaccccatcctaatcttcaaaactcccctgcccaggaaggcccgaaggcaccatcgccgtccccgtccatgcgccgctgaccgcgcgcgccatcaaagccaattacccagccatctagctatcagccatgtattcggccaaccactggggcggctcgttcgagatcgccgatggcgcggcggaggacgaccacagccgcaacatggacctggaccgcggcgcgctctcggcgcggcagcaccacgagctggacgagacccagcagagctggctgctgggcccgccggaggccaagaagaaggacaagtacgtggacctcggttgcatcgtcgtcaagcgcaagatgctctggtgggccttgtggtgcgtcgtcgccgctttcgtcctcatcggcctccccatcatcatcgccaagtccatcccgcacaagaagccaggcccgccgccgccagatcagtacacagatgcgctgcacaaggcgctcctcttcttcaatgcccagaaatccggccaccttcccaagaacaatggcatcaagtggcgcgggaactctggcctgtcagacggctccgacgccaaggacgtcaagggtggcctcgtcggcggctactacgacgctggcgacaacatcaagttccacttcccgatggccttctccatgacgctgctgagctggtcggtgatcgagtacagcgccaagtacaaggccatgggggagtatgaccatgtcagggagctcatcaagtggggcaccgactatctgctgctcaccttcaactcatctgcttccaccatcgacaagttatacgctcaggtgggtactgctaagatcaacggcagccggccggacgaccattactgctggaaccggccggaggacatggcatatcctcgcccttcactgtccgtgagctccgcccctgatctgggtggcgaggtcgccgctgccctggcggccgcctccatcgtgttccgcgacaacgccacctactccaagaagctcagccagggcgcggccaccgtgtacaagttcgcgcggcagtcgggtcggcgcaccccctactcgctccgtcagccggacatcgagtactactacaactccaccagctactgggacgagtacatgtggagcgcggcgtggatgtactacgccacgggcaacaacagctacctcaccttcgccaccgacccgcggctgcccaagaacgccaaggccttcttcaacatcctcgacttctccgtgttcagctgggacaacaagctcccgggcgcccagctgctgctgtcgcggctgcgcatgttcctcaaccccggctacccgtacgaggagtcgctcgccggctaccacaacgccaccagcctcaacatgtgcatgtacttcccgcgcttcgccgccttcaacttcaccaagggcgggatggcgctcttcaaccacggcagggggcagccgctgcagtacgtcgtcgccaactccttcatcgctgcgctctacgccgactacatggaggccgtcaacgtccccggctggtactgcggtccaaacttcatgaccaccaacgacctccgtgagttcgccaggtctcagatcaactacattctcggtgacaaccccaagaagatgagctacgtggttgggttcggcagcaagtacccacggcacgtgcaccaccgtggcgcgtccacgccgcacaacggcgtcaagtactcgtgcaccggcggctacaagtggcgcgacagcaagaaagcggaccccaacctgctggggggcgccatggtcggcgggcccgacaagaacgacggcttcaaggactcgcgcaacaccttcgggcagaacgagccgacgctggtaggcaacgccggcctcgtcgcggccctggtggctctcaccagcagcggcaggggagtcggcgtaaccgccgtcgacaagaacaccatgttctccgccgtgccgccaatgttccccgccgcgccgccaccaccgtcatcatggaagccatgacgaccgtgaacattcatggtcatacgattttttgtgatcgatcacgtacgcgcgcgaattctcttctgtacaataccacacgtaaattaacagtacgtgtaagcaaatatatagtacgtagcgcacggtggatcatcggccggacatgcttcacgtgtgatggttttctatggataatgagtggtgttagctctctccccctctcccagtacttgttttgcatacagtacgaagacgacgctcctcgtccgtgctccaccaagttgatttctcaatcaacacgccgactcatcaactctactcaagatggctcctcttcaaaaaaggacttggctctcaatgccaaccatgagaaggacaaagcaaaaataaaaaaaaatcttgagagctcaagtaatgataaagttgatgtaaagctagcactcatggcgaaggaaacaacaaagatacaacaaaaaaagcatcaaattttaatc

SEQ ID NO: 101579 - DNA, 1598 bp, Zea Mays
aactgcttcttgtgcaattgggtgtgcttgctactgctcgctccccccgcggccgccctcgcttgctccgggcgccaccgtggggtcctccccccctgctctcccacacccaccctgtccttgtcgtccgctctgcgcaaccaaaccggcgaaaccgcccccctttcactccccctcctcctccagatccatccgcctctcctcgaaaccgtctctctgtgcgtccggagtccggggagagggtggcggcggtggagatggagagcctggcgcagcgcgcggcgctgctgcgggagtcgctgcagaagagccagcaggtcaccgacgccgtcgtctccatactcggctccttcgacagccgcctcaccgcgctcgactccgccatgcgccccatccaggtgaggacgcacgccgttcggaccgcgcacgagaacatcgaccgcacgctgcgctccgcggatgtgatcctcacccagttcgacaggacccgagaggcagagcgtgaaatacagaaggggccgcatgagaaccttcaaggtttcctagatgcagttgatcgcttgagaagtattgagcgtttctttagttcaaatcggagttaccgtagtagcgatggggtgctcaaccacgtaaacgcgctcctttctaaggcccttgtcaggatggagggtgaattccagaatcaattatcccagcgcagcaaaccgatggagcctgatcgtctttttgattgtcttccaagtacacttcgaccatcgtctgaatctcagcccgaaggtgggaaaaacccatccgagaatcagcaaaacccagaggctgttgtatatagtcctcctgctcttattgagccaaagtttgttccactactctctaaattagcacaacagttggttcaagctggatgccaacagcaatgctcagaaatatatagtgaagctcgttcttcagctttagaatcaagtctgaagaacttgggcgttgaaaaacttagcaaagatgaagtgcagaaaatgccgtgggaaattttggagtctaaaatagggaattggattcatttcatgcgaattgctgttaaacttctttttgctggggagcgccaactttgcgaccaagtttttgagtgcagtcaatcgttgagggataagtgctttgctgcaataacaaagaacagtttggctacactactcagttttggagaggctattgctatgagtaaacgatcaccagagaaactctttgttctgttagacatgtacgagataatgtgcgagcttcaaacagagctgctcaaggtcatgaactccaagacccccaaacttggtcccggaaggaatggactggagcacgtgaagcgcctgccgtcaaagacgagccgttgcacagcccaggcgccaggcctccgtccaaggagtcgtgccgctgtcaccaccttctgctgctctgccctctggcagccggaggcagaggcggatcctccaaattcgacggctgaaccgtcaaggatgttgaaatcagaattagatatgaaagcccccaaaggcataggcagggatgcccctgatcttgacatcgacagcctgaaaaacgggaccatttag

SEQ ID NO: 101580 - DNA, 191 bp, Zea Mays
acgagggtgaaaatcgttttccagcgatcaatcaatctatcatgttatccgtttgctcccttttacatccacttgccggcttttactttaccctttttgttaccacttggagatgacacgaacgaggaaaagcacaggatggatgacacgagagatggcaatgggtacccaaaacccgaatacccgacggg

SEQ ID NO: 101581 - DNA, 1366 bp, Zea Mays
tttccagtttccgcgccgccagttcgtgccaaaccctactccaaaatggagtccaaaatgcagggagggattgtcatggctggcggcggcaagccgtcctggtctgcctcggccatcgtcgccactgtcgcgagtgggtaccacatcctcaggatcgatggctactcccacaccatggggacccccacaggagagtacatcgcgtccctcccgttcaccgtgggcggccatcgctggcacattcgctactaccccaacggcaggagctcggagaccaaagagtacgtctcgctttctctctatctccacgactgggtcgctgagacagtgaaggcgcggttcaagttccgtttcgtcggtgacgtggcggagcagccgttgatactgggaggactgcatagctttgataatattgacaacaattgggggcgccccgagttcatcaaaaggaaagatttggaagagtcgaagcatctcctagacgattctttttccattcggtgcgatgtggtcgtgcccaccaacgaagtccgcgtggtagccactgctgcggctgctatggtttccgtgcccccatctgacctgcaccagcatctcggcattctcctgctgaccgagaagggcgccgatgtggtgttcgacgtcgccggtgagacgttcgccgcacaccggtgcgtgctcgcagcccgttcgcctgtcttcagtgcagatctctttggtgcgatggaagaggggggccacaccggaggcgtggtgcgcatagaggacatggaacctctggtgttcaaggcattgctctacttcctttacaccgacttgttagagacagagacgatgaaacaaggtgaagacggagacgatgaagacgttttgtgtcagcacctactggtcgctgcggacaaatacaacttggagaggctgaaattgctatgtgaaaagaagctgtgtgagtgcatccatgtgggcacgatagcaaccatcctggcgctcgctgagcaacaccgctgccatgcactgaagaaggtctgcttccattttctcagctctcctgcaaatttgagggcagtcgccgccactgacggctttgagcatctgagcagaagctgcccctctgttatggaggagttggttgtcatgctcagcaacttggtgtagaaaactgcacagtagttgtgcatcctaggagattctcaatcttttggtgcttttgccagttgacttgactgcgtatgtgccgctctccaccaattcgcagcgggtgattttgttagctgctagctttgaatatccacaacaagtccgtctatgtgcttaatgtttaattctcagaagttggaatgcactatagctcttgctttcttattaa

SEQ ID NO: 101582 - DNA, 217 bp, Zea Mays
cggggtcaatatctcccacttattttatccaaaataggcgatccatatatccaaaagaaagagaaaaagaagacctacaacttttgtgttttgagtttttgagtttcgggtctctaaatttgtcaaacaatctgttgaagttagagcagaaaatctgtgatagacagacgagaatttttttgatagtcttgtgttatatcttgtttttgcggcactc

SEQ ID NO: 101583 - DNA, 2028 bp, Zea Mays
ccgctctcgccgccgcccgtcccgacttaggccaagccaaccgcgtcatcgtcttatctctctcccatcattcatctatctgatctcatctcctatcttccctctctctcctccccgtcgtctgccttctctgcccggcaagaccgcctgcccatgtccgtggcgccgtgcgcgcttctcctgccctgcaatccgcttcctcagcgcagctccgatccgccaacgccgcccaaggagccgggatcggccgaccgatcggagacgagaggcaggcagcggaacagagcagcggcccgcaaggcgattgctctattctgccctgttccagcgttccatgcatggatgccaaggaactcatctcacagtccgacctgcagtcgttctaccagcagcaacaacagcagcaccgtgccttcggcggccaccatagcccgtcctcgctggccgggatgcactccgtcatccgacccatgcccaacatgaatatgagcccaactgctatccttaactccatcagcgggggttccctcgccggcatgcagttccagatggacccgcccccaccattgctgcacaacatcaacgccaccggcgctgtcacaccggcccctgcggagcctctcaagcgcaaaagaggaaggccgcgcaaatacggacccgatggcacgatgaggcaacagcaacagcaacaggctgcgtcatcgcagcagcagctcgtcgctacacaaccgaggatatgttctctatcgtcgggtcccgacatgctcggcagctccggtatggaggaccccgcgcagaagaagcggcgcggccggccgccgggcaccggcaagaagcaccagccctcgacctcacaaggtccaggcaatgcgttcgccggttcggctggaacgagcttcactccgcacatcatcacggcgtctccttcagaggacgtggcggcgaagatcgttgcgttcgccagccagtcgtcaaaggcggtgtgcgtcctctcggcgatgggttccgtctccagggccgtcctccgccacccggccgacggctctcccatggcgagggttcacgcgtcgccgcagccgtacaagaaccctgctgtctacgagggtttctacgagatcctgagcctaaccggctcgtacaacctggcacagggcggcggcctcagcgtcacgctctgcagccctgagaggaacgtgatcggaggcgttctgggcggcccactggtagctgcaggcaccgtgcaggtggttctggggagttttcaccagggagggtcgagatccaagtccaagaaagccgggaagcagcagcaggcggcggccttcagccccgactcgctcaccggcggccaggaggcgtcgcccagctccgggcacaaccaaaatctaacgccgccgccctccgtgacgggagggtggcccacctccggcatatttgacaccagaagttccagcattgatatcaactcgtctagaggctagctcattcgtcgatataattccagctcgacagaaattttctgttttcgcacaagaatacccaaaaaccatacttcgaaatagcttattcgcttctttcttttgagtaattaaattcgtatagaattcataggcatcgctcagtctcgtgacttgttattattcttccaacaatcccccttcgtcctctactcctctccgcgtggcataccgttgtgcaaattatacttcagaaatgcaaatatgcaactggtgtatgtaaattacctttttttgcccatatttagttttggtgatcccaacttgttggaatctgtcaggccactccaaggataccaggtatgaaaacacacagaaaaagaagggaaaactttaaagaatctggaaatgactaataaggattttaaccattgggaagccacattcacgataagcagaaccttccccttgcatctactcaactccacaccattttcacaagtattcgaaagttctcttcttcatattccagttgcatccattaaaaaaaatcaaaacaccatttccaaat

SEQ ID NO: 101584 - DNA, 441 bp, Zea Mays
atgatgttgctaaaatcctcacaggccacttcaagctcctggcgacttaattttggtagacttttcagcatatcagaatctgtcaacactgttatctcgtcgctccaacttttcgatcgattccatgatgatattcttatagaaggcttcagcttgcaacttctggaagcagtaactataccagtaatcacaaaaacaaccagaagaacaccagttgcgatttctaaagcaagaagccaaattggttgctccattttttcatgtttatggccaggatgtttggatccgtatatgacaccttgctggccagtagaaccacttgtacaaatttgcaaaggtcgttgttggacagagtactcatcctggaagcagttcccttggaaacttgaccttggaagatatttcaagcaggatggaatttttccgacaagaaagttgtaa

SEQ ID NO: 101585 - DNA, 2071 bp, Zea Mays
ggcaagggttctgctgctgtcggtccagtaaaatacagtaacaacaagaaggatgctagggcaccctgtgaaaacaaaaatagattggtccgtcgcgccatcaaggtcagcgacacggcccacgcggaccctactcttctccttgttccgtgagatccgcggtcgcgctctacaacggcatgatccggggttgcgcttaccatggggccgcacgagcgcgcgctggagctgctcgccgaaatgccgcgccgccgccgtgtccgttttgtttttccccataagaaatagaatatccaatcgaattgtcaagtgctacctgatttgaaaatgtttttccctctaggatgatctgatttcagatctcaccagaagaagcactacctggttattggaatccaaaaatttttatgtactgttttgatcagtgaaattcacacttcgctagtccaacaagctgacaggaacgggttctagacggatcggacggcacacgataacagctgccggtgtcccggaccatcctgtccatccctctataaacggagccctgtccagttgtgatcgagacccctcgcaaccgccggccgattcgagcagcgccccagcagcctctgctccgctgcctctggcgaccgccggagcccgaggaggaggaggagggaagatctcgctcgatccaaggaggtgagtacaagatggtgagctcctcgtcgccggtggtcaacgtgtacccgctcgccaactacacgttcggcaccaaggagcccaagatggagaaggacacctccgtcgccgaccgcctcgcccgtatgaaggtcaactacatgaaagaaggaatgcgtacaagtgttgaagcaatcctattggtgcaagagcacaaccatcctcacatactgctcctgcaaatcggtaatacattctgcaaacttcctggtggacggttgaagcctggagaaaatgaaatcgagggtttgaaaagaaagttatgcagcaaacttgctgtgaactcgccttcctttccacctaactggcaggttggagagtgcgttgctgtgtggtggaggccgaactttgagactgtgatgtatccttactgtcctccacatatcactaagcccaaggagtgcaagaaacttttcattgttcacctatccgaaagagagtattttgctgttccaaggaatctgaaactgcttgctgttccactgtttgaactctacgacaatgttcagaggtacgggcctgtcatctctaccatcccgcagcagctttctaggttccagttcaacatggttagctcttagggtgatgatacaagaaaaccaatgtggccaaggcagctcttcggttgctgagctagctgatcaacgtaccctgactgattttatttcattgtgctggatttttttatatagactactactatctagacatgcatttctgattgtattgttgttgaattatcctgttatgtcgcatcccatgggcagatccagtctaggatatgtacacctgataacttagttaaaaaaaagaaaagaaaaccgaaggtagtgtgtgtatagatcgtactgtagtatgcatgtaaccggatcagatccgttttcaggtagattgctctaggttgggttatttattgcattaattgcacaagctagatgccatgtgtactattgtcgaaaaggggttgcaggtcaaccttgcgtagatgttaaatgcagtctcaaatattttatccgaaggtgtgttctagtactggcatgccattgattacgtcatccaagcatatgttgttgcatcttatatgtgaatagccacatggtctgaacttaaagtttctagaggaacaagttcttcagatgatgctgcatcttacccgttggagttcttaactgttccagttgcatttgagctcgttattttcatcatcctcttcccatattgccatgtttccccttgagaatgaagtgcgctccgcattttccaagtactccacaagagagctaaagaacattctcaacaaagcatttttacccaaaaaacaaacaaacaaaccagattttggctacaa

SEQ ID NO: 101586 - DNA, 2529 bp, Zea Mays
atggatttgtccaggctcgcctccgtcgccgggcccagccgcgcggccccgcgggcgggcctgcagatcggcgccgccgggaatggcttccgcgtctgctccctgcggcaccgcggcgccgggaacgggcgcctcacgtccgccgccgccctcctccgcggcagcagcgggctcttctacctggctcccgcgcgcgggggccctccccgtctccgcgccagagggcggccgcggtgccagggcagcgactcgttggcctacgtcgacggccccttggaggccgccaagggctccggcgaggtctacgacgacgatgccaccagctcggggcccgacgacgacgacaatgacaagggccccgccgacgtggacggtctccgggagatgctgcagaggtgcaggaacgagctcgaggtggccaggctcaacagcaccatgttcgaggagaaggctcagcggatatccgagtcggccatcgcgctcaaggaccgcgccgaaggcgcccagagggacgtgtccgcggccgtcgccaccgtgcaggaggtcatcgtcaaggaggcggacgccaaggaggccgtccagaaggctaccatggcgctgtcgatggccgaggccaggctgcagctggcgtccgaggcgctggatgccaagcgggggtcggtcgggcccatggaggttagcatcgaaggcgtggaggaggaggcccttgtgtctgctcaggaagagatcaaggattgccgggcagccttgttgcggtgtgaggaggagctggaacgcatccaggaacagaaaatgaacctgcagaaggaggttgataggctcaccgagctcgctgagaaggcccagttggatgcatccaaggccgaagaagatgtcaccaatataatggtgttggctgagcaggcggtggctcttgagatgaaagccacgcagcgtgtcaacgacgcggaggcggtgctgctgaaagcggagaaggtcatatcctcggttgacaccgtggtggagctaacatcacttgctgaagagcagaaaagcgctgaagaggatagcgtttctgaagggtatgagtatagcagcaatggcactgatgatgttcctgtgagggatgaggtgtcaagtatcgagcgtctaatggtaggtgacttgactgttgagggcattgagcagcttgaaccatcccgtgaaatatatgatgaagcaagcagcgataagatgtccgttgagcctcagaaagaagctgagcctgattcagacaagttgaagcaagggaagaagcaggaaatggaacgaaaggagttcaccaaggaaccactgagtgctcaaaaatcactgaagaagagatcatcccgcttcttcccggcatctttcttctcctccaaagctgatggagagtttacacctacatctgtctttcgggggttaatgaaatcagtgcaaaaacaggctcccaagcttgttgttgggatattgcttcttggtgcaggggccttcttcttaaatagagctgagaagagtcaactatttcagcagcaagaaattgccacaagtattggaaaggtaacctccacgacaaagcccatagttcgtgagatacggcaaattccacagagagtaaagaagctaatagagctcttacctcatcaagaggtaaatgaggaagaagcttcacttttcgacatactgtatttgcttcttgccagtgttatttttgtaccattatttcagaaaatccctggaggcagtcctgttcttggatatcttgctgctggtgtcctcattggtccatatgggctctccatcatccgtaatgtgcatgggacaaaggcaattgcggaattcggagtcgtgttcttactgtttaacattggacttgagctttctgtggaaaggctaagttcgatgaagaagtatgtcttcggcttgggatctgctcaggtgctagctactactgcagctgttggtgtgatagctcatcgttttgctgtgctaccaggaccagcagcaattgttgttgggagtggcttggctctgtcatccacggctgttgtcttgcaagtattgcaagagcgtggtgaaagtacgtcgcgtcatggacgtgccacattttctgtgttattgttccaggatttggctgtggtggtcctgttgatattaatacctctcatatcacctaattcttcaaaaggaggggttggtttccaagcaatagcagaagccatgggaatggctgcagtcaaagcagtagctgctataactgccataattgctggaggtcgtctgttgcttcggcctatttacaagcaaattgctgaaaatcagaatgctgagatattttcagcaaatacactccttgttatttttggcacaagtcttcttacagcccgggctgggttatcgatggcacttggagcttttttggctggtctgttactagcagaaacagagttctccttacaggttgagtcagatatagctccttatcgtggtcttctgttaggacttttctttatgacgatggaaccattttaa

SEQ ID NO: 101587 - DNA, 1888 bp, Zea Mays
gagtcgatccgcccgtacgtctctctcttgttcctctccggcttttccttcccctccgcctccgccacgccacctcccctcccctcccgccgtgcgccccgatccctcgccgccccacgccggcctcatctcgccgaggactggatcgccggggggacatcctgggtgtccttcacacacatgcggcgttaggtgatgacgagcttgcctgagaggggagaatcacctgtgccgccactcgattctctgcgccaggactctgccgtgaccgtcctagcggctgccgccgttgcctcttcctccgctggctccgatcgcaaggaagacagcggctccaggcagcccaaggcctccatcctgtccggcgtcttctctcccccttttgccatattcgaggggcagcagcagggctcctcgtcgccggcgtgcgacgccaggtcgacaaagtcgtcctcagggtcctatggtttatccaggatcctgaggaggttcgtgggcagcggctccatgtggcgacttctggggtgcggcagggtcttgacctccagtgacgtgtggttccttggtaaatgctataaggtgtcgcctgaagaagaggagtctggcgactcggagtccgacagcgggcatgctgcgtttctggaagatttctcttccaggatatggatcacttaccggaaaggctttgatgcaatatctgattccaagctaactagtgatgtgaactggggatgcatggttagaagcagtcaaatgctggttgctcaggcgctgatttttcaccaccttggaagatcttggagaaagcccccagagaagccatacaacccagattatataggggtcttacacctattcggtgattctgaagcttgtgctttctctattcacaatttacttcaagctggaaggaattatggtctggctgctggatcatggttgggtccatatgctatgtgccgggcatggcagacccttattcgcacaaatagagagcaagctgatgctgtagatgggaaggaaaatttccctatggcgctgtatgtggtttcgggtgatgaagatggcgaaagaggtggagctccagttgtttgcattgatgttgctgctcagctttgctctgatttcaacaaaggaccatctacatggtcacctattcttttgttagttcctctggttcttggccttgacaaaattaacccaaggtacatcccattactaaaggagacatttatgttcccacaaagcttgggcattttaggtggaaaacctggtacatcaacatacattgctggggtacaggatgatagggctctctacctagatccccatgaagttcagatgacggttgacattgcactggataacttggaggcagacacttcctcataccactgcagcgttgtccgagccttagctctggaacaaatagatccctccctggctattggtttttactgtcgtgacaaagacgactttgatgatttctgttctcgggcctctgagttggcggagaaggccaatggcgcgccactctttactgttgtgcagtcaatcgagccatcgaaacaaatgtataaacaggatgatggactgggttgttctggcagtagcatggccaatgacgacgaccttgatggctctggtgaagcagaagagtggcagatcctttagacgaggctaagacatgttgggctgaagaaaaaaaaacttgcattgaaaatgttgtctgaatgccctcgtctgcgtgtgaatagaggggattatttgtgtgatctcggggtggaaatgttcagaacatacactcgtagtcgtggatgataataattaaatgtatttattattccatattctaacatcgttttaccacggcgtggttgtttctcaa

SEQ ID NO: 101588 - DNA, 1864 bp, Zea Mays
ttgccagattgccatgaagcttctcgccatgtttcgtgctactgctagacatcctgggtgtccttcacacacatgcggcgttaggtgatgacgagcttgcctgagaggggagaatcacctgtgccgccactcgattctctgcgccaggactctgccgtgaccgtcctagcggctgccgccgttgcctcttcctccgctggctccgatcgcaaggaagacagcggctccaggcagcccaaggcctccatcctgtccggcgtcttctctcccccttttgccatattcgaggggcagcagcagggctcctcgtcgccggcgtgcgacgccaggtcgacaaagtcgtcctcagggtcctatggtttatccaggatcctgaggaggttcgtgggcagcggctccatgtggcgacttctggggtgcggcagggtcttgacctccagtgacgtgtggttccttggtaaatgctataaggtgtcgcctgaagaagaggagtctggcgactcggagtccgacagcgggcatgctgcgtttctggaagatttctcttccaggatatggatcacttaccggaaaggctttgatgcaatatctgattccaagctaactagtgatgtgaactggggatgcatggttagaagcagtcaaatgctggttgctcaggcgctgatttttcaccaccttggaagatcttggagaaagcccccagagaagccatacaacccagattatataggggtcttacacctattcggtgattctgaagcttgtgctttctctattcacaatttacttcaagctggaaggaattatggtctggctgctggatcatggttgggtccatatgctatgtgccgggcatggcagacccttattcgcacaaatagagagcaagctgatgctgtagatgggaaggaaaatttccctatggcgctgtatgtggtttcgggtgatgaagatggcgaaagaggtggagctccagttgtttgcattgatgttgctgctcagctttgctctgatttcaacaaaggaccatctacatggtcacctattcttttgttagttcctctggttcttggccttgacaaaattaacccaaggtacatcccattactaaaggagacatttatgttcccacaaagcttgggcattttaggtggaaaacctggtacatcaacatacattgctggggtacaggatgatagggctctctacctagatccccatgaagttcagatgacggttgacattgcactggataacttggaggcagacacttcctcataccactgcagcgttgtccgagccttagctctggaacaaatagatccctccctggctattggtttttactgtcgtgacaaagacgactttgatgatttctgttctcgggcctctgagttggcggagaaggccaatggcgcgccactctttactgttgtgcagtcaatcgagccatcgaaacaaatgtataaacaggatgatggactgggttgttctggcagtagcatggccaatgacgacgaccttgatggctctggtgaagcagaagagtggcagatcctttagacgaggctaagacatgttgggctgaagaaaaaaaaacttgcattgaaaatgttgtctgaatgccctcgtctgcgtgtgaatagaggggattatttgtgtgatctcggggtggaaatgttcagaacatacactcgtagtcgtggatgataataattaaatgtatttattattccatattctaacatcgttttaccacggcgtggttgtttctcaattgttggctacagttgcacctgccaaaaagtttgtggtgttggtatgttacatttgcaatgccaacatatcgctgtttgatgtg

SEQ ID NO: 101589 - DNA, 2001 bp, Zea Mays
gcaaccagcaggccattctctcgccgtctcatcacaactagcgccactctagtagtaagtactaagtagtagtagtaggtggcagcagccaatcttgccacgatgacactctgcaccgtcttgctccagatcctccttccaacgctgctcttggtttctgccatcacaggcgcggacgctagcggcatcggcgtcaactacggcacgcggggcacgacgctcccggcgccggccgacgtggcgcggttcctggcccgggacaccatcttcgaccgcgtgaggctgttggacgccgacccggtcctgctgcgggccttcgccggcacgggcctcgccgtggacgtgacggtgcccaacggcgtcgtcccgcacctgctgaatctgaccttcgcgcggcgctgggtgcgcgacaacgtgacgccctacgcgggcgccaccaatatctcgcgcctcctggtcggcgacgaggtgaccaccgaggccaaccggacgctgctgctggcgctggtgccggccatgcagaacctgcacaccgcgctggtcgccgcgtccctgcacggccgggtgaaggtctccaccacgcactcgctcggggtgctcaccaccacggagcagccgtcggcggcgcggttccgcgacggctacgacgcggccatcgtgaggccgctgctcaggttcctccgcgcgaccggcgcgccgttcatggtgaacgcgtacccgttctacgcgctcgccaacgacagcagcctcgacttcgcgctgttccgggtgaacgacggcgtcatggaccagggcaccgggctggtgtacggcaacatgctggacgcgcagctcgacgccgtgcactcggccgtcaggcggatgggcttcggggacgtcgacatcgccgtgtcggagaccgggtggccatcggccggggaggactgggaggtcggcgtcggcgcggacctcgcccgggactacaacagcaacgccatccgccacctcggctccggcgtcggcacgccgctcatgcccaaccgcaccttcgaggtctccatcttctccctcttcgacgagaacctcaagccagggccggtgtcggagaggaatttcggcttgttccgcggcgacatgacgccggtctacgacgtcggcatcttcactgatccggagacccttgagccggtgagagcgaaggtgacgagccggaaatggtgcgtgccggagccggcggcggacgagatggtgctgcaggagaacatcgacttcgcgtgcggccaaaagggcgtcgactgtaccgcgatccggccgggcggcgtctgctacgagccggacacggtgcaggcccacgcggcgtacgccatgaacctctacttccaggccaatggccagcatgcctttgactgcgattttggacagacaggcattgttaccacagctgatcccagttatggaggctgcaaattcatgtgaacaaggcataggggatgtttgttttgaggaatcactctattgaaatttagatggtacatcatgagtccatttctcaaatttgttgggatgattatattacttatattaatactaactaactatgaaaaatgagatagtgatagataaactcattttatttcatcaaaccaaacaccctaatagtactccactatcttacaataagctcgttacccccttttttttgccttttatgtatgatttgaagtgtactagatcgtggggcgccccttcgggcgccctatccagtatacatgctatattcaaattaagtagaggatgattgaatctctaacaaaaccttttagttctagatagactgaatataacccacattaaagttgcagcaccacatctaaacgcgtaccacacctagacacataccacacctaatgttgcgcaccctttcaaccatttaaaaaacgattgaatagcaacaattacatgaagatctagaaaaacaaagatgattaccatatacagtaagatataagacaacagacaacc

SEQ ID NO: 101590 - DNA, 1405 bp, Zea Mays
cgctcctagaatcctagggtccgcttctgcgtcaccgatcggtagtaagcacagtctcccacaccccaactccaacacagagtcaccgcaccgccgcgtctaggtcaccgccatggccggggactggcaggagctgggccaagcggcggccatcggcctcctcttcgccttcctggtcgccaagctcatctccaccgtgatcgccttcaaggaggacaacctccgcatcacgcgctcccctccgacctcccccactgccgccgccgccgcagccgcgcctcccgtcccctcccactacggctccaccgacggaggcagcggcagcgacagcgactgggagggcgtggagagcaccgagctcgatgaggagttcagcgccgcctccgccttcatcgcggcctccgccgcctccggcaccagcgtccccgaggaagcgcagctgcgcctctacggcctctacaagatcgccaccgaggggccctgcaccgcgccccagccgtccgcgctcaagctcaaggcccgtgccaaatggaatgcttggcataagctgggtgctatgcctacagaagaagctatgcaagggtacatcacaattgttcaggacctattccctaactgggatgcaggtgcaagtgcgaaaaggaaagatgaagatagcattgcttccgcatcagcttcaaaggggcccatgggacctgtgtttagcagtttaatgtatgaggaagacgaaggaaatgaatcagaacttggtgacatccatgtttcagcaagggaaggggcgactgatgacatagtgaagcttctggcagctggtgttgaggtcaacgtgagagataccgaaggtagaagtccgttgcactgggctgttgatcgtggccatcttagtgctgtcgaggttcttgcaaatgcaaatgcagatctgaatgctaaggacaatgaagggcaaacggcactccactatgctgctgtttgtgaaagagaagacattgcagagttgcttgtcaagcatcatgctgatcttcggatcaaggacgaggacgggaacacggcacatgacttgtgcccttcgagctggtcttttatgaaccaggcaaactgataacacgaatatacggatatgcttgaaggtgtcatctgccaagaaacatgctagctgtatcctaaagcccatacggcacatatggtgtatcttagtgtcatgtgtgacgtgtgggaaatcaggcaggttgtttgcgtacgtggtgccctctctgaaatcagatgagttgttttatcgtcctcatcgaaccagttgtcaaaggatagtattagtgttgggaagatacatgtattgctttaatcaaaagaatcatgctggacaccaatgcaagcccaaatgggaagaaaaggatgtgcggacatataa

SEQ ID NO: 101591 - DNA, 1431 bp, Zea Mays
ctcaacactccttcgtggggcgtgctcgctcctagaatcctagggtccgcttctgcgtcaccgatcggtagtaagcacagtctcccacaccccaactccaacacagagtcaccgcaccgccgcgtctaggtcaccgccatggccggggactggcaggagctgggccaagcggcggccatcggcctcctcttcgccttcctggtcgccaagctcatctccaccgtgatcgccttcaaggaggacaacctccgcatcacgcgctcccctccgacctcccccactgccgccgccgccgcagccgcgcctcccgtcccctcccactacggctccaccgacggaggcagcggcagcgacagcgactgggagggcgtggagagcaccgagctcgatgaggagttcagcgccgcctccgccttcatcgcggcctccgccgcctccggcaccagcgtccccgaggaagcgcagctgcgcctctacggcctctacaagatcgccaccgaggggccctgcaccgcgccccagccgtccgcgctcaagctcaaggcccgtgccaaatggaatgcttggcataagctgggtgctatgcctacagaagaagctatgcaagggtacatcacaattgttcaggacctattccctaactgggatgcaggtgcaagtgcgaaaaggaaagatgaagatagcattgcttccgcatcagcttcaaaggggcccatgggacctgtgtttagcagtttaatgtatgaggaagacgaaggaaatgaatcagaacttggtgacatccatgtttcagcaagggaaggggcgactgatgacatagtgaagcttctggcagctggtgttgaggtcaacgtgagagataccgaaggtagaagtccgttgcactgggctgttgatcgtggccatcttagtgctgtcgaggttcttgcaaatgcaaatgcagatctgaatgctaaggacaatgaagggcaaacggcactccactatgctgctgtttgtgaaagagaagacattgcagagttgcttgtcaagcatcatgctgatcttcggatcaaggacgaggacgggaacacggcacatgacttgtgcccttcgagctggtcttttatgaaccaggcaaactgataacacgaatatacggatatgcttgaaggtgtcatctgccaagaaacatgctagctgtatcctaaagcccatacggcacatatggtgtatcttagtgtcatgtgtgacgtgtgggaaatcaggcaggttgtttgcgtacgtggtgccctctctgaaatcagatgagttgttttatcgtcctcatcgaaccagttgtcaaaggatagtattagtgttgggaagatacatgtattgctttaatcaaaagaatcatgctggacaccaatgcaagcccaaatgggaagaaaaggatgtgcggacatataa

SEQ ID NO: 101592 - DNA, 659 bp, Zea Mays
aggtcgcagtggcgcagtgagtgcactagtacgctacgcacctttccttcgtgtaataactccagctacttcctgtctagtgtctccgtcgaccgtcgctgccagccagccacagcaagctccgcacgaccgccggtccgccgcctaccagagcgagctcatctctcagccgcgccggggggcctcctcgtcacgccggcgcagcccgcgcttcgttccaccgtagtttgcccggccgtgctggggcaaaaaaaggtccgggcccacgtgttcccagacggagcgagaggacgtcgatcggtcaggccatcagggaccagaccagacaaagccaaaggggccgcggatcggtaggcggccggcgcggatcggaggaagaagggaggaggaggccatccagttggagtacttggagaggtagcaggacgacgatgcttggaggccgtcccctcttcgtgctcttcggctcctccatcgtgcagtacagcttcagcaacggcggatggggcgccgcgcttgccgacatttacgcccgcaaggctgatgtcctgctaagaggatatattggctggaacacaaggcgggctgttcaagtgatggacaaagtgttccctaaggtatatatggtccgaatctctaattttgtttgtatctctatt

SEQ ID NO: 101593 - DNA, 2706 bp, Zea Mays
cctgctgcccctcgctgttcgctgcctcccctccactctccactgttcactcccagtccccaccagcaccaggcacagatcactcgcttccccactcgctcacgccaaaaccaccgcgccgaatccgaatcgagtcgagcacgagcgagcaagcaaggagctagcgcacgcatctaggctaggcgagagcaccaaaggaggcgccgcgggtggcggcggaatgggagggcccctcggcgcgatcatcggccgctacccgtcggcggccggcggcgacgagcagctgggaggcggcgccggaggcggcattatacgccacgaccgcaggtgccgcgacatcgccgttctcgtgctcttcgccgccttctgggtcgccatgattgtcaactccagcttcggcttcaaccagggcaacccgctcaggctgacttatgaactggactacaaagggaacgtttgtggcgataagcatggcaacccaaatttgcaggagctggatgttagatactggatgaatccgaatcaagtctaccaaagtggactcaagaacagcaaggttaacctggctgatgccaaagccatctgcctgatggagtgcccaaatccagctgtagatggattgaactatatttgtgattatccagaagggaacatagacctctctgttgatgattggatcaatagggactatgactattatgagtttctcacaccagacatgaagaatagctcacttcaactccagggtccatgctaccctataatatttccaactgtaaatgtctattggagctgccaatttattgcacgtgcatccaatgtttctttgaagcactggcatgagacgggtggtgtcagcattgatgaaaatatcctcattgataaaacagtgcacaaggccatcgattctagatctgctgtattaaagagatatattgcagacattgggaagtcctggcctgtgttcatcgtttgtggtggaattctccctgttttcctgtcagttatctggttgcttatgattcgttatttcgttgctgccatgacttggattacagtagtcctcttcaatgcccttgttatatctgtaacgatgttcttttacatcaaagctggctggataggcaatgaccccttaactgttgtcattggtgaaagtgatccatatgttcacataagtggacgggaaataagtcaccttcatactattacaatcctaatgacagcagtaatgatcattgctttcctgtcctcaatagctattgtccgccgtatactgatagcaacacctgtcttaaaggttgctgcaaaggtcattggtgaagttcaggcactgatagcttttccacttttgccgtgcctgatcctttctatcttgtatatgttctggttttctgctacactccatctcttcagctctggtcaagttgtccgaaatgattgcaatactgattgttgttcatatgatctgaagctgggaaaagtaaattgtgacaactgctgtgggtacagcatccattacacccctcatatcagcattgccattctatttcacttatttggttgctactgggcgactcaattcattctcgcatgctcttcaactgtggttgcgggatcagttgcttcatactactgggcgcgtggtgaaatatcacatgatataccatttctcactgtagtctcttcactgaagcgactgatgcgctacagccttggatctgttgctctgggttcacttgttgtatctgttgttgaatgggtgcggtttatactagaatgccttcgtcgcaagttgaagctagttgattctgcccgagagagctgctttggaaaagcgacgtcctcctcttctgaatgctgcctgggttgcatagactggaccctcaagtcagtaaatcgaaatgcctacattatgattgccatcaccgggaaaggtttcttcaaagcttcagtgctcgcaactggattaataatgaagaacattctgcgcatcggaaaagtcaacgtcattggagatgtcatcctcttcctgggaaaactctgtgtgagcctattctgtgcgcttttcgcctttctgatgttagacacccacaagtacaagtccgcacacaacaagatatcctctccagttatccctgtcctggtaacatgggccctcggctacgtagtcgcgaagcttttctttgcggtggttgagatgtcgatcgacaccataatcctctcgttctgccaggacgccgaggagcaccaggggaacgcgcagtatgcgcccccagctctgatggaaactctggacgaacagggcgaactgcagagactaactcaagggccttgactgtcttttcctcttggtagtagcatggaaacttagcggcagcctaatgttttgttaccccgttccgttctcttggcttgtgaagaggtttgccatttttgcttgctattccatgtacaagtctgaatctgacatgttctcctggcccaattggcatgtgtaggcagcttatctatatatgtgtgcagtgtgctattgctgatacggcgttggtgaaatactccctccgtttccaacttccaacatcataaatttaaccaaatttatatagtaaaacaatagcatttatgatacctaaataactattattggattcttcattagttagctatttgatgtcatagatctttgtgtgtgtgttttttttt

SEQ ID NO: 101594 - DNA, 1220 bp, Zea Mays
attaagctgtgtccagcgcgccttagagagaatccatgtctataccagcgtctgcacatcgtgtgggtttttaaatcatcgaatctcttccgacgtcttcgtttcgtcgaagccgagcgagtcgtgttttataatggcaaaaatctctatccaaagagagccttgaaaaaaacacctccagaatttgctctttattatttgcagtataataaaacacctccccaatttgctccgcaccgaccagctgactgcgtgcgaaccgaatagcgcgccgccgccgctccctctccacctctattttctgcccctcgcctcccccataccggggcccggtaaccagcatccctcggcagccgctgccgaccgatccgtgtccgtgcgagacgcgggagggattggcgccggaggctgaccgggatgttctccggcgactggacgccgccgtgcggcagctgctgcaccaagaaatacgcgagcctcgtgcagatcccatggagggtgttctgcaagaaggggtgcaacgcggacggcgacacctgggacgagtgcataggaaaatgtactgaaatatgctacaaagatccggtgttagaagatcgccagtggagcgcttacattgaccgatctccagggcaggatagttactctttggaatgcttcaatgcttgtgtgtctggctgtggattcagatttgacatcccaacggagaaggtcgaagaaatcaagcccaataggccatccaaaccatcagctcctgaacctgaagtgaaacaaactaggaatgcagattgtaatgaagatgtgccgtgcacgtcagcctagtttgagtgttggcgtgcctcaaattttgtaaagccaatgtgtttctccgttgtatttctactcgtcctattttcccatggaaaactcacgggaaactttatctagcttagctctagtttggaaactcaaatcccttcgtggatgaaaggggtttgagggacaaattagtttatttttatcttaatcccttccaatccccgggtgatttgagtttacaaactagcctttagagtaaagatttaccacattggcaatgaaagatgatggcctgggaactaggtgaagatttactgcattggtggtgataagtgagcctgaccctgatgagtatagtaattcgacgatgtaatgtgcataagtaacggggtcttgagtttatattccatgcatcacatatt

SEQ ID NO: 101595 - DNA, 776 bp, Zea Mays
tgtattttcatgctgaagggaccgatgtggtattaaacttttttggtgttgattcgcaacaacaaccatagctgttgagatttttcaagagaatactaatcaagttcatgttgtaaattattgtttgtgttgcatattgtatgtgacataccgacaagtttctttattcaatgtttttgacaaagtcagtttttcgtgcaggaatgcttcaatgcttgtgtgtctggctgtggattcagagtatgttaaatattcgaaggcaccatatcttttatgtgtgctgcatcttggagctcttttatatgtgctgcatctatactgatcactatgttcccactatccatgagaaatctaactagtcatattctattgttgtgtggcagtttgacatcccaacggagaaggtcgaagaaatcaagcccaataggccatccaaaccatcagctcctgaacctgaagtgaaacaaactaggaatgcagattgtaatgaagatgtgccgtgcacgtcagcctagtttgagtgttggcgtgcctcaaattttgtaaagccaatgtgtttctccgttgtatttctactcgtcctattttcccatggaaaactcacgggaaactttatctagcttagctctagtttggaaactcaaatcccttcgtggatgaaaggggtttgagggacaaattagtttatttttatcttaatcccttccaatccccgggtgatttgagtttacaaactagcctttagagtaaagatttaccacattggcaatgaaaga

SEQ ID NO: 101596 - DNA, 600 bp, Zea Mays
atggcgaggcggcagctgtgccggaccaagcgtaccaaccgtccccgtcggccgtcgggaactccccacccccgcattttctccgcgttttgtcaacgtcacgcctcgcccgccgtcctttcctctcccactcccacccccaccccgctatctcccactctttctctgcacggcggggctccactcgtccgccactccaccgcttctacaagatcctacaccacgtcaaaccagacccagccgcggagaaagctagctgtagctacctacccggtccggtctccgcttctcccgcacgcgcagcctgctgcatcctccttcctgcgaccgcccgcttcgttcgcggaacataaaggtcttgctccggtcagccacggcggcatcggcatcggcatggcggggcggatggtgcggagctgcgtgcagacggcgctcaaggcggccaactccgtcgtggggctcgccggcatggccgtcatcctctacgcgctctggatgctccgcgcatggtacagggagatcgccggcctcggccaacgccccccggccccctggtcagcaaccgcttcccccctcatcctccttccagcctaccagtag

SEQ ID NO: 101597 - DNA, 276 bp, Zea Mays
atgctggtcgtcgtccgtcgaggactagcgctgccgaaaagcatgcgacatcagctgaccggaagcaaacgcgggggcgagctggcgacctgttgctgcctgctggggaacgacggcgacctgctgctgtctgctggggaacggcggtgtcgggatgctgcctgctggtgcggccgacggtgcactcgagatgcctgcagattggaattggatcgatggatggaccgcggacgcccgcacgccgattggatctcctcctccttgggcggctgctaa

SEQ ID NO: 101598 - DNA, 821 bp, Zea Mays
caggttcatctacacatttcttggcctggggatctttctctgcatactgacttgctctgggcatattgctgctgaaactgcaaatggtcactgcctctactgttacatgaccatcgtatttatgcttattatactggaaggcgcaatcactttggatgtatttctgaatagcaactgggaagagggtttccctcctgacccatcaggcaagtttggggatttcaagcactttgtgagatccaattccgagatatgtgaatgggtaggcctctcagtggtggctgctcaggtgctatcaatcgttcttgggatggtgctcaggacccttgggcctgaccgtgagaccgactatgacagtgaagacgacacagccgtgcccgcaaggctgcctctcctgagaaaccagtcccagcatggatcttgggactacgctgaagctaccacgtctcgtcagggacttccgttattacattctaaatgtgttcagcgttaataaaagccttgcgacgttccattgcaggtgaagaacaacagacccttcaggatggtcatagattatatctttttcttcttcttatatggagagagtattcctatgttagaatagcagaagcagcagcagcagcagcggtagagtagttctgaaacctggacgccaatcagcatgctcagatatttgagtagcatgtgaactgacccttataaccccgcatactggggaaggaagagatgaggtcacgattggtgccttcactgaccaaagacagagatgtttgttctttcccttgttgtttatccatcagctgcaccatccattttaa

SEQ ID NO: 101599 - DNA, 1572 bp, Zea Mays
cctctcctccccctcccccacccccttatcgccaccatgctctccctctcccacccccacccccaccccgccgcgtccaccaccgcgccgcgccaccagcgcactgctcccgtgtggcaccgccgtcgcgccagccacatcgccgcgagcgccatcctgcttccgggaggcggcagcaccggcggcaggggcgggcccggcgaccgcaggctccccttcaccccgccccctatggcgccgccgggccagctctaccagccgttccacccgccgccgtcccctctcccgcccagcctccgcaacctcgacctcagcgagcgcctccagatcctccgcgaccggatgggcctgtggcacgagtacgcgcccctcatctcctcgctctcccgggacggcttcaacccgtcttccatccaggaggccacgggcatctccggcgtggagcagaactgcctggtcgtcgcgtcccaggtccgcgactcgctcctcgacgaccgggccgccgcgttcccgcccgacctgcttccctacttcgactccttgggtgggcccgaggtcctgtacgagctccgcttcctgaacgcgcggcagcgcgccgacgccgccaggcacgccatcggctacaggctcgagcccaagggcgtgcgggagcttgcgcgcgccatgaagggcttcccgcgctggcgcggggaggaaggctgggaggccttctcgaaggactcccccgccgactgcctcgccttcgcgcggttccggcagtcgcgggaggccatcgacgtgcaggaccgcgtcgcggagctggagcgcgcgctgcaggtggtggagaccgagtccggcagggcgcgcgtggagctcgagttggagcgcgccaggaggaaggcggccggggaggaggaggtggacgaggagggcgaggaggacgacgctgccgcctcgctgcggcccggcgtcacggtggtgcggctccgctacggcgaggtcgccgaggcgaccaccgtcatcctgctgccggtggtgagggagacggacggcgtcgcggccatggagtcggcgcccaggcgggctaagacggacgtgggccttggcgtcgtggaggtggacagggcgtgggcgcgctgggccgtggtgcccggatggggccccgtggccgaggcagcggacgacgccgtcgtcgtagagctggccgacgggcggaggctgccgtggcggatgagcgacgaggagccggtgctggtcatcgccaaccggagcaagaaggaggtagtggaggagggggtatacgtcctcgagagggaaggccggcttgtggtggagagggggaagaagctggctgagcagggcatagctgctgcggcggccgaggtggtcatcgtggtccggccgcccaaggacgaggacgacatggttagcgacgaggagtgggactgatgactgatctggagagcgttttggttgtggagatgccaatttgtcttttctccatagggtaccggtggtaaagcttttccccctctctttaccaatttgtcgcgtcgctgaataagaatttgccaccctacttttgttgttgca

SEQ ID NO: 101600 - DNA, 3206 bp, Zea Mays
cgctcggctccgcctccgctggtaggtcacatcacactcgcttcaatattgacaccaccaacgcacgcacgacccttcttcctcctcccggcggctaggctgatttctccttgcatcgcctttattgcgctcagctgctctgccaagtgccaacgtcgtacacctccagcagtggagggagccggagcacgagcaacaccaaggtgtccgccacagaaatctacatataattgcagccccaaccacctcgttcctcttccccttcccccctccccagccaaatccgctttcctagctctaatcgccgccgatctcgccggaggaactgctagctagctgctcccttcacttctcaggagccaggattaaaagttgcctcaaagaagaagatccctctgcgccgctgcatgttgagcgagcctaccgtagcgacgagcgcggatatgaattggtgttgtgttcctagggccaacaagagagaagagaacccttactccaacagcatcggcggcatctactccgagaagaacataaggctgttctcctatgccgagttaagatctgctaccgacaacttcaaccgcaccaacaaagtgggacgaggcggattcgggacagtttataagggaaccatccgaagcgggcgagaggtcgcggtgaaggtcctctccgccgagtccaggcagggcatcagggagttcctgacggagatcgacgtcatcagcaacgtcaagcaccccaacctcgtcgaactcatcggctgctgcgtcgagggaagcaaccggattctggtgtatgagtacctcaagaacagcagccttgaccgtgcgctgctggcttctaacagtgagcctgccgacttcacctggagcgtcaggtctgctatatgcctcggagtcgctcggggccttgcgtacctgcacgaggagatcgcggcgccgatcgtgcacagagacatcaaggccagcaacatacttctcgacaggaactacgtccccaagatcggggatttcggtctggccaagctgtttcctgacaatgtcacccacatcagcacccgcgtcgcgggaacaacaggctaccttgcgcctgagtacgcctggcatggccagctcaccaagaaagcggacatctacagctttggtgtccttgtcctggagatagtgagcggcactagtagctccaggagcatactcatggatgacaagattctcctagagaaggcatgggagctgtacgaagcgaagaggctcaaggaactggtggatccagcccttgtagactgccctgacgaagaagccatcaggtacatcatggtggccctcttctgcctacaggcggccgccgcgcgccggccgacgatgccccaggtcgtcaccatgctgtccaagcccgtccggatcaacgagagcgagctgacggcgccggggtacctccaggagtacagcaggcggagccccttgtccaaggccaccacttccaccgactccaggttcaagaacctggcgtcccaggaggactccaacatgttcagcacggtggtgccacccacggtgaccgagatgagccccaggtgaagcaaccgccatgtaattttgactaattccttccttgcgttttgtcaaccggcggcgactatatgatgtagtgccaagtgtgttttcctcctgcaaatgcggcagctagatcttgtacatatagattagtgaatccatgccagacccagagcaatgcaagattgctgtttgttgcacagcttcagattattattagggcagtaccatatcatcgtaacagtttcagacctcaacttgtatgagatcacaggcatctcagtgacgacacaactggacaggggtgaaaacagcaaagatacgactactgtggtgatactaaattatgaatgttctgtgctcatacgaagacatcctgatgcagatctctgcaaaagatcagtacgggataaacgggtctgcgaaatcatcagaaacaaaaacacgtttccatctactgacagtcaagcctcttgtgtttctgtaatgctacgctttcctttccggtcactccgacgccgcaggctgctctttctcggcctccgaggggccattggcggtgctggtttcttggctctctgcaggctgcttggcgtcgtttgctggggctgccgcgccgtctttggcaccaccatcctttccaccttctttggagccatcctttgcgccctctttagcagcaggtgctggtggaggttgcaacatatgtggcggtggagcgtgcttcagcttcactaagatatggcgcatccgggagaggtcggtgggcttgccaggcttggggccctgaataactgtgacggatggcttcttgtccttgtctttctttccccgcttctcaatggtggctatttcatgcgggatgagatccgagatcgatttccagtactgcttgtctgcgttggcatggaatttctcctggctggctacaaaaatctgcagcagaccacaggagcgattagtaccaaacatagaaatagattagctaataaacacagagccctagctgcttacatatgataggcgcataccttctccctttctctgttgttgaccatattcgacgcacagttctgtatcctcttctcaaaaaaagctttcttgaattcttctgcttcagcaattatttgggcacgtagctccttctccttctgttcttttttctcaagttccatagcatttttcctaagacattgttgaaaaaggaagcaataacaaattaaaactagagtggcaggaaaaaaaatcaaggaagccaagaaaatgacatcattcgatttgagggacacaaaagacaggacagtaacttggtctgtacccttacaatagttacaggctccttacaaattgaccttactggactttccacaagataagcattaaacaaatcagaatcaacgccactccaaatatagacaaatctactactgctgcaagcctgggacaatgtcctgatgaagaacatcataccaaacacggcttacacaactccaatattcatgaacttctattagttaactaccaaagtaaattccgaagtaaatatagacgtgcactaaaccataaaataaacgaggttgtatcagcagacaattgcgtcatagtctcatagagcatattatgttaggaacctaatgcacacattttgcaagg

SEQ ID NO: 101601 - DNA, 3291 bp, Zea Mays
cgctcggctccgcctccgctggtaggtcacatcacactcgcttcaatattgacaccaccaacgcacgcacgacccttcttcctcctcccggcggctaggctgatttctccttgcatcgcctttattgcgctcagctgctctgccaagtgccaacgtcgtacacctccagcagtggagggagccggagcacgagcaacaccaaggtgtccgccacagaaatctacatataattgcagccccaaccacctcgttcctcttccccttcccccctccccagccaaatccgctttcctagctctaatcgccgccgatctcgccggaggaactgctagctagctgctcccttcacttctcaggagccaggattaaaagttgcctcaaagaagaagatccctctgcgccgctgcatgttgagcgagcctaccgtagcgacgagcgcggatatgaattggtgttgtgttcctagggccaacaagagagaagagaacccttactccaacagcatcggcggcatctactccgagaagaacataaggctgttctcctatgccgagttaagatctgctaccgacaacttcaaccgcaccaacaaagtgggacgaggcggattcgggacagtttataagggaaccatccgaagcgggcgagaggtcgcggtgaaggtcctctccgccgagtccaggcagggcatcagggagttcctgacggagatcgacgtcatcagcaacgtcaagcaccccaacctcgtcgaactcatcggctgctgcgtcgagggaagcaaccggattctggtgtatgagtacctcaagaacagcagccttgaccgtgcgctgctgggtacgagccaccactagctgtttacccaaacccatacccatacccatacctacctacctgatccatcagttgcggcgttctgcagcttctaacagtgagcctgccgacttcacctggagcgtcaggtctgctatatgcctcggagtcgctcggggccttgcgtacctgcacgaggagatcgcggcgccgatcgtgcacagagacatcaaggccagcaacatacttctcgacaggaactacgtccccaagatcggggatttcggtctggccaagctgtttcctgacaatgtcacccacatcagcacccgcgtcgcgggaacaacaggctaccttgcgcctgagtacgcctggcatggccagctcaccaagaaagcggacatctacagctttggtgtccttgtcctggagatagtgagcggcactagtagctccaggagcatactcatggatgacaagattctcctagagaaggcatgggagctgtacgaagcgaagaggctcaaggaactggtggatccagcccttgtagactgccctgacgaagaagccatcaggtacatcatggtggccctcttctgcctacaggcggccgccgcgcgccggccgacgatgccccaggtcgtcaccatgctgtccaagcccgtccggatcaacgagagcgagctgacggcgccggggtacctccaggagtacagcaggcggagccccttgtccaaggccaccacttccaccgactccaggttcaagaacctggcgtcccaggaggactccaacatgttcagcacggtggtgccacccacggtgaccgagatgagccccaggtgaagcaaccgccatgtaattttgactaattccttccttgcgttttgtcaaccggcggcgactatatgatgtagtgccaagtgtgttttcctcctgcaaatgcggcagctagatcttgtacatatagattagtgaatccatgccagacccagagcaatgcaagattgctgtttgttgcacagcttcagattattattagggcagtaccatatcatcgtaacagtttcagacctcaacttgtatgagatcacaggcatctcagtgacgacacaactggacaggggtgaaaacagcaaagatacgactactgtggtgatactaaattatgaatgttctgtgctcatacgaagacatcctgatgcagatctctgcaaaagatcagtacgggataaacgggtctgcgaaatcatcagaaacaaaaacacgtttccatctactgacagtcaagcctcttgtgtttctgtaatgctacgctttcctttccggtcactccgacgccgcaggctgctctttctcggcctccgaggggccattggcggtgctggtttcttggctctctgcaggctgcttggcgtcgtttgctggggctgccgcgccgtctttggcaccaccatcctttccaccttctttggagccatcctttgcgccctctttagcagcaggtgctggtggaggttgcaacatatgtggcggtggagcgtgcttcagcttcactaagatatggcgcatccgggagaggtcggtgggcttgccaggcttggggccctgaataactgtgacggatggcttcttgtccttgtctttctttccccgcttctcaatggtggctatttcatgcgggatgagatccgagatcgatttccagtactgcttgtctgcgttggcatggaatttctcctggctggctacaaaaatctgcagcagaccacaggagcgattagtaccaaacatagaaatagattagctaataaacacagagccctagctgcttacatatgataggcgcataccttctccctttctctgttgttgaccatattcgacgcacagttctgtatcctcttctcaaaaaaagctttcttgaattcttctgcttcagcaattatttgggcacgtagctccttctccttctgttcttttttctcaagttccatagcatttttcctaagacattgttgaaaaaggaagcaataacaaattaaaactagagtggcaggaaaaaaaatcaaggaagccaagaaaatgacatcattcgatttgagggacacaaaagacaggacagtaacttggtctgtacccttacaatagttacaggctccttacaaattgaccttactggactttccacaagataagcattaaacaaatcagaatcaacgccactccaaatatagacaaatctactactgctgcaagcctgggacaatgtcctgatgaagaacatcataccaaacacggcttacacaactccaatattcatgaacttctattagttaactaccaaagtaaattccgaagtaaatatagacgtgcactaaaccataaaataaacgaggttgtatcagcagacaattgcgtcatagtctcatagagcatattatgttaggaacctaatgcacacattttgcaagg

SEQ ID NO: 101602 - DNA, 5408 bp, Zea Mays
cgctcggctccgcctccgctggtaggtcacatcacactcgcttcaatattgacaccaccaacgcacgcacgacccttcttcctcctcccggcggctaggctgatttctccttgcatcgcctttattgcgctcagctgctctgccaagtgccaacgtcgtacacctccagcagtggagggagccggagcacgagcaacaccaaggtgtccgccacagaaatctacatataattgcagccccaaccacctcgttcctcttccccttcccccctccccagccaaatccgctttcctagctctaatcgccgccgatctcgccggaggaactgctagctagctgctcccttcacttctcaggagccaggattaaaagttgcctcaaagaagaagatccctctgcgccgctgcatgttgagcgagcctaccgtagcgacgagcgcggatatgaattggtgttgtgttcctagggccaacaagagagaagagaacccttactccaacagcatcggcggcatctactccgagaagaacataaggctgttctcctatgccgagttaagatctgctaccgacaacttcaaccgcaccaacaaagtgggacgaggcggattcgggacagtttataagggaaccatccgaagcgggcgagaggtcgcggtgaaggtcctctccgccgagtccaggcagggcatcagggagttcctgacggagatcgacgtcatcagcaacgtcaagcaccccaacctcgtcgaactcatcggctgctgcgtcgagggaagcaaccggattctggtgtatgagtacctcaagaacagcagccttgaccgtgcgctgctggcttctaacagtgagcctgccgacttcacctggagcgtcaggtctgctatatgcctcggagtcgctcggggccttgcgtacctgcacgaggagatcgcggcgccgatcgtgcacagagacatcaaggccagcaacatacttctcgacaggaactacgtccccaagatcggggatttcggtctggccaagctgtttcctgacaatgtcacccacatcagcacccgcgtcgcgggaacaacaggctaccttgcgcctgagtacgcctggcatggccagctcaccaagaaagcggacatctacagctttggtgtccttgtcctggagatagtgagcggcactagtagctccaggagcatactcatggatgacaagattctcctagagaaggcatgggagctgtacgaagcgaagaggctcaaggaactggtggatccagcccttgtagactgccctgacgaagaagccatcaggtacatcatggtggccctcttctgcctacaggcggccgccgcgcgccggccgacgatgccccaggtcgtcaccatgctgtccaagcccgtccggatcaacgagagcgagctgacggcgccggggtacctccaggagtacagcaggcggagccccttgtccaaggccaccacttccaccgactccaggttcaagaacctggcgtcccaggaggactccaacatgttcagcacggtggtgccacccacggtgaccgagatgagccccaggtgaagcaaccgccatgtaattttgactaattccttccttgcgttttgtcaaccggcggcgactatatgatgtagtgccaagtgtgttttcctcctgcaaatgcggcagctagatcttgtacatatagattagtgaatccatgccagacccagagcaatgcaagattgctgtttgttgcacagcttcagattattattagggcagtaccatatcatcgtaacagtttcagacctcaacttgtatgagatcacaggcatctcagtgacgacacaactggacaggggtgaaaacagcaaagatacgactactgtggtgatactaaattatgaatgttctgtgctcatacgaagacatcctgatgcagatctctgcaaaagatcagtacgggataaacgggtctgcgaaatcatcagaaacaaaaacacgtttccatctactgacagtcaagcctcttgtgtttctgtaatgctacgctttcctttccggtcactccgacgccgcaggctgctctttctcggcctccgaggggccattggcggtgctggtttcttggctctctgcaggctgcttggcgtcgtttgctggggctgccgcgccgtctttggcaccaccatcctttccaccttctttggagccatcctttgcgccctctttagcagcaggtgctggtggaggttgcaacatatgtggcggtggagcgtgcttcagcttcactaagatatggcgcatccgggagaggtcggtgggcttgccaggcttggggccctgaataactgtgacggatggcttcttgtccttgtctttctttccccgcttctcaatggtggctatttcatgcgggatgagatccgagatcgatttccagtactgcttgtctgcgttggcatggaatttctcctggctggctacaaaaatctgcagcagaccacaggagcgattagtaccaaacatagaaatagattagctaataaacacagagccctagctgcttacatatgataggcgcataccttctccctttctctgttgttgaccatattcgacgcacagttctgtatcctcttctcaaaaaaagctttcttgaattcttctgcttcagcaattatttgggcacgtagctccttctccttctgttcttttttctcaagttccatagcatttttcctaagacattgttgaaaaaggaagcaataacaaattaaaactagagtggcaggaaaaaaaatcaaggaagccaagaaaatgacatcattcgatttgagggacacaaaagacaggacagtaacttggtctgtacccttacaatagttacaggctccttacaaattgaccttactggactttccacaagataagcattaaacaaatcagaatcaacgccactccaaatatagacaaatctactactgctgcaagcctgggacaatgtcctgatgaagaacatcataccaaacacggcttacacaactccaatattcatgaacttctattagttaactaccaaagtaaattccgaagtaaatatagacgtgcactaaaccataaaataaacgaggttgtatcagcagacaattgcgtcatagtctcatagagcatattatgttaggaacctaatgcacacattttgcaaggttacaaagacgagcagtaccaaaagaatgtatggattttctctgggaggtacaccttcactgatttgaggatttcaagaaaaccagcagatatgaaaatctaaaaaaaatgtgtccacctggtgtgatgtcagcaaaacatacagttggaagaatgcagcaccagatgaagcattaagtggtcgcaaaagaacaatggtgaataactaactagttatatccacatacatagatagctaagacatcctacaatcaaggttttccagaaatgcatcaaacaccaggaagagaacaaacatacatgaggactgtaagtttgcaaaaaaaaacatcggttttctagagtacaaggtaatccaacaaagaacattctccaactaatatgacgtttttggaagcctctatgattgcatggcacaaattcatattttagaaggttggtttgacatactttttacctttattcctctagtttctgtgggacttagttcatacaatttcgatacaatatgataataggctgtataggtaagattgggacagatacaatctaggtaaaatgcaatagctaaggcagggttagttctgaattatgtcatgctagcttagtctgaattttactttctattgagtagcaaaccaaatctagatgtatatgcctatgtttattagaaacattactaggttgtaggttccttttggttcgagtataacaaaaaataaaattgagcaatacgcagttccattctaaccaaatctagttaagagataaaacacaaatttccaatgaaaatctgtcagtgtttaatactctgaatgacaagtcgttttgccttttctagattcatagtttttactaagggggtgtttgaatgcactaaatctaatagttagtggctaaaattagttgtagacatccaaacaccctagctaatagttcaactattagctatttttagtaaactagttaatagttagctagctatttgttagctagctaattccactagcaattttttagccaactaagggtgtgtttgaatgtactagaactaatagttagttggctaaaaaattgttagtggaattagctagctaactattaactaatttactaaaaatagctaatagctatggtgtttgaatgtttccagctaattttagctactaactattagctctagtgcattcaaacacccccctaattattagctctagtgcattcaaacaccccctaactattaggtctagtgtattcaaacaccccctaagtactatctagacacagtgtatacaggtgcatagcaaaaggtacctaaaaaggcaaaaacgacttataattcaggacggagtacctctgaattgcttcaataaactaatttcaggggtaaaattcacaaaacaactttaagtgctgggaccataggtgtcaagcggtcaaggaaaattactacacactgctgcatctagctacttatattcgtatttttcatattttatggtaatctgcatacagtagctccataccatcctattcatggcagtgatagtatggcaaaaacagagatactagcagatccaactatggttacacctatatggtatcaacgattcaaacacttaggctgatttggtgattatggatcccgagtggatccatggggagaaattctcttgctattcaataaccttgcaattcaattttgaatagcaagagaatttctccccatggatccactcgggatccccggtcaccaaatcagcccttatggagaacaaaacccaccctcgaaggtctgcagctatacttaagttctcagcttataaactagtccatgactggctattcccaacagcgcaatttctagtgtatcctaattcctaaccaaccgaagtaatagaaaccagcaatttccgtacagagcccctcgccgtgtttcgttcaccttcgtagtgcagaagaagcggctacagttagtcgaaagagcgccagaaagcgttagatctgactcgaacagcccgaaacctagcccacacgcaagcaagcatacaggcagcaaaacggcgtgtcccccaagcagatcggaaccggcgccggcggtcctcacctccgccactcgcggagaaggattccctcctcccgccccatctcggtgggcggcggcagggtcgggccgtcgctgccgttgggctcgaggtcggg

SEQ ID NO: 101603 - DNA, 5672 bp, Zea Mays
cgctcggctccgcctccgctggtaggtcacatcacactcgcttcaatattgacaccaccaacgcacgcacgacccttcttcctcctcccggcggctaggctgatttctccttgcatcgcctttattgcgctcagctgctctgccaagtgccaacgtcgtacacctccagcagtggagggagccggagcacgagcaacaccaaggtgtccgccacagaaatctacatataattgcagccccaaccacctcgttcctcttccccttcccccctccccagccaaatccgctttcctagctctaatcgccgccgatctcgccggaggaactgctagctagctgctcccttcacttctcaggtactagcccgtcttgctcgccatatttcccttctctctctttctgtccaccaaaccaacccagccctaagatctgttccagccttcctgctggggatgtttgtgttcgtaccctctacaatcgggtattaagttggaccggctgcaaagcatgtccaaccacaacttcagttactgcagcagcagatttccgcgacactcacacacatcagttcctgatatgcctgccccctttacttttttcacaattactgcatgcatcaggagccaggattaaaagttgcctcaaagaagaagatccctctgcgccgctgcatgttgagcgagcctaccgtagcgacgagcgcggatatgaattggtgttgtgttcctagggccaacaagagagaagagaacccttactccaacagcatcggcggcatctactccgagaagaacataaggctgttctcctatgccgagttaagatctgctaccgacaacttcaaccgcaccaacaaagtgggacgaggcggattcgggacagtttataagggaaccatccgaagcgggcgagaggtcgcggtgaaggtcctctccgccgagtccaggcagggcatcagggagttcctgacggagatcgacgtcatcagcaacgtcaagcaccccaacctcgtcgaactcatcggctgctgcgtcgagggaagcaaccggattctggtgtatgagtacctcaagaacagcagccttgaccgtgcgctgctggcttctaacagtgagcctgccgacttcacctggagcgtcaggtctgctatatgcctcggagtcgctcggggccttgcgtacctgcacgaggagatcgcggcgccgatcgtgcacagagacatcaaggccagcaacatacttctcgacaggaactacgtccccaagatcggggatttcggtctggccaagctgtttcctgacaatgtcacccacatcagcacccgcgtcgcgggaacaacaggctaccttgcgcctgagtacgcctggcatggccagctcaccaagaaagcggacatctacagctttggtgtccttgtcctggagatagtgagcggcactagtagctccaggagcatactcatggatgacaagattctcctagagaaggcatgggagctgtacgaagcgaagaggctcaaggaactggtggatccagcccttgtagactgccctgacgaagaagccatcaggtacatcatggtggccctcttctgcctacaggcggccgccgcgcgccggccgacgatgccccaggtcgtcaccatgctgtccaagcccgtccggatcaacgagagcgagctgacggcgccggggtacctccaggagtacagcaggcggagccccttgtccaaggccaccacttccaccgactccaggttcaagaacctggcgtcccaggaggactccaacatgttcagcacggtggtgccacccacggtgaccgagatgagccccaggtgaagcaaccgccatgtaattttgactaattccttccttgcgttttgtcaaccggcggcgactatatgatgtagtgccaagtgtgttttcctcctgcaaatgcggcagctagatcttgtacatatagattagtgaatccatgccagacccagagcaatgcaagattgctgtttgttgcacagcttcagattattattagggcagtaccatatcatcgtaacagtttcagacctcaacttgtatgagatcacaggcatctcagtgacgacacaactggacaggggtgaaaacagcaaagatacgactactgtggtgatactaaattatgaatgttctgtgctcatacgaagacatcctgatgcagatctctgcaaaagatcagtacgggataaacgggtctgcgaaatcatcagaaacaaaaacacgtttccatctactgacagtcaagcctcttgtgtttctgtaatgctacgctttcctttccggtcactccgacgccgcaggctgctctttctcggcctccgaggggccattggcggtgctggtttcttggctctctgcaggctgcttggcgtcgtttgctggggctgccgcgccgtctttggcaccaccatcctttccaccttctttggagccatcctttgcgccctctttagcagcaggtgctggtggaggttgcaacatatgtggcggtggagcgtgcttcagcttcactaagatatggcgcatccgggagaggtcggtgggcttgccaggcttggggccctgaataactgtgacggatggcttcttgtccttgtctttctttccccgcttctcaatggtggctatttcatgcgggatgagatccgagatcgatttccagtactgcttgtctgcgttggcatggaatttctcctggctggctacaaaaatctgcagcagaccacaggagcgattagtaccaaacatagaaatagattagctaataaacacagagccctagctgcttacatatgataggcgcataccttctccctttctctgttgttgaccatattcgacgcacagttctgtatcctcttctcaaaaaaagctttcttgaattcttctgcttcagcaattatttgggcacgtagctccttctccttctgttcttttttctcaagttccatagcatttttcctaagacattgttgaaaaaggaagcaataacaaattaaaactagagtggcaggaaaaaaaatcaaggaagccaagaaaatgacatcattcgatttgagggacacaaaagacaggacagtaacttggtctgtacccttacaatagttacaggctccttacaaattgaccttactggactttccacaagataagcattaaacaaatcagaatcaacgccactccaaatatagacaaatctactactgctgcaagcctgggacaatgtcctgatgaagaacatcataccaaacacggcttacacaactccaatattcatgaacttctattagttaactaccaaagtaaattccgaagtaaatatagacgtgcactaaaccataaaataaacgaggttgtatcagcagacaattgcgtcatagtctcatagagcatattatgttaggaacctaatgcacacattttgcaaggttacaaagacgagcagtaccaaaagaatgtatggattttctctgggaggtacaccttcactgatttgaggatttcaagaaaaccagcagatatgaaaatctaaaaaaaatgtgtccacctggtgtgatgtcagcaaaacatacagttggaagaatgcagcaccagatgaagcattaagtggtcgcaaaagaacaatggtgaataactaactagttatatccacatacatagatagctaagacatcctacaatcaaggttttccagaaatgcatcaaacaccaggaagagaacaaacatacatgaggactgtaagtttgcaaaaaaaaacatcggttttctagagtacaaggtaatccaacaaagaacattctccaactaatatgacgtttttggaagcctctatgattgcatggcacaaattcatattttagaaggttggtttgacatactttttacctttattcctctagtttctgtgggacttagttcatacaatttcgatacaatatgataataggctgtataggtaagattgggacagatacaatctaggtaaaatgcaatagctaaggcagggttagttctgaattatgtcatgctagcttagtctgaattttactttctattgagtagcaaaccaaatctagatgtatatgcctatgtttattagaaacattactaggttgtaggttccttttggttcgagtataacaaaaaataaaattgagcaatacgcagttccattctaaccaaatctagttaagagataaaacacaaatttccaatgaaaatctgtcagtgtttaatactctgaatgacaagtcgttttgccttttctagattcatagtttttactaagggggtgtttgaatgcactaaatctaatagttagtggctaaaattagttgtagacatccaaacaccctagctaatagttcaactattagctatttttagtaaactagttaatagttagctagctatttgttagctagctaattccactagcaattttttagccaactaagggtgtgtttgaatgtactagaactaatagttagttggctaaaaaattgttagtggaattagctagctaactattaactaatttactaaaaatagctaatagctatggtgtttgaatgtttccagctaattttagctactaactattagctctagtgcattcaaacacccccctaattattagctctagtgcattcaaacaccccctaactattaggtctagtgtattcaaacaccccctaagtactatctagacacagtgtatacaggtgcatagcaaaaggtacctaaaaaggcaaaaacgacttataattcaggacggagtacctctgaattgcttcaataaactaatttcaggggtaaaattcacaaaacaactttaagtgctgggaccataggtgtcaagcggtcaaggaaaattactacacactgctgcatctagctacttatattcgtatttttcatattttatggtaatctgcatacagtagctccataccatcctattcatggcagtgatagtatggcaaaaacagagatactagcagatccaactatggttacacctatatggtatcaacgattcaaacacttaggctgatttggtgattatggatcccgagtggatccatggggagaaattctcttgctattcaataaccttgcaattcaattttgaatagcaagagaatttctccccatggatccactcgggatccccggtcaccaaatcagcccttatggagaacaaaacccaccctcgaaggtctgcagctatacttaagttctcagcttataaactagtccatgactggctattcccaacagcgcaatttctagtgtatcctaattcctaaccaaccgaagtaatagaaaccagcaatttccgtacagagcccctcgccgtgtttcgttcaccttcgtagtgcagaagaagcggctacagttagtcgaaagagcgccagaaagcgttagatctgactcgaacagcccgaaacctagcccacacgcaagcaagcatacaggcagcaaaacggcgtgtcccccaagcagatcggaaccggcgccggcggtcctcacctccgccactcgcggagaaggattccctcctcccgccccatctcggtgggcggcggcagggtcgggccgtcgctgccgttgggctcgaggtcggg

SEQ ID NO: 101604 - DNA, 3447 bp, Zea Mays
aggtcacatcacactcgcttcaatattgacaccaccaacgcacgcacgacccttcttcctcctcccggcggctaggctgatttctccttgcatcgcctttattgcgctcagctgctctgccaagtgccaacgtcgtacacctccagcagtggagggagccggagcacgagcaacaccaaggtgtccgccacagaaatctacatataattgcagccccaaccacctcgttcctcttccccttcccccctccccagccaaatccgctttcctagctctaatcgccgccgatctcgccggaggaactgctagctagctgctcccttcacttctcaggtactagcccgtcttgctcgccatatttcccttctctctctttctgtccaccaaaccaacccagccctaagatctgttccagccttcctgctggggatgtttgtgttcgtaccctctacaatcgggtattaagttggaccggctgcaaagcatgtccaaccacaacttcagttactgcagcagcagatttccgcgacactcacacacatcagttcctgatatgcctgccccctttacttttttcacaattactgcatgcatcaggagccaggattaaaagttgcctcaaagaagaagatccctctgcgccgctgcatgttgagcgagcctaccgtagcgacgagcgcggatatgaattggtgttgtgttcctagggccaacaagagagaagagaacccttactccaacagcatcggcggcatctactccgagaagaacataaggctgttctcctatgccgagttaagatctgctaccgacaacttcaaccgcaccaacaaagtgggacgaggcggattcgggacagtttataagggaaccatccgaagcgggcgagaggtcgcggtgaaggtcctctccgccgagtccaggcagggcatcagggagttcctgacggagatcgacgtcatcagcaacgtcaagcaccccaacctcgtcgaactcatcggctgctgcgtcgagggaagcaaccggattctggtgtatgagtacctcaagaacagcagccttgaccgtgcgctgctggcttctaacagtgagcctgccgacttcacctggagcgtcaggtctgctatatgcctcggagtcgctcggggccttgcgtacctgcacgaggagatcgcggcgccgatcgtgcacagagacatcaaggccagcaacatacttctcgacaggaactacgtccccaagatcggggatttcggtctggccaagctgtttcctgacaatgtcacccacatcagcacccgcgtcgcgggaacaacaggctaccttgcgcctgagtacgcctggcatggccagctcaccaagaaagcggacatctacagctttggtgtccttgtcctggagatagtgagcggcactagtagctccaggagcatactcatggatgacaagattctcctagagaaggcatgggagctgtacgaagcgaagaggctcaaggaactggtggatccagcccttgtagactgccctgacgaagaagccatcaggtacatcatggtggccctcttctgcctacaggcggccgccgcgcgccggccgacgatgccccaggtcgtcaccatgctgtccaagcccgtccggatcaacgagagcgagctgacggcgccggggtacctccaggagtacagcaggcggagccccttgtccaaggccaccacttccaccgactccaggttcaagaacctggcgtcccaggaggactccaacatgttcagcacggtggtgccacccacggtgaccgagatgagccccaggtgaagcaaccgccatgtaattttgactaattccttccttgcgttttgtcaaccggcggcgactatatgatgtagtgccaagtgtgttttcctcctgcaaatgcggcagctagatcttgtacatatagattagtgaatccatgccagacccagagcaatgcaagattgctgtttgttgcacagcttcagattattattagggcagtaccatatcatcgtaacagtttcagacctcaacttgtatgagatcacaggcatctcagtgacgacacaactggacaggggtgaaaacagcaaagatacgactactgtggtgatactaaattatgaatgttctgtgctcatacgaagacatcctgatgcagatctctgcaaaagatcagtacgggataaacgggtctgcgaaatcatcagaaacaaaaacacgtttccatctactgacagtcaagcctcttgtgtttctgtaatgctacgctttcctttccggtcactccgacgccgcaggctgctctttctcggcctccgaggggccattggcggtgctggtttcttggctctctgcaggctgcttggcgtcgtttgctggggctgccgcgccgtctttggcaccaccatcctttccaccttctttggagccatcctttgcgccctctttagcagcaggtgctggtggaggttgcaacatatgtggcggtggagcgtgcttcagcttcactaagatatggcgcatccgggagaggtcggtgggcttgccaggcttggggccctgaataactgtgacggatggcttcttgtccttgtctttctttccccgcttctcaatggtggctatttcatgcgggatgagatccgagatcgatttccagtactgcttgtctgcgttggcatggaatttctcctggctggctacaaaaatctgcagcagaccacaggagcgattagtaccaaacatagaaatagattagctaataaacacagagccctagctgcttacatatgataggcgcataccttctccctttctctgttgttgaccatattcgacgcacagttctgtatcctcttctcaaaaaaagctttcttgaattcttctgcttcagcaattatttgggcacgtagctccttctccttctgttcttttttctcaagttccatagcatttttcctaagacattgttgaaaaaggaagcaataacaaattaaaactagagtggcaggaaaaaaaatcaaggaagccaagaaaatgacatcattcgatttgagggacacaaaagacaggacagtaacttggtctgtacccttacaatagttacaggctccttacaaattgaccttactggactttccacaagataagcattaaacaaatcagaatcaacgccactccaaatatagacaaatctactactgctgcaagcctgggacaatgtcctgatgaagaacatcataccaaacacggcttacacaactccaatattcatgaacttctattagttaactaccaaagtaaattccgaagtaaatatagacgtgcactaaaccataaaataaacgaggttgtatcagcagacaattgcgtcatagtctcatagagcatattatgttaggaacctaatgcacacattttgcaagg

SEQ ID NO: 101605 - DNA, 3263 bp, Zea Mays
aggtcacatcacactcgcttcaatattgacaccaccaacgcacgcacgacccttcttcctcctcccggcggctaggctgatttctccttgcatcgcctttattgcgctcagctgctctgccaagtgccaacgtcgtacacctccagcagtggagggagccggagcacgagcaacaccaaggtgtccgccacagaaatctacatataattgcagccccaaccacctcgttcctcttccccttcccccctccccagccaaatccgctttcctagctctaatcgccgccgatctcgccggaggaactgctagctagctgctcccttcacttctcaggagccaggattaaaagttgcctcaaagaagaagatccctctgcgccgctgcatgttgagcgagcctaccgtagcgacgagcgcggatatgaattggtgttgtgttcctagggccaacaagagagaagagaacccttactccaacagcatcggcggcatctactccgagaagaacataaggctgttctcctatgccgagttaagatctgctaccgacaacttcaaccgcaccaacaaagtgggacgaggcggattcgggacagtttataaggtgccagccaaactcgatcatatctattatattgacgcccgcgcgtcacatggatcatctcttgtttgttggcgtcacagggaaccatccgaagcgggcgagaggtcgcggtgaaggtcctctccgccgagtccaggcagggcatcagggagttcctgacggagatcgacgtcatcagcaacgtcaagcaccccaacctcgtcgaactcatcggctgctgcgtcgagggaagcaaccggattctggtgtatgagtacctcaagaacagcagccttgaccgtgcgctgctggcttctaacagtgagcctgccgacttcacctggagcgtcaggtctgctatatgcctcggagtcgctcggggccttgcgtacctgcacgaggagatcgcggcgccgatcgtgcacagagacatcaaggccagcaacatacttctcgacaggaactacgtccccaagatcggggatttcggtctggccaagctgtttcctgacaatgtcacccacatcagcacccgcgtcgcgggaacaacaggctaccttgcgcctgagtacgcctggcatggccagctcaccaagaaagcggacatctacagctttggtgtccttgtcctggagatagtgagcggcactagtagctccaggagcatactcatggatgacaagattctcctagagaaggcatgggagctgtacgaagcgaagaggctcaaggaactggtggatccagcccttgtagactgccctgacgaagaagccatcaggtacatcatggtggccctcttctgcctacaggcggccgccgcgcgccggccgacgatgccccaggtcgtcaccatgctgtccaagcccgtccggatcaacgagagcgagctgacggcgccggggtacctccaggagtacagcaggcggagccccttgtccaaggccaccacttccaccgactccaggttcaagaacctggcgtcccaggaggactccaacatgttcagcacggtggtgccacccacggtgaccgagatgagccccaggtgaagcaaccgccatgtaattttgactaattccttccttgcgttttgtcaaccggcggcgactatatgatgtagtgccaagtgtgttttcctcctgcaaatgcggcagctagatcttgtacatatagattagtgaatccatgccagacccagagcaatgcaagattgctgtttgttgcacagcttcagattattattagggcagtaccatatcatcgtaacagtttcagacctcaacttgtatgagatcacaggcatctcagtgacgacacaactggacaggggtgaaaacagcaaagatacgactactgtggtgatactaaattatgaatgttctgtgctcatacgaagacatcctgatgcagatctctgcaaaagatcagtacgggataaacgggtctgcgaaatcatcagaaacaaaaacacgtttccatctactgacagtcaagcctcttgtgtttctgtaatgctacgctttcctttccggtcactccgacgccgcaggctgctctttctcggcctccgaggggccattggcggtgctggtttcttggctctctgcaggctgcttggcgtcgtttgctggggctgccgcgccgtctttggcaccaccatcctttccaccttctttggagccatcctttgcgccctctttagcagcaggtgctggtggaggttgcaacatatgtggcggtggagcgtgcttcagcttcactaagatatggcgcatccgggagaggtcggtgggcttgccaggcttggggccctgaataactgtgacggatggcttcttgtccttgtctttctttccccgcttctcaatggtggctatttcatgcgggatgagatccgagatcgatttccagtactgcttgtctgcgttggcatggaatttctcctggctggctacaaaaatctgcagcagaccacaggagcgattagtaccaaacatagaaatagattagctaataaacacagagccctagctgcttacatatgataggcgcataccttctccctttctctgttgttgaccatattcgacgcacagttctgtatcctcttctcaaaaaaagctttcttgaattcttctgcttcagcaattatttgggcacgtagctccttctccttctgttcttttttctcaagttccatagcatttttcctaagacattgttgaaaaaggaagcaataacaaattaaaactagagtggcaggaaaaaaaatcaaggaagccaagaaaatgacatcattcgatttgagggacacaaaagacaggacagtaacttggtctgtacccttacaatagttacaggctccttacaaattgaccttactggactttccacaagataagcattaaacaaatcagaatcaacgccactccaaatatagacaaatctactactgctgcaagcctgggacaatgtcctgatgaagaacatcataccaaacacggcttacacaactccaatattcatgaacttctattagttaactaccaaagtaaattccgaagtaaatatagacgtgcactaaaccataaaataaacgaggttgtatcagcagacaattgcgtcatagtctcatagagcatattatgttaggaacctaatgcacacattttgcaagg

SEQ ID NO: 101606 - DNA, 2604 bp, Zea Mays
aacagataatccggaagatacatgtgccagatgtgtcgatcacagggatagtaaagctctcgaactgggtgtaaagagatgataacatgtctgattttgaggagccctttaaaatttctgggatgtggcaatgctccatttgcacgcatgaaaatactacatatagttcatcttgtgagctatgtggtgtgcttcatgatctctcactgtatttcaatgatatcagtgaagacgaagatggagctaaatgcagacacaagtattctggagtatccatccttgcaagatctctttttacaccacctagtgcaaagtcaaaggctattgttttctctcatgatttcaaagacagaagaaatacaacagggaataagcaagctacaatggatgctctacataagacattcatgactcgcaaaaagcgccacattaacatagtgcctttcaagtttgatacaccatctcctgatgacatggtcactacaggattaaaatcatccagaaactttagaaaagttgacacagaggttctagttaaggattctgttggcgtgactggaaaggagatgatgaataatgatattcttctaactgaaaagaatacaagcatggacccaagtgcattagtacagttggatgatggtggaactagtagcaatgttccttcgagtagtcaaaatataactcttgctttggaccatgagctacaacatttgagtttggagagcaaactgaagaacagtaaaacgaatgttaagaaaacagcttctgtttctcactacaagccagaaccttggatgctccagagtgaaaatcaagaaatccgtaatcagctaagtcttgccattgttggtcatgttgattctgggaaatcaactttatgtggtcgattgcgacatgctctgggattgatttcaaaaaagcaaatgcataaatatgagaaagaagctaaagaaaagggaaaagggtcatttgcatatgcctgggctatggatgagagcagtgatgagagggagcgtggcattacgatgactgtggctgtagcatactttaatagcgagaaataccgtgtggttctgcttgactcccctggtcacaaggattttgtgcctaatatgatatctggtgctacacaagctgatgccgccatcctagttgttgatgcatctatagggtcatttgaagcaggcatgggtgtcaatgggattggtcagacgaaggagcactcgcagcttgttaggagctttggtgttgagaacttgatagttgctgttaataagatggatggggtggaatattcgaaggagcggtttcagtccgttaaatcgcaactcggcgtctttcttcggtcgtgtgggtacaaggactcttcagtcacctgggttcctttgagcgcaatggccaacgaaaatttagtcacagcttgttcagacactcgacttttatcttggtacaatggaggctgtctgctgcaagccatcgactcgttacctcctccccgtcgcgacgtgtcaagtccactgcgccttccgatatgtgatgtcattgcatctcacacgctgggccaggtggctgtctgtggtaaagtcgagtctggagggatccgaactggctgtaaggtccttgtcatgccttctggagacatagctacggtgaaaaccatggagcgggattcctctacctgcagcttggctagagccggggacaacgtcgccgttggtttgcacggggtggaccctggccacatcgcggcaggcggagttctctgccatccagatttcccggtgcgcgtggcgtgtcacctggagctgaaaattctggttctggaaatcaccgtgccaatactggttggccttgagtttgagctgcacatacggcacgccaagtcgtccgcgaggctggtgagaatactgtcgtccctggaccagaagaccggcagggccctgaagaaagcgccgcgtctgctcaccgcgaggcaggcggccctggtcgaggtgaggctggacagagaagcgtgcgtggaggaattctcgacgctgaaggcgctcgcgcgggtgttcctgcggtcgcagggtagcacggttgcggtgggcgtggtgactcgagtcctggaccgggctttggacatgggctagctgcattggcacgggcgcggataatttatgaacgtcacgcgcgcggggggaggcaggtaggtcggtctcctggattaatggcacccgggaccgggagggagagagagagggcctttcggcgcccaacgaacgattcaaaggcggccgacacgagtttcgtccacgcacccccacggttcaaagggaggatccgcccgggacggacgggtcaaaggcccgcgactgcaatgaattcaatgaatctggggctgtaagccggccgttggcttgttgcaatctgtccctatttttcttccatccaatccaagggcgcaccgacaggcacactgcgtagttagtgccccttgtgctgaccgtccgaccgcggctgaggaggggggtgtgcggtggcatgtgttgaatgagctgtggtttctgccgtattagtctagtatctatatagcgactcgtttgccggattacccactaa

SEQ ID NO: 101607 - DNA, 3207 bp, Zea Mays
atggagaaaagcaagttgaaaaaggttagagaatacagacttggaaaatgctatcataacaaaacgggagaggagtttgtggcgcactcgtccaatgttaactgcctcaagattgggaggaagacctcgcgggttcttgtcacaggaggagaggaccataaggtcaatctttgggctattgggaagcccaattcaatactgagcttatcaggtcacacaagtgctgtggagtcggttggttttgattccacggaagtgtttgtggctgcaggagcagccagtggaacaataaagctatgggatttggaggaggcaaagattgtccgcactcttactggacatagatcaaactgcatgtcagttgattttcatccgtttggggaattctttgcctctgggtcactggacactaatctgaagatatgggatataagaaggaagaattgcatccatacatacaaaggtcacacacgaggggtgaacactattagatttacacccgatgggcggtgggttgtgtctggtggcgaagataatatagtaaagctctgggatctgacagctggaaagttattacatgaattcaagtgtcatgagggtcagatccagtgcatagatttccacccccacgagttccttctggcaacaggttcagctgataaaactgtcaaattctgggatttggagacatttgaattgattggatctacaggacctgagacaacaggtgtccgatccatgacattcaatcctgatggaagatctttgttatgtgggctgcacgaaagcttaaaggttttctcttgggagccaataagatgccatgatactgtggacgtgggatggtctagacttgccgatttgaatgtccatgagggaaaacttcttggttgttctttcaatcaaagttgtgttggaatatgggttgttgatctgacgcgtcttgagccatatacaatgggtacttcaacaaaagtaaatggtcattctgaattgaagactgtttctagcggcactttgcctttacaaaatgatagtggttcaagggctaacatagggcgatcatcagtcttgcaaaatacagagaacaaccttaaaactacttcaggaagactgtcggcttcacagaactcagattctgcacccaaagaaactaactcggcaccttcaagcgggttgatcccaagcacaccacatagggctggagttggctcccataatagatctgttggaaattcagcttttcaatctggtggtaccaccttgaagagaagttcgttgaggaataacagtgcctctaatgttcacaatttcagtaaagctgatgtagtgcctgtcattgttcccagaactagctcaggaggggagttggctactgattctagaagcgatgctgctgatgtggcacccgttcttccgaaggtaaccagaagggttgaacctgctaccgattctagaaaagaaagtaatgatgtggaacttgttgttcctagagcaagctcaagaatggaaatagccgatttagcacccatttctagttccaagtcaggcagaaggttggagtctgcccctgattcgaaagaagaaagtgctgatacagcacctgttgttgtttccaatcccagggctaatgtaagaatggaaatagtctctgattctgcgcccgctctttcaaagtcaaacagaaagctagattctggcactaactcaaagaaagaaagtgctgatgcagtcattgtacccagaacaaattctagaatggaaatgatttctgattctaggagagaaccctctgctggaagaatatcaccattcagaatccagtcaagatatgctgagccacggaagctagcccatgccagaactgattcaaacaaagttgatagcagaagtaaaattactgaaacagaagacttcaattgccaaatatttcttccccgtagaaacagtgtttttcaaacaataagttctgaagaacctcgtgaagatgtaaagtgtggtccagttgacaggatgttcctagaatgcgcaaaccaggagacaactgctatatcgaagtttcaagagcagagaggaagcaatcaagcttctgaagctccaatcatagctagtgatgaagatgttctatctcttatcatggagcgacatgatctatttttaagctcaactaagtctcggctgatgaaattgcagattattcatcaaatgtgggaaagaaatgacatcaggggtgtgctctctgcgatggacaggatgggtgatcatgctgtctgtgctgatatggctagcgttctcatggagaaaagtgaaacaatcacactagatttatgtacctctatcctgcctgtcgtcaccgatcttctggagagcaaaattgacagacacttagtcgtcgcattggaattgttggtgaagcttgtaaggacttttggtccaatgatacattcaacagtatcgtcaggtccttgtgttggtgtagaccttgaggcagagcaaaggagggagcgctgcaacttatgcttcatcgaattggagaaggccaaaaataagcttccatctctaacaagaagaaaaggggcggttgcaaatgctgcacaagaacttgctcttgtcttccaggaaatcatgagttgactgacgacacactagatatacacaattagatgggacatgcttcggcctctgatggcaacaagattggatatcagctgccatggagggtgctagctattcagtcttagcgacgtcatcaagctccaaggccacagcaccaacaaatgcattttgttgctgctgttcgtgccttttgtacacatgctaacacataatccatgtcatttgtgaagagaagctgccatggacagtgacttcatccacaatattatgtggatggcggcagctggagatgttaggccccgatcgaatggtgatcagcagatgagacttgcttgggcttttctggcactcgtagttctttgctgtctgtaacatctttctcatgtaccgttatcatgtgcatgtgcaacagtcaagtggttgcatttggtagtttatggttgtgctgtgtgttggtcgatttagtggtcgttgatgagtgaagcgagccatgtacatcatttttttttaagatttgatatcttctttttccttgatgactcctctcgttatacttgagtgaaaatgatatcttgtgtacttgccttgaca

SEQ ID NO: 101608 - DNA, 2138 bp, Zea Mays
cgccttccatctccggccggtctccgctcgtcgtcctcgcccagcccagagacgcccacggaatcgcaattccccactcccaccccccttctcctttctataaagggaaacttcgccaccaaatctcgaatcccatctcgctgctctccgccgctcgacgccgacgccgacgccgacacctctccctcccccattccccgtgccccggaccgcggagcagacagaggcgagatccggagcgccgcgcgatggcgaacatcgacatggcgaagatcctggcggacctggaccgcggcgccggcgacgcgcggctgcccaagaccaagctcgtctgcacgcttggcccggcctcccgctccgtgcccatgctcgagaagctgctccgcgccggcatgaacgtcgcgcgcttcaacttctcccacggcacccaccagtaccaccaggagacgctcgacagcctccgccaggccatgcacaacaccggcatcctctgcgccgtcatgctcgacaccaagggtcctgagattcgtacagggtttttgaaggatggtaaaccaattaagctaaccaagggtcaagagatcactgttaccactgattatgatatcaagggtgacgaaaaaatgatcgctatgagttacaagaaactgcctgttgacgtgaagcctggaaatgtcatactctgcgcagatggtactatctctctggccgttctgtcttgcgatcctgatgctggaactgtgcgttgtaggtgtgagaacactgcaatgcttggtgagagaaagaactgcaatttgccaggaattgttgtggatcttcctacattgactgagaaagataaagaagatattttgggctggggtgttccaaatgacattgacatgattgctctatcctttgtccgtaaaggatcagatttggtgactgtcagacaggttcttgggcagcatgccaagcgcattaagttgatgtcaaaggttgagaaccaagagggtgttgtaaactttgatgagatcttgagggagactgatgcttttatggttgctagaggtgatctgggaatggagattccagtcgagaagattttccttgcgcagaagatgatgatctacaagtgcaacattgctggcaaacctgttgttactgctacccagatgctcgagtcgatgatcaaatctcctcggccgacacgtgctgaggccactgacgttgcaaatgccgttcttgatggaactgactgtgtcatgctcagcggagagagtgccgctggagcctaccccgaggtggctgtgaagatcatggctcgtatttgcatcgaggcagaatcttccctggaccacgaggcagttttcaaggccatgatcaggtccgcgcctcttccaatgagccctctggagtcccttgcatcatctgctgtgaggactgccaacaaggccaaggctgcactgattgtcgtcctgactcgcggtggcaccacggccaaactggtcgccaagtaccgccccagggtccccatcctctccgttgtcgtacccgtgcttacgaccgactctttcgactggaccatcagctccgagggcccagctaggcacagcctgatctacagaggcctcattcccctcctcgccgagggctccgcgaaggctacggattcagagtcgacggaggtgatccttgaggccgcgttgaagtcggccgtgcagaagcagctctgcaagcctggtgatgccatcgtggctcttcatcgtattggcgtcgcctccgtcatcaagatctgcatcgtgaagtgatcaccacgacctggttctcactgctgggattccatgaaacagcttttctgcctcctttttactgcatttttttccggagacagatatttatgttgtaagcctgcgtctgttgtttgcagttgcggaatgttttttgttcacgtagttatttagctggtaaatggggagggagaggactccattgatgttagtggtaataagatttgtgtctatggagttgagttgaaagggttttttcatgctaagccccgagacactaggagatggagatcgaggttgagatgagataagcaataagtgaaaaaaatgttgatttgctttctttgtatgcacacgcttttgaggggt

SEQ ID NO: 101609 - DNA, 1098 bp, Zea Mays
tttatagctcaagcgatcgagtcgtgcagcggctgcttgcgttcgtgcatttttcgtacaggaccgcgcgcgccgcgggtttgagaggagcgcgtgcacacgtacgatacgagcatggcagactaccacaggatccacccagtgagcgcgggctcgccgccgccgccgtccgcgccgccggagcaggcgtcgaggagcggcaagaaacccagccacgaccagctgccggtgacagcccctgccccggcgccgccgcccccgcccccgcccccgccgtcgcggcgcaagcgcagccgctgctgccggtgcgtgtgctacaccgtcctcgccctcgttttgctcgccgttgcgctgggcgccaccgcggggatcctgtacctggtgttccggcccaagatcccgacgttccacgtggaccgcctgacggtgacccgcttcgacgtgaacggcacgtcggccacggtgaccgacgcgttcgacgtggacgtgacggccgacaacccgaaccgccgcatcgggatctactacgacggcggcgacgtgacggcgtccttcaacggcaccgtgctgtgcagcggcgccttcccggcgctgtaccagggccaccgcaccaccgtgcacccgcgcatctcgctcgcgggggagacgcggctcgacagcgccgtcgcggcgcagctgctgcagcagcgggcggccgggttcgtgccgctcaccgtgcgggcccgcgtgcccatccgcatcaagttcggcgccgtcaggctgtggacgatgacgggcaaggcaaactgcaacctggtggtggacaatatccaggcaggcacgcagctgagcatccgctccaattcctgcacttttaagcttaagatctagatgcgccttcctttgtcggccatgcatggttgttgcctccaatgactacggctacgggggtggtagtggtagaggtgtacagtacattcttttcggcacctgtatccatagcttaattgatggctgtaataaataacatccgatatgcatactattttgctatgagattatttattatataataaatattatttatataataaagcatgattttttaggccatataca

SEQ ID NO: 101610 - DNA, 332 bp, Zea Mays
atgtctcatacgctaaggattaaccactgcaccacatgcatcctaatgtttataaaaggaaggtatgaagattttaaaaatttaggcatggcaatgacatcacatcttcacaaagctcaagtcttgattttagttcgacctactgtgcgaaagcatgatagatttaccagtaagaagttcaggtacctttgttctcgttctctctagatgctttactctttaaaacatcgatattgtaccatgcaaggaaatcaagttggagaaatctcatcttaccaatcccggggcatggcacacacttgcaaatggtctccttgcccttcttcctgaag

SEQ ID NO: 101611 - DNA, 2301 bp, Zea Mays
acagctgcgtgcccacccgatcctcgcttgacaccggggaaatccacggcctgctgctacagagcatcgccgctgagcacactggggtgacagtgacaacccgtctccctctctctcgccagatccccctacctccgcgtctctctgtctactttttttttggggagggggggggggggggggggggggggggatccgcgtcgaggcgaggtctgctctggtcacctctggcgatcctccttcgcccattgcctccgccggtcaattcccttcgctggtactcagagatcggcgccctcctcccgtcttcccacgcttgcgggcactaactcagagtagtgtcgctcaatgaatttcctctaccgaactacgcagcctgcagcgactgagctgccaagaatttcagagcaagatcacaggaatgccttacaaaagacgacttcgacactggagggtctcattgcggacgattcacaccaccagccctcctctgcccacatcgaagatggagctgctaataatgggtccagggatatcagtggggattcttcatctgttgatttgaaaagcccagtcccactggggacacatgccgatgtcatggaagacgaaggatggatcacaattccatgcagtttgaggcacttcctgaaagttggaacgacatatcagaaatggttcagttgcaggctctggaccgttccttcctttttccaggttcctatactggcgtgcctgtcagcttctaagcaagatgtacaggttatatccccctttagaattgctgcagtaatgtctaagaatggaacttctatgcaaaactttacaaataaatctagccctgtcagtgcaaatggtcatgataatggagcagctggagaaagtggctatcaggatgttgaacccaatggtgaagcatctccttcaggacatgatattttggagactcaatctctccttcagatggaggatcataagcagcagatcgaacatgtgttgcgaagatttagagaatcaaatttttttgtccggattgcggaatcagtggaacctctatggtccaagaaaagtgtaacttcaactacgatggcagatgaacgatcagataaccagggaaatagtaagagctcaaggagtaatgtttataataccatttctgataaaggggtttttgatggtaacacatctgggggagttgctcgagatgttgtcaagtgttattctctgcaaaatggagacatagtggttgttttgcaagtgaatgttagcgttaacaaattggaagatcctgtgcttgaagtccttcagtttgagaaaacctcttctgttcagacaccaaataatataagaccaccaccaatatctgaaagtcaagaatttatgcctgaaaaacctgcaaaaaccccagatattataaatgatgggcaactttcgtttagaggagttcctttagaacctgaacggtattctaatattgctcctactcatgcaaaagatatagtcgtattcatcgatgcaattactattgtatttgaggaggcatccaaaggaggtgctcctttgtctttaccaattgctagtattgaggttgggcatggtcacagcttgccaaacctagcactcaggaggggcgaggaacactcttttattctcaaaccagcaactatgtcctcaagggaacggaagaccaacagtcatgcacctctggccttatcactcccaacgatgaccggtgctactttaaatactcatacaccaaaggctggtgagccgtatgctgatctaagcgaccaatatgctgtactgatactaacactcgaagctactaatatgacatccgaaaaccttacattaactgtccttgctcctgaagcatctggttcttcttcagttgtatccttgaactcatctccaaccaccccaaatggttcttttgatggtgttaatgagtcatcaaaaagatctgggctgggaaaagatggaattggctttcgaagattgaattctgtcctagctactccaaaagaaggtgataatggaggaaacagaatgagtaatgcttcaggctgtactcatctgtggttgcaaagtgcagtgcccctagggtgtgttcctgcccgctcaagcaccactgtcaaacttgagctgctaccattatcagatggaattatcacacttgatactctgcaaataaccgcaagggagaaaggccttgcttacattccggagcactccttggagatacatgccacctctgtactggaagcagaatcccagatcatggcccggattgaacggtag

SEQ ID NO: 101612 - DNA, 1456 bp, Zea Mays
atacacttctctgcagggcaagcacgaagcagctagagaaaaagaactagccatgcccaccaagcctctcctcgtcttcgttttcttcacgtccatggcggtcgtctcccatgcatcgtccctacgcttccaatacatcgaccgtcgtcacaacttcaccgccaagcaggcgagcacctcctcctcgtcgtccccgtcctctgcacacggcagccgcgaccgccgcccttcgttcgcgctagtgcgccgcgacgcagtcaccggctcgacgtacccctcgcgtcgccacgcggtgctcgacctcgtggcccgcgacaatgcgcgcgccgagtacctcgctagtcgcctgtcccccgcggcgtaccagccgacgggcttctccggctcggagtcgaaggtggtgtcgggcctcgacgagggcagcggcgagtacttcgtccgcgtcggcatcggctcgccgcccacggagcagtacctcgtggtggactccggcagcgacgtcatctgggtgcagtgcaagccgtgcctggagtgctacgcgcaggctgacccgctcttcgaccccgccacgtcggcgaccttctccgccgtgccgtgcggctcggccgtctgccggacgctgcgtacctccgggtgcggcgactccggtgggtgcgactacgaggtgtcctacggggacgggtcctacaccaagggcgcgctcgcgctggagacgctcacgctgggcggcacggcggtggagggcgtcgccattggctgcggccaccgcaaccgcggcctcttcgtcggggcggcggggctgctgggcctcggctggggccccatgtcgctggtcgggcagctcggcggcgcggccggcggcgcgttcagctactgcctcgcgagccgcggcgccgggtcgctcgtgctcggtcggagcgaggcggtgccggagggcgccgtgtgggtgccgctcgtgcggaacccgcaggcgccgagcttctactacgtcggcctgtccgggatcggcgtcggcgacgagaggctgccgctgcaggaggacctgttccagctgacggaggacggcgccggcggcgtggtgatggacacgggcacggcagtgacgcggctgccgcaggaggcgtacgcggcgctgcgggacgcgttcgtggccgcagtgggcgcgctcccgcgagcgccgggcgtgtcgctgctggacacgtgctacgacctcagcgggtacacgagcgtgcgcgtgcccaccgtgtccttctacttcgacggcgccgccacgctgacgctgccggcgaggaacctgctgctggaggtggacggcggcatatattgcctagcttttgcgccgtcgtcgtcgggcccgtccatcttgggaaacatacagcaggaagggatccagatcaccgtcgactcggccaacggatacattggctttggacccaccacctgctagatcaaatct

SEQ ID NO: 101613 - DNA, 1536 bp, Zea Mays
ggctccaaccatccaatccaacaccaacacacgctgccatgccatgaaatatccccgcagttaaacagctcagttcagctgatacctcgccggcagatccccctcctgctcatccgccttcctttctcgaagcgcccaatttattaccttcccctaatcccgcagccttgccagaagccaaattggtgctcctcttatctcgccgcgccgccaccgctccatttccgctcccccagcccccccaaaagaacctcgtaaccctactcgcgggattccgcaggccgccgcttgcttagggttcatcactcctgttcacacccgatggccgtggacgaggcgagcagcagtggcggtggggaggaggggtgcgggtcgtggacccgcgagcaggagaaggcgttcgagaacgcggtggcgacgatgggcggggaggaggacggggacgcgaggtgggagaagctagcggaggccgtcgaggggaagacgccggaggaggtcaggcggcactacgagctgctggtggaggacgtcgacggcatcgagtcgggccgcgtcccgcttccggcgtacgcggctgacggcgctgccgaggaagggggcggtggcgggaagaagggaagtggcggaggagggacccatggggacaaggggtcggcgaagtccgccgagcaggagcgtaggaagggcatcgcctggacagaggacgagcacagattgttcctccttggacttgaaaagtatggcaaaggtgactggcggagcatctcgcggaactttgtgatctcaaggacgccgactcaagtagctagtcatgcacagaagtactttatccgtctgaactcaatgaacagagaaaggcggcgatcaagtatacatgacatcaccagtgtgaacaatggagatccatcaactgcacagggtccaatcacaggccaaacaaatggtcaggctgcaaatcctggaaaaccatctaagcaatccccgcagccagcgaatacacctccaggcgtcgatgcttatggcacaacaattggacagccagttggtggcccccttgtctcagctgttggaactcccgttacactacctgtttccgctccacctcatctggcctatggcatgcgtgccccggttccaggagccgtagtacctggtgctccagtaaacattgctccgatgccctatccaatgccacccccaccatctcatgggtgacagggtgagggacacatttcaaatgctgtgtagcgtctaaacaaacccataatctccccctatgccagcattttgcgggtgtgctgctatgtctcaataaagcaatgccaataaacccttgtacattacaaactgttgttacatgttgcattgaggacattgcagattgtgtactttgtgttgcatgcaaacttttcatgtacatctccaaaatccaagtgtttctcgttatggcagcttgtacttcagtcagtacctgtgatatgtaaatgtgtaccagctggaacaagagtaagatactgtcgcctgtttctcatgtcc

SEQ ID NO: 101614 - DNA, 1752 bp, Zea Mays
tcttcaagggcacagccgcggccaccaccaacaccacctggccccgtccttcctttcttgtgttgccgctaggccagccatacacacacgacgtcgctgctccgcatggccaacgccaatggctcgtccaccggtgcaggccatagcgacctcgtcagggccatttcgcacgagcagcaccaggcgttcatggcctccgtgccccgggccgcaccgggcggggtgaatgtgcaccaccagcagcacttccaccaataccccgccggcttgatcccagcgccggtggcactgccggttcacgcaccggtgtcgtcacagacgtctccgtactccgcccagatcgcggtgccgccgccgccgccaccactcatcgcatctccagaccaccgcctgcactccctgccgcctaccggatgctaccagctggactattctccatatggcaacgctgctgcgccttcgcagcagcacacatcagcaataaggggttttgctgactggggaacgcacagcaatgcgctcatgtccttggctcatgccactagttttggtaacaacgggagcagcaatatcaacaacaatggattattacatcaaaacttatccccgtacaccacgcatacatggactactacttacgtgcagaggccttataacactgctgtttatgctcctgcaacaatgaatatgctccaaactcctccatttcatagcaacagccatgaaaaagagtcaggtgcagttttttcaaatagctttaacatggccccatcagtgacacctacctccccttttcaacttatgtctccaagctcaaccaactacacttccactcaaatcttcgaggaaaccaacaatttagaggacacttcaagagtctttggaggtggggataacgaaagcaacaacagtgaggaaccggatcccaagccggctgtggagatggaagacctaaaccaaggcaatgatcatacttcgaataaaacagctaactgtcaagattaccgtatggtcctgcgcaaggacttgacaaacagtgatgttggaaacattggaagaatcgtgctgccaaagaaagatgcagagcctaaccttccaatcttggaagataaggatggcctgatactggaaatggacgattttgaactcccggttgtatggaatttcaagtacaggtactggcctaataacaagagtaggatgtatatattggaaagtactggtgaatttgttaagaggcatgggcttcaagctaaggacatcctcatcatttacaggaacaagaaatctggcagatatgttgcccgtgcggtgaaggctgaggacatagcgccgccagaatgcgagtgcgtcgaggcaggaaaccctagagaagagtgcggcttctccgtcagtccttcgatcaataagaagatcatcacgtagatggctggagcatcagaaatgtatggtgtaggctgtttgccgcgcaggagcacaccgagaatcggcggttgctgggagccaagcaactgtttcgatcgaggttgtgtcgtcaaagctgaattcccacccaacctgcgtaggcctgtactatactgtttcccttgtttttgtcggccgtttcgtgtagttcgagataaatgatgagtttgcttttgtagctgtatatatttcgtctttggataattcggtgacaaacaagtcaaggtcgttatataccgtctttttgaataattattacgattataagaagttttttttattattttt

SEQ ID NO: 101615 - DNA, 889 bp, Zea Mays
ggcctgttctccagtccccccggcggcggcgtgctctctcgcgtgcacccggcacactccctcgtttctgccgtgctcgtcgcgtgcactcccgtctgtctctgtgggggtcggcgacgattggcagcctccatacgccaggtgcccaaatctctaccttcggtaccttcgccggcgacgagcatcaccaggtttcctgttgatcatggcacagcgtgtgatgtgcttgcttcggcgctccatagggtttacagtgccaccagcacagagagccctgagtacaactgccacaccagcagcggagggtgcagcggtggccgaggcgacggcgaaggaggcaaagaagaggaagaagaaaaatctgttcgacgtggtgcagttcctgccagggtggggcgtcggatacaaggtcgccaagacgacctggcgcgatgtctcctaccagatcaccaagatcaacctgtacaaggatggtcggcatggaaaggcatgggggtttcggtacaaggcaggtgtgcaagctgcagacgccccaactaggatcagcggggttaacaagcgtgggtggaagtacataaaagaatcacagaagaaactacacgatgcccccaaagtagacgtagcgattgctggctagttgcatgttgtaagatgattcttggttccttcattagctaaatctttagatggctgttgccagatgaacagagatgagagatccacttttggatcgagacaatggttccatccattttgcttgtgtggactgaacctccatgcaatatgtccctttcttttatttctggaacctttaccataatgtactaatacaaaagaactgtgttgatggtggcaatctagttaagctttgtttgattcaagtcaattt

SEQ ID NO: 101616 - DNA, 1842 bp, Zea Mays
gaacttatgacaccactgtagccgatgcccgatggtgtcgccgcaatgccgctgcgcccgcgctcaccagctgccgtgcggcttcctccccttgccgcctccgtggaaccccgcgccttccctgccgcaaccacctcccagcagcagcaacagtgcctccctccctgcccctatgccgcgctcctccagcgcagcgccgccaccgccgacccgtgcctcgccgcggctctgcacgcggcgctgctcaagccgcgcctcctcgcgtcccacgtcttccttcacaaccatctcctcatcgcctacttcaaatgccgcctcccccacctgggcctccgcgtgctcgacgaaatgcctcgccgcaatgccgtctcgtggtccgccgccatcgcggggctcacgcagggggaccgggcccgcgatgcgctcgcgctgttccgtcggatgcgcctcgccgggtgcccgcccaacgagttcgcgctggccagcgcgctcggcgcgatctcgctggcacccgtgggcaccgggcatgcgcggcagctctatgcgctctcggtgcggcttggcttcggctccagcgtcttcctgacgaacgcgtttctcgctgccatggctcgtcacttgcagctcgaggacgcggtgcggctgttcgacggcgcttccgcccgagacatcgtctcgtggaacacgctgctcgccgcgttcgctcgccattggagcgtgcagggttggatcctgtggcgaaggatggtccgggaagccgttggcgccgatgggttctcgttcagcacaatcctttctgggctggcggtgaccgcgagcttggcgggcggtctgcaagttcacgcccagctcgtgaagagtggcttttgtgacgatgtgtgcgtggggaactccttggtggagatgtatatgaagagcaaatgcctagcagatggcgtcatggcattcgccgagatccgctgcaaagatgttgtgtcgtggacagggctggccgctggatgcttacactgcggcgagcctgccaaggccattggcattctcggtcagatgatgctggacggagtcatgcctaacaactacacatttgcaacgtcagctaatgcctgcgcgagcctcaccgatctggatgaaggaaggaaagttcacgggtatgtgatcaagctgggagacgactcagacgttggtgtcaacaacgcgctcatcgacatgtatgctaaatgcgggtcagtggcctgtgctcacaaggtgttccagtcgatgcaacagcggccagtcatctcctggacggcgatgatcatggctttcgcgcacaacgggcgagctcgggaagctgtggaggtgttcgacgacatgctgctgagaggtgtagctcccaaccgcgtcactttggtctgcgttctctatgcctgcagccaaggtgggttcgtggacgagggttggatctacttcaacgccatgaaggacaagtttggtattcagcctggggaggaccactacgcctgcatggtcgatctccttgggaaagcaggccaaatcgaggaggctgaagagctgatatcagggatgccattccggcctggcgtgctggtctggcaggcgttgcttggcgcctgtcatcttcacggaaacgaggctgtaggcaggagggctgcagagcatgcgcttgcgctcgagaacgatgacccgtcgacatacatgctgctgtgcaacacacttgccggccagcacgattgggacggcgcacgaagtgtcagagtgctcatgggatcacaaaccctgaagctgcccgggtcttcatggtttcagtccatgtctgacagaagccaggcatgtatcagatga

SEQ ID NO: 101617 - DNA, 2983 bp, Zea Mays
ccggcgtccggcttcgccatcacgacgcctcctccctccctcctctcctcttcactgacgctttctccctcccgtccttgctttattccacccccgcaaaaacccccgacaccccgaaaagctcaccccgcacatggagagctccgtctagggttggttcccgggagcgcgtccatggtgatgccgactgtggcctccgcggccgcagcggcgcttcacccggcgatctcgacgcggcgcgcgggggtcgtcgggaacggcattgcgtccgccgcggcggcgggtggacgcctggccggcggcgggcgaggggcggtcgtgcgtgccagggtggcggaggccgcgccggtggcggccgagggcggcaggttggaggcgcctcccgctgcacccatggtggagatccccgtcacctgctatcagatgctaggcgttaccgagaaggctgagaaagatgaaatcgtgaaggccgcgatggagttgaaaaatgctgggatagaagatggatacacagctgaggtctccactttcagacaggctctcctagtagatgtcagagataaacttctgttcgaacaagattatgcaggaaacataaaagagaaggttccacctaggtcctctcttcatataccttggagctggttgcctgctgctctgtgtattttgcaggaggttggagaagagaagctagttttggaaattggtcaggcggctctacgacgccctgattctaaaccttatgttcacgatgtgcttcttgcaatggcattagcagaatgctctatagcaaaagccagctttgagaagagtaaagtgtcccttggctttgaggctctggcacgcgctcaatatcttttgaggagaaaaccatctttggagaagatgcccattcttgaacagattgaagaatcacttgaagagcttgcgcctgcttgcacattggagcttctaagcttgcctcagacacttgaaaattctgaacgcaggcgaggtgctattgcagctctctgtgaactgcttagacagggccttgatgttgaatcatcttgtagagtccatgactggccttgtttcttgggtcaagcaatggacaaactattagccaatgaaattgtggatcttcttacttgggatactttggctacaactcgtaaaaataaaagatcgttggagtcccagagccagcgggttgtagttgacttcaattgcttttacatggcgatgcttgctcaccttgcatttggatttacaacccgccagactgagttgatcaagaaagctaaaaccatctgtgaatgtttagttgcatctgagagcacagacctaaaatttgaggaatctttctgctcatatcttcttggagaggaaactggaaccacagtatttgaaaagcttcagcagcttcaaagtactggaagttcaaattcaaagaactatggattggataaaaagaaagacagcagtggcaaggttactgtcaaccaatcactggaactgtggctgaaggatgtggccctttctcgttttgcagatacaaaagattgtccgccatctttgaccaacttttttggagctcctaaacgtgtccttaacacatccaagcagaaactgggatccccaagatcagtccttttgagctctcagccatcttctagtgcttcattatgcaacagaacttcaacagaacagagcccaagattgagtcccaacagccatctgggggaggctgttaagcaacttgcacctgccaacttggggctccaatcatcaatggataggcaagtaaatggttcagggacagcatctgttcccctgaagcgcaatcctggatcccatatcagaacattggaattatggggactaagtggagatgttatgggaaagcttgcatgtagcgcactccttggctttgttgtatttagcacattaaaattgaccaggtttcagtttgggcatgtgagatacacggacccaagtagagagtctgcatccatgttgtccttgaatgaagcgtctgcaaaagaaggctcttttatcaccagtcgtgtcaggaagcattttgaaaatatatcaaaatttctttggctgagtgataggcctaattcaaatagcaaaggaagtgataaacacccagcggttaatgatattactgctgcagtttgcaagcaaaagatggatattcaagaagcagaaacacttgtaaaacagtggcaagacataaaatctgaagctcttggccctgactatcaaactgacatgctacctgagattcttgatggttcaatgctctctaagtgggaagacttagcgttattagcaaaggaccagtcttgctattggagatttgtgctgctaaatcttaatgttgttcgagccgagataatcttggatgaaataggtgctggtgaggcagcagaaattgatgctgtacttgaggaagcggctgagcttgttgacgattcccagcccaagaaaccgagttattacagcacatatgaagttcagtacgtattgaggaggcagaatgatggatcttggaaaatctccgaggctgctgtccgggacctgacgtgatttcggccaactcggcaaacgggctacacaaccattggcgtataggcggcatggcaatcttaacctattaggaatgtgtagtggcactattaggttacctgcagttcaatttgagttctttgcattagttagctgagctccgttgggatgctttgaggtcttgagctgctctcatggtgagcttggccctttggattcaggatttgacacaatagttgctggcagtacagatgctaaccagtgctgattccacattcttccttttccgatatgatgtgaattatgttatctagtttttgagttttacccacgtgtaattgaaatccgtgaccgccattgttcaaagaacaatgcaatttgctgaattgatgtttgcgtttcacggcacctgtctgttactactttg

SEQ ID NO: 101618 - DNA, 910 bp, Zea Mays
atgcaacagaacttcaacagaacagagcccaagattgagtcccaacagccatctgggggaggctgttaagcaacttgcacctgccaacttggggctccaatcatcaatggataggcaagtaaatggttcagggacagcatctgttcccctgaagcgcaatcctggatcccatatcagaacattggaattatggggactaagtggagatgttatgggaaagcttgcatgtagcgcactccttggctttgttgtatttagcacattaaaattgaccaggtttcagtttgggcatgtgagatacacggacccaagtagagagtctgcatccatgttgtccttgaatgaagcgtctgcaaaagaaggctcttttatcaccagtcgtgtcaggaagcattttgaaaatatatcaaaatttctttggctgagtgataggcctaattcaaatagcaaaggaagtgataaacacccagcggttaatgatattactgctgcagtttgcaagcaaaagatggatattcaagaagcagaaacacttgtaaaacagtggcaagacataaaatctgaagctcttggccctgactatcaaactgacatgctacctgagattcttgatggttcaatgctctctaagtgggaagacttagcgttattagcaaaggaccagtcttgctattggagatttgtgctgctaaatcttaatgttgttcgagccgagataatcttggatgaaataggtgctggtgaggcagcagaaattgatgctgtacttgaggaagcggctgagcttgttgacgattcccagcccaagaaaccgagttattacagcacatatgaagttcagtacgtattgaggaggcagaatgatggatcttggaaaatctccgaggctgctgtccgggacctgacgtga

SEQ ID NO: 101619 - DNA, 2058 bp, Zea Mays
cgctgtgcataggaccagatctcggccgctgccgcctcgcgtcgtcgtccctctttacacagcgccgctacgcatccgcgccgcaaattcgcttctcttctctgcctccgccatcttttatgcccgccggcgcatgccagccgcagccacatcagccgcggtgcgcgcggccatgcgcaagctcgggggtctcctcccccgcgcgcatcgtccgcactccaccacgacgggcccagacgccgtcgcgccaccgtcgtcgcacaccctccacgacttcaaccgcctcctggccgcgctcgcgcgggacggcgatggcgacgcggcgctccgcgtgctccgccgtatgcgcctatcgtcgcccgcgtgcgcgcccaccgccgcctcctacacctccgccatgtcggcgctcgccaaggccggccgccccgctgacgccgcgtccctcttcgacgacatgctcgccaacggcgtcgcccccgaccgcgccgccttctccctcctcctgcacgtctactcctcccacctccaccttcccgccgccgcgcactccgtgctcctctggatgaccgggctcggcctcccgccgacccccatcgactacactgatctcatcttctccttctgccgcgccggccgcctccacaacgccttccagctgctcgacgaaatgcgcgctctcaattacccgctgacaccacatgcattcgcgccaatcctcaaggcagtctgcgacaatgccgacatccaggcagctgacgcgctcataagctccatgcgttcctctggttgcctccccgatgtcgtcgtctacaatatatacatccatgggttgtgtaagatcggggattttgacgctgtggagagagttatttatgagagtgcccgtaatgggtgggaaccagatgcagtcacatacagcacctacattgttgggctttgctgctctggacacattgaggaagcatttcggcagctggaaattgtggtagcaaagggactgcaactgacagcagttggtttgaacatactgttggaccatgttgcccagaatcttgatatgtgggtaggcaaggaggtcctggagcggtgccaagagctgggctttgtggtcgacgtcgtgacatacaacacagtcatggatcatttctgcaagaaaggaaagtggctgcgcgtcctaaagctgttcacggatctgctcaagaaaccaatagcacccaatgtgcagacatacaacattttgatttcatgcctatgccgagctggcaagtttcactttgccaaatatgtgttcagcagcaaggggttcgtggcagacactgtgacttgtaacattctgatccatgagttctatgaggccggaaaggaaggtgagcttggttttctgttcgctgatgtgaatgctgggaagattgccccagacacaatcacatacaatacgttggttgactgtctctttaggtctgggaggaggtcacaggctgccaatcttgttaggcatatcgatggtggctaccctacagagcccgttgcgcatctgacgtattggttggttaggagtggaaatgtacgggaggcattgaggctgtttgatgatatccaaataaagggactggttttagattgtaggatttttgctaatgtgatcaaggcattctgcagaaagggtccaacagaatgctcagagatttcacagttgtgctttgtattggataggatgcttggaattgggtaatcattatgcggcatgggtctgtaactttgaaattttgggagctctgctggttctttttcgctaccttgcatggtataggtgtttttgtgtcaaaactcaaaaaaggaggatcctgaacttgtttgaaaagtcatggttacgaggatggatatgtagattagcatgtaagttagcttttttcaattgtaggttaaggttcttacgtgattatttgattattctctttccttaagaggctcatttgaatgttcgtggttgtaggacaaaaacaatgttaccagtactggacaagctattggctatcaaaattttgttttaaggacgag

SEQ ID NO: 101620 - DNA, 2835 bp, Zea Mays
ttttactgtagaatcctcgacccgaacctggcttgccgtcgcctccgcttggtctcgctctcgctgcattcgtcttccccgcccgtccgtccgcccgctgatctcagatccagaccaaacgaactccacactaccctctgcccagctcgcgcacgcatgaaaccctagtgaccccgtccagatctcggcgtccggatcactgcgcggcgccgccatggcgccccccgcgctggactctctcccggcgccgctccggtcgctgcggctcaagacgaagcagcaggagctcctgctccgcgtctcggcgctggcgctcatctacgtgctcgccttcgccgtccgcctcttctccgtcctccgctacgagtccatgatccacgagttcgacccttacttcaactaccgcaccacgctcttcctcaccgagaacggcttcagcgagttctggaactggttcgacttcgagagctggtacccgctcgggcgcgttgtcggggggacgctctacccgggtctgatggtgaccgccgcgctgctccaccgcctcctccgcgcgctctacctcaccgtccacatccgtgaggtctgcgtcctcaccgcgcccttcttcgctgccaacaccacgctcgtcgcctacgccttcggccgcgagatatgggactccggggcggggctcgtcgccgctgcgctgatcgccatcgtccctggctacatctcccgctccgtcgcggggtcctacgacaacgagggcgtcgccatcttcgcgctgctgctcaccttctacctcttcgtgcgcgccgttaacactgggtcgctcgcctgggcgctcgcctcggcgttcggttacttctatatggtgtcggcatggggaggctacgtgttcatcatcaatctcgtcccgctttatgtgcttgtgttgcttgtcactgggaggtactcgcagaggctctacgtggcctacaattgcatgtatgtgcttgggatgttgcttgcaatgcagattcgttttgttggattccagcatgtgcagtccggagagcacatggctgctatgggagtcttcttcctgttgcaggttttcttcttcttggactgggtgaaatatctgctaaatgatgccagactattcaagtcattccttcgaattaccctcacatgtgtgattactattggcaccctggctcttggacttggtactgcatctggttacatctccccttggacaggacggttttactccctgcttgatcctacctacgcaaaggaccatataccaatcatcgcatctgtttctgagcatcagccaacagcatggtcctctttcatgtttgacttccacatcctacttttcttgttcccagctggcctttatttctgtttcaagcgcctgtcagatgccacgatatttattgttatgtatggcctcacaactatgtactttgctggtgtgatggtccggttaattcttgtggcagcaccagccgtttgccttattagtgcgattgctgcatctgctacaataaaaaatctaaccactttgatccggacaaagagcaaaagtccacagactactggaaaaacaactggttcaaaggcaggtgcaaagggagcagttgatcaatctttaccattccaacacaatgcagctattgctcttcttctcggtgccttttacttgctcagtaggtatgcaatacactgcacttgggtgacatctgaggcctactcttctccatctatagttttggctgcaaggggtcataatggtggaagagtcatctttgatgattatcgtgaggcatactattggcttcgtcagaacacgcctcctgatgctaagattatgtcttggtgggactatggataccaaattacagctatgggtaacagaactgttattgttgataacaatacatggaataacacacacatagctacagttggacgagctatgtcatcttatgaagatgaagcatatgagatcatgcagtcacttgatgtgaactatgtgcttgttgtgtttggaggtgttactggatattcttcagatgatatcaacaagttcttatggatggtacgtattggtggaggagtttttcctgtaatcaaagagccagattaccttgttaatggggagtatcgtattgacaagggggcagcacccaaaatgctgaactgcctaatgtacaagctttgttactaccgatttggagaacttaccacagaatatggaaaacctccagggtatgatcgtgtacgaggagtggagattggcaacaaagacataaagcttgaatacttggaggaggcatttacaacttcaaactggatagtgcgcatatacaaggtgaaacccccaaagaacaggtcctgaggtagttggtattacctcaggcaagtaaattattgtcaaaaatctgagtgtccagaggagacggcagagtggttattatgggcacctgcgttggcgagacttgctgtagtggccatagcatcagttcaggtcgaaggtcctcatttggtttaggtgtggtcggtgccattcagaagaaccaattgtgacaacagcgagtactttttgattgttaagcatttcttgacctaactctggaagtttttgtaggcgcaatgacatatttgagtagagaaacttgtctttgatcaatgcgcaaggcaagacaaagtatccggcactaaacgcaaaatatgactgttgattctgttctctgttatgtgtttacatcatccaatgtaggcgctagtgcagtttttaggtctcctttggaacaaagaaaaagtgcaggaattttggaggattaaaatttaatagaaatt

SEQ ID NO: 101621 - DNA, 2328 bp, Zea Mays
cgcggctgcgcgccttatccccgccacgctccacctccgccccacacgcgcaagcggcggcaccagtccaccattctcctctcgatccgggatccaaatcggccgcctcatcgcgaccctctgtctccatccgctccggcgtgccacccacgcaggctaacgtctgggctcccctccttatcgccgggctccgcatcgccaatagtctgatggcgccgcagttgcagggctgcaactggatctcctcctggccgcggctccagcagatgtccccttggccgccgcgctcctccgaatcgccgcggtggagcttcctgcgtctcgcgacgcgccgacgcccctgcgcaggcgcggtccgcgccgtcgcgagcgcgggcgcggtgggaaccgagctcctggagatggaggagcaggccgaggacgtggacgagagggagaggctcaggcggacgcggatctcactggcgaacaagggtaacacgccatggaacaagggcaggaagcatagcccagagacgctgcagcgaatccgtgagaggaccaggatcgcaatgcaggaccccaaggttaagaaaaagttggtgaatctgggtcatgcacagagtgaggagacacgggtaaggatatcagtgggggtgaggcgaggttggagtttgcgtctacaaaaactaatggtccaggatggttgctttgtggaatggagggacatggtagctgatgcggctagaaagggttttgctggtggagtttcccttgaatggaattcatataaaatcttgagtgagcagatgcggcatgattggttggagaatcttcagaaaaggcgatcaatgccaaggccaagaggtaatagacgagcaccaaaaactcctgagcagaggagaaaaattgcagaagccattgctgcaaagtggttggatcaagaatatcgtgaacgagtttgtagtggaattgctagctatcatggatcatcttctgcaactaaaacaccgagaaagccaagacctgctggagaaccaggtgtaaagaaacagacgacaaggaaaaaacctatgcaagccaaacctgtaattttagaggatgctcatggaaaaagtgcagctcttaagagaaagaaaagcgcaactccctacaaagatccgatggcagttgaaaaattggagatgatatcaaagattcgagctcaaaggacagcacaggaaatagaaaagaaagaagctattaggagggccaggacactgattgcagaagcagaaaaggctgctgatgctctggaaactgctgcagcgatgaacccttttgcccaagcatcacttatagaggctagaaagcttgttacagaggcaagaatatcacttgaatgtgttgatgatgaagagcctcaagaaactgcttccaatgatgtgtcagggagctcagtgttactgaacttgcacgatcaccgtcatggactggagatgcagaatggaagtaatttgttgaagcaagagaataaacctgccaatgggatggaatttcctccaagcagtgtcaatggcctcgctttccatcttgatgtttctgaactcagcggaacaaagcaactatatcagaggatagagaattccatggaaagggcttttcttctcccttcggcttcgtcaaagcttaaaagtgcgaacggagattatggaataatagatttacatgtgaggcagtcgatggtcgatgacacggcaaagcataaaggcatcacagctgaaacttgtcctccagggacactagagctagaagaagatcctcccagtcccaggtctgcagaaaaggctggaaccagggaagattaccctgggggaaaaccggaagaagacgcaccctcatcggaagaaaaggctaggatgaggtgggtacgtgggaggttggtcaaggtaaaaacaaacggacctggggatttagaaatctagtattaggcagcaaatctggcctagataccgttgacaggcaatcgagtttgctcacttccatttagccaccattttgtatgccattcgcatgatttggtgtttacgacctgcacctgctcgatgggaggaaccaagtataaaatgtactagcgttgacaggagtggcgtggtcctggggaactttactgatttgcagtctacagtgaacgtgcaggagcgagcacattacgatcaccctgttttcctcatatgcgttgagattgtagttgtggtaggtaataggagctggatctttttttcttgtaaggccttgttcggttagctctggattgcggtgatttggtgggtttaaatcccaagtaggtcaaactccttaattttttcc

SEQ ID NO: 101622 - DNA, 823 bp, Zea Mays
gaatttgattttatgaacattgatatttatcaccctcatgttctaggtgttgtctttggagtaaaaattacttgttccattcagatatggtggggctagatcccctgcttggttacttgaaaatttaaatctggcatctgaacaaagacagcggaagttgttagtacagtcgtgcataataatcccaagagttagcaacttgtcatggaatccaatgtacttgaggcactgtcgacaaacttcaaatcaggtccaagtacaaatgcgcgcataaaagcgttaggagctcgttcttctataatacgtcataaccagcctagagtttgtgcattttgcttgggaaatggctatgttggattgaaggatgctcttggttctaatgattccagacttcaaaggtatgacatgataatatcatatgtagcattctggaacacatgttatgcaatcaggttattttcttaaaatggtgtcatagactgtagacatggggtagatggagtgattcgttcttctatttttagcaaggccttatctgcaaggttgtactgttggcatacacaaaatcgtaaattatttaacatatgcttgttgctttatctgtattattacatattttccctttgtattcatatatatgttatatagtgactatttgttcccttcattttctcatggttcattttctccatgtcaacttgggttttgatttttattctttttgtgttatatggagatgagggaagcgtaatacatataatgaaagcactaccgagccgtcaaactgctgcaccaagtttaattgaagatgatgccttacaag

SEQ ID NO: 101623 - DNA, 263 bp, Zea Mays
ttttttatttttccacactgctggtgtttttggaacatgcagatgtcgaggactcgactaaagcaaagacggagatgcatgtgcagaaatttggtgggaactaggcggtacgaccgcgaccgccaatgccaacctgctcactcaagtctgtgtcgtcgcttgtcgagctacttcactctccactctcgatgaccacccacgcatcgacctcgccatcgactgtgcgtatgaggtctgctattatcttttatgttgcttgttca

SEQ ID NO: 101624 - DNA, 2045 bp, Zea Mays
cctccgcctccgcctccgcctcggtgttcaacgttcgaccaccactccgcgagctagaacggtgagcaaagccgtctccgcgcacgcaacggccggcgaccaccgcaggcggcatggacaggctcggcgcgaatccggccaactcctgcccgctcacgccgctgggcttcctggagcgcaccgccaccgtgtacggcgactgcccctccgtcgtctaccacgacaccgtctacacctggtcccagacgcaccggcgctgcctccgcctcgcctccgcgctcgtctccctcggcgtctcccgcggcgacatcgtgtccgtgctgctgcccaacgtgccggccatgtacgagatgcacttcggggtgcccatgagcggcgccgtgctcaacaccatcaacacgcgcctggacgcgcgcacggtctccgtcctgctccgccacgccggctccaagctcgtcttcgccgacccggcgagcatgccgctcgtccgggacgcgctgagtcagctcccgccggggcacccggcgccgcgcgtcgttcccgtcgaggacccgcacgagacggagttccccgcggcggcgcctggggcgctgacgtacgaggcgctcctcgacgggggtgacccggagttcgcgtgggtgcggccagccagcgagtgggacccgatgatactcaattacacctccggcacgacgtcggcgcccaagggcgtggtgcactgccaccgcggcatcttcctggtcaccgtcgacgcgctcgtggagtgggcggtgccgccgcggccgacgtacctgtggacgctgcccatgttccacgccaacgggtggtgcttcccgtgggggatggcggcggtaggtggcaccaacgtgtgcctgcgccgcgtggacgccgccgaggtgtacgacgccatcgcgcggcgcggggtcgaccacctctgcggcgcgcccgtcgtgctcaacatgctggccaacgccccggacgccgcccggcggccgctcccgggtaaggtgcgaatcctcaccgccggcgcgccgccacctgccgccgtgctgcaccgcaccgagtccatcggcttcgaggtcacccacgggtacgggctgaccgagacggcggggctggtggtatgctgcgcgtggaagcgggagtggaacaagctgcccgcgtcggagcgcgcgcggctcaaggcgaggcagggcgtgcgcacgcccggcatgaacgaggtcgacatcgtcgacggcgagaccggtcgcagcgtgcctcgcgacgggtccacgatgggcgagatcgtgctccgcggcggcggcgtcatgctcggctacctcaacgacgacaaggccacgagggcggcgatacgggacaacgggtggttctacaccggggacgttggcgtgatgcacccggacgggtacatggagatccgggaccggtccaaggacgtgatcatcagcggcggggagaacatcagcagcgtggaggtggagtccgtgctctacaaccacccggcggtgaacgaggcggcggtggtggcgcggccggacgagttctggggcgagacgccgtgcgcgttcgtgagcctcaaggaggggtcgggcgcggtgaccgcggcggatgtcatcgcctggtgccgggaccgcatgccgcactacatggtgcccaagacggtggttctccgcgctgagctgcccaagacctccactgggaagatccagaagtacgtgctgcggaaccttgccaaggagatgggacccacccgaaagggcgccagtagcagcagcaggatgtagggcactaacgctagtactagtgctgtgccgtcgtcttgcttggcatggtcgcatggacatgtcacatgtgtcctctctgcagcttgccgtcgcagcatggcgttggctggcatccattttcttgagatcagcgagccctcttaccgattcttggaaaggatttatgatagggatactaccgttacagcagatatgtctccgttttatcttgtagggagtgaataacaaagtgaatgggtgtcattgatagtttgatacaga

SEQ ID NO: 101625 - DNA, 762 bp, Zea Mays
attgcaccgtacctctggcatcgagagagctcgccagcgtccagttgtcacgctcggctcgatcgggctctgccaactgccatggcggcggcgtccggacgggctccgtctgcttgcgcgctcctcctcctcttcctcctcctcgttgtgggtgccgccgccgccgccgtcatcgtcgttgatgccaaccggggggagcaggagcaggactgggactgggagcagctaagcgcggcgtcgccctcgccgtggagtcctgcgcctgcccccgcaccgtcccccgtgagcttcatagactgcgggagcgcgtgcggggcgcggtgcgcgctgtcgtcgcggtggaacctgtgccggagggcgtgcgggtcctgctgcgcccgctgcaactgcgtgccgccgggcaccgccgggaaccacgacgtctgcccctgctacgccgccatcaccacccgcggcggccgccccaagtgcccttgacgtacgcatgggcgagggaggccgccgcgcgcgacgcctctcctcttgtcttgtgtaccgcgcgctagcagtatactaccccatgtagtcgtttgtactcagccgtgtacgtacgtgtctccggtgcgcgtacgtacggtacgtcacacatgatgcgactgcaactgcaatgcatgcctgacccgaccgtctttgcctggaatgtgtcgtgttcttcgtttgctggtgctcgtttactggatcatgtgtggctgggatgcgagacaaatagatatggcaatttta

SEQ ID NO: 101626 - DNA, 2345 bp, Zea Mays
gaacaatctttgcacgggacacatgcattgcgcgccccgcctcaacttgcatcctcaccacatcacagtaacctatgctactgtgagcttgtgactgtgcatggtcatgggctcatggtcatggcttcccgggccgctgaggcgacaggcaaatctccccaccttctgatccctcccggctctcgcctccccagattttatactccacggcctccgttgcacctcccattttttcctttccgtttcgtaccttcttcttcctgctcctcctcccgtgagccatgaatgagctctgcgacctcgaggtgcacatcaatggccatcacacgcttcatctccaccaggcacgtatcactcccagtctcccacgccgcgttccaagtgctcttcttcttcttcctcctcctaattaacagggcgtctcatcacatcaatatataaacgaaccttgttttcttttctggctccgaattggtctcatctcaccgccgtcgttgcaatgcaatgtaacagagcgtcatgtgcgccttctcggggaggctgaggacactggtgaagcaggagaagaagaagaagaagggcggcggcaggaaggaagccgtgtccatcaatctcgccggcggcttcccgggcggcgccgacggcttcgagctcgtggccaggttctgctacaacgacggccgcgtcctgctctgcacctccaacctcccgctcctgcactgcgccgccgtgtccctggagatgaccgaggaggtgtgcgcctgcaacctgctggcgcaggcggaggccttcgtcaacgggctctactactggacctggggcgacgtgctggccgcggtccggagctgcgagcccttcgccgcggcggccgacgcctcgggactcctggacaggctcatctccgcgctcttctccaagatcaccggcgccaccccgggcccgggcccggggacgccgaaccgctcctcgtcgtcgtgctcgtcgtcgcccgacaccgcgggcttgcgccggtcgtcgtcgtccgccaacaagacgccggactcgatgcggccctgcgccggcagggagtggtggttcgacgacatgacgtcgctgtccccgccgaccgtcgagaaggtgatgcgcgtgctcggctgctacggcgtcgagaacaagaacctgatcctcacgcggttcctgctgcactacctccgcgccgccacgcgcaggccgccggcgcttgagcgggagggcgccgcgctcgccggcctcgcggaaacggccgtccacggcgtggcgctcgtcgggggcacggcgttctcgtgccggggcctcttctgggtgctccggatcgtgtcggcggtggggctgagcagggagtgccgccacaagctggagcggctcatggggctgatgctggaccaggccacgctcgacgacctcctcgtctccggcgacgacggcggcggcgtgtacgacgtcaacctggtcatgaggctggtcagggtgttcgtggcctccgaagaggaggcagacgcgccgtcggagaggatgcggaaggtggggcgcctggtcgacaagtacctcggcgaaatctcgccggaccaggggctgaaggtgtccaagttcctcgccgtcgccgagagcctgccggactcggccagggactgctacgacggcgtgtaccgggcgctggacatctacctcgagtcgcacccagcactgtccctagaggagcgcacgacgctgtgccggtgcctcaactacgagaagctgacgctggaggcgtgcaaggacctggccaagaaccggcggatcccgccgggcgtggcggtgcaggcgctggcgtcgcagcagtgcaagctccacatcagcgagccgggccccggcgggagcgcgacggcggcagcggggaaggagcgccggcccgacccgtcctcctgctcccagtcccagacgccgaggaggagggtcgcccgccgcgccacccgcagcgtggacctcggcagaaggagcggcggcgacgacgacgagaaggagctgctgcggctgaacctgcagagaatgcagagccgggtggtggagctggagcgggcgtgcaaggagatgaagggccagatgtccagaatggccaagggcaagtccttgtccttgtccttcggctccggcgccgcctcctgccaccagaccggcggcaggggcttgcctaggctctgctgacgtgatgcatgggcctgtaactttttgatcctttttagtttttccttccccctctctctctttcatggcttgcgattttcctcttgatccctttgtaaagctaattacttggttggtggagtggagcattgcttggtcgtccttta

SEQ ID NO: 101627 - DNA, 2139 bp, Zea Mays
cttgcatcctcaccacatcacagtaacctatgctactgtgagcttgtgactgtgcatggtcatgggctcatggtcatggcttcccgggccgctgaggcgacaggcaaatctccccaccttctgatccctcccggctctcgcctccccagattttatactccacggcctccgttgcacctcccattttttcctttccgtttcgtaccttcttcttcctgctcctcctcccgtgagccatgaatgagctctgcgacctcgaggtgcacatcaatggccatcacacgcttcatctccaccagagcgtcatgtgcgccttctcggggaggctgaggacactggtgaagcaggagaagaagaagaagaagggcggcggcaggaaggaagccgtgtccatcaatctcgccggcggcttcccgggcggcgccgacggcttcgagctcgtggccaggttctgctacaacgacggccgcgtcctgctctgcacctccaacctcccgctcctgcactgcgccgccgtgtccctggagatgaccgaggaggtgtgcgcctgcaacctgctggcgcaggcggaggccttcgtcaacgggctctactactggacctggggcgacgtgctggccgcggtccggagctgcgagcccttcgccgcggcggccgacgcctcgggactcctggacaggctcatctccgcgctcttctccaagatcaccggcgccaccccgggcccgggcccggggacgccgaaccgctcctcgtcgtcgtgctcgtcgtcgcccgacaccgcgggcttgcgccggtcgtcgtcgtccgccaacaagacgccggactcgatgcggccctgcgccggcagggagtggtggttcgacgacatgacgtcgctgtccccgccgaccgtcgagaaggtgatgcgcgtgctcggctgctacggcgtcgagaacaagaacctgatcctcacgcggttcctgctgcactacctccgcgccgccacgcgcaggccgccggcgcttgagcgggagggcgccgcgctcgccggcctcgcggaaacggccgtccacggcgtggcgctcgtcgggggcacggcgttctcgtgccggggcctcttctgggtgctccggatcgtgtcggcggtggggctgagcagggagtgccgccacaagctggagcggctcatggggctgatgctggaccaggccacgctcgacgacctcctcgtctccggcgacgacggcggcggcgtgtacgacgtcaacctggtcatgaggctggtcagggtgttcgtggcctccgaagaggaggcagacgcgccgtcggagaggatgcggaaggtggggcgcctggtcgacaagtacctcggcgaaatctcgccggaccaggggctgaaggtgtccaagttcctcgccgtcgccgagagcctgccggactcggccagggactgctacgacggcgtgtaccgggcgctggacatctacctcgagtcgcacccagcactgtccctagaggagcgcacgacgctgtgccggtgcctcaactacgagaagctgacgctggaggcgtgcaaggacctggccaagaaccggcggatcccgccgggcgtggcggtgcaggcgctggcgtcgcagcagtgcaagctccacatcagcgagccgggccccggcgggagcgcgacggcggcagcggggaaggagcgccggcccgacccgtcctcctgctcccagtcccagacgccgaggaggagggtcgcccgccgcgccacccgcagcgtggacctcggcagaaggagcggcggcgacgacgacgagaaggagctgctgcggctgaacctgcagagaatgcagagccgggtggtggagctggagcgggcgtgcaaggagatgaagggccagatgtccagaatggccaagggcaagtccttgtccttgtccttcggctccggcgccgcctcctgccaccagaccggcggcaggggcttgcctaggctctgctgacgtgatgcatgggcctgtaactttttgatcctttttagtttttccttccccctctctctctttcatggcttgcgattttcctcttgatccctttgtaaagctaattacttggttggtggagtggagcattgcttggtcgtcctttatgattgta

SEQ ID NO: 101628 - DNA, 3517 bp, Zea Mays
aaaggcagttcttacacgcgggccctcggcttcaccggaaatcgcctcgggacgggagatctcgcgggccggccggcggcgagaggatgtccaccgcgcccgcgcggcgcgcccgcccgccgctgccgctgcagaacggcgcggagggcgacgacgagcgcgaggaggaggttgatgaggaggaagtgggcgatgacgaagcggaggaggaggaggacgacgacgacgaggaggagccgcggctcaagtaccagcggctaggcgggagcgtgccggcgatcctctccaccgacgccgcggccgccatcgccgtcgccgaccgcatggtcgcgctcggcactcacaacggcacgctccacatcctcgacttccagggcaaccaggtgaaagaaattgctgcgcacacagcaactatcaacgacataagctttgacgcagacggtgaatatataggcagctgctcggatgatggcacagtggcaataaacagcctcttcaccgatgaaaagctaaagtttgagtaccatcgccccatgaaggcaattgctctagaccctaattatgcccggaactatagaagatttgctactggtggtttagcaggccaagtacttgtgctgacaaagaagtcttggggaggttaccataagaaggttttgcgtgatggtgaagggccaatccattcgatgaagtggagggcggatcttcttgcttgggctaatgatgcaggggtcaaagtgcatgatatgagaacagacaaagggatcgcattcatagagagaccaaaaggcattcatcgaccagagttcttgcttccccacctagtctggcaggatgatacagtcttagttgttggatggggaacaagtgtcaagattgcagcgatccgaacagatctatctcagggactcaatggcctacaaagaactatcaccacagctagttctgagaagtatgtggacattgtgggctcattccaaacaggctatcacatatctggggttgctccatttggtgaccttttagtcgtacttgcctatattcctgatgaggatgaaaaagagaaaacatttagtacttctgttacttcacgacagggaactgcacagcgtccagaaatacatcttgtatcatggaaaaatgatgagcttactacagatgctctgcctattcatggttatgagcattacaaggcaaaggactatgctcttgcacatgcacctttctcaggaagtagcaatgcaggtggacagtgggctgctggtgatgaacctttgtattacattgtgtctcctaaggacatagtcgttgcaaagccaagagatgctgaagatcatattgcttggcttcttcaacatggttgccatgaaaaagcattggctgcagttgaggcagggcaaggacgcactgagcttcttgatgaggtgggctcaagataccttgatcacttgataattgaaagaaaatatgctgaagctgctcaacgctgcccaaagttgttgcgaggatccccttcagcatgggagagatgggtcttccactttgctcatctccgccaacttcctgttttggtcccttatattcctacagaaaatcctcagctgagtgatactgcatatgaggttgcccttgttgctctaactaccaatccttctttccatgaacttctcttgactactataaaaaattggccaccgacattatactcagcctcaccggtcatatctgccattgagccacagctaaactcctcatcgatggctgattcattgaaagagtcattagctgaattgtatgtgatcaatggtcaatacgaaaaggcactttctctttatgctgaactcctgaagccagaagtattcgagtttattgagaaatacaacttgcatgatgccattcatgataagattgtcaatcttatgatagtggacaataaaagaacagttcacctactgatccaacatcgtgatatcattcccccatatgaagttgtggagcagctgttgcataccagtaaaaaatgtgacaagagatatttgttacacctgtatttgcatgctttatttgagatagatatacacgctggaaaggattttcatgatatgcaggtggagctttatgctgactacgagacaaggatgctactacccttccttcgaaccagtcagcattacaggcttgacaaggcatatgaaatctttgcacaaaaagaacttgtaagggagcaagtttttgtccttggtcgaatgggcaatgctaaggaagctctgtcgacaattataaacaaactggaagacatgcaggaggctgttgaatttgttacggaacagcatgatgatgaactgtgggaggaactgattagacaatgcctccagaagcctgaaatggtagggaatctattggaacatacagttggcaatcttgatcctctgtacattgtcagtttggttcctgatggcttagaaatacctcggttgcgggatcgtcttgtgaaaattgtgacggattaccggacagaaacttcattgcgaaatggatgcaacgatatacttaaggctgactgtgttaaccttttggttaaatactaccacgaggctcggcgtggggtatacatggtaagcatggacgaggaggtacacggaaacagagctgacgatggatcatcgcggggacacgagagatcatctagcgtccgggctctagatatcaagtccagaacaagatgtggtgcccggtgttgtttgtgcttcgatcctttgcctatccaggacatatctgtcatcgtgttctactgctgccatgcgtatcatctgtcttgccttgaaggtggcttagactcgatgagatcaaacagtggtcaggatagtgacggaggcatggacgatgaggatggttccccatcaggccagtctcgcatgcgctgtgtcttgtgcactactgctgcttcataattttataccgtgttgggtagtacacactaccttgtgttgtgttgtaagttttgagccatgtaattattgtgttcttttcgcgtgttacacataacacatgcttacaatagcgtaattcttttgagggaggccatgtcctcggcaaggagagttctgtgtaaatttgatgaaccagcatgagcaaagctgtgcggcatttccatctttttttaatgccacgtttgccagataatcaaaagtttattgacattacacgatgcagaactgttcatgtagaatgtgcctgtctatattatacactgttctatttgggactagggcatggtagaattccccagtttcttctcacttcctccaggtcttcatgaaagtgcttctcgcaatatacagaaatcagatcgcttgagaccggcttttgttgcccatgggaagtaatgcgtttctcactgaaccttgagggcaatttgaacaggatactcagcgttcgattctagccgaagtgtttggacggtgacatattgcgctgtagctattggattctgaaggcagtatgtatccttcgctgc

SEQ ID NO: 101629 - DNA, 1651 bp, Zea Mays
cacgtaccaccgcatcttgggcttccctccgccgatgcggttctgtaggttgtcgtagaaggcctcgtcccagtacagcaggtcggcggagcccggcgggcagcgcaccccgaagttcgcgaacgcgtcgttgtaggcctggcggtggaggtgctctgactccagtatgacgccgtcgcaatcaaagatgagggcctcgagagacgccgaggcggagaccatgacgagccggggcgcgcggcggaggcgcggggcgcttgaggctgatcggttgctgatgaatggatagcggcgagagccggcgacgccgacggcgccggtggggacggcgagggaagtggaaggcatcgggagggagtgaggatggagcggagtggagtaggcgccaacggcaacggtcgcttatctagctgactagctcttctcagggaatataccatccacagaaaaaaagcgccccgcctcatcccgagatcagaatcagaggccacgcggcgatggcgatggcgatgccgatggcagtggcgcgggtgaccagcctcgcctgcgccccccgacaggcgcagcatcgccgccgccatagccttgccccgccgtgcgcctcgggtgcggtggaggtgcgggtctgcacgaaccgcacgtgcgcgcggcagggtgggcgcgaggtcctggctgcgctcgcgggactcgcgccgccggcggtcgacgtggcctcctgcgggtgcctcgggcgctgcggcgccgggcccaacgttgcggcgtccgtccctgggagcgccgcggtgttcggccacgtgggcacggcggcgcgaggcgcgcagctactggagcacctcctcggccccgcggaattcgatgcggccctagggctcaccgcgctggccacgagggagaaggcggaggctgccctcgagaagggaaacgcggacgaagcggaagcccttctcaccgaggttattgggttcaatgcttgtggtggtctgcatttggtgtacatgagcaggtctaaggcgagattggaaattggggatatccctggtgcacttggggatgctgaggaagcaataagaatagctcccagatttcctcaggctcacttattgcgaggcgacgcactttttgcaatgggtgaatattctgtcgcggaagatgcctatgcagatgccttggatcttgatccatctattcgccggtccaagtctttcagggctcgcgtggaaaggctacgagagaagcttgttagtgccaataatccgtagttcattttgaagctctctctccatcagaagttcgatccacaagtaacgtagatatgttcttggtgaaggtaataatgctcacacactttgcaagccactggtcaggaattgattgttgccacagcttggaggatccaacagttcatatgaatggcttctggaattttctcatgattacatctggactgatgagaacaaactactaagtctcaactacaagtgttttgaaggtaacggaaatgcaacatggttattgtcttgcacttagccggtatgttcatttgtttggattcatacacagatgtcgtcacaatatgttaagtatttccatgctttggcactacatgtcatgaaatttagtatcaaatcaagtactcctgtaacctttattc

SEQ ID NO: 101630 - DNA, 4317 bp, Zea Mays
cacgtaccaccgcatcttgggcttccctccgccgatgcggttctgtaggttgtcgtagaaggcctcgtcccagtacagcaggtcggcggagcccggcgggcagcgcaccccgaagttcgcgaacgcgtcgttgtaggcctggcggtggaggtgctctgactccagtatgacgccgtcgcaatcaaagatgagggcctcgagagacgccgaggcggagaccatgacgagccggggcgcgcggcggaggcgcggggcgcttgaggctgatcggttgctgatgaatggatagcggcgagagccggcgacgccgacggcgccggtggggacggcgagggaagtggaaggcatcgggagggagtgaggatggagcggagtggagtaggcgccaacggcaacggtcgcttatctagctgactagctcttctcagggaatataccatccacagaaaaaaagcgccccgcctcatcccgagatcagaatcagaggccacgcggcgatggcgatggcgatgccgatggcagtggcgcgggtgaccagcctcgcctgcgccccccgacaggcgcagcatcgccgccgccatagccttgccccgccgtgcgcctcgggtgcggtggaggtgcgggtctgcacgaaccgcacgtgcgcgcggcagggtgggcgcgaggtcctggctgcgctcgcgggactcgcgccgccggcggtcgacgtggcctcctgcgggtgcctcgggcgctgcggcgccgggcccaacgttgcggcgtccgtccctgggagcgccgcggtgttcggccacgtgggcacggcggcgcgaggcgcgcagctactggagcacctcctcggccccgcggaattcgatgcggccctagggctcaccgcgctggccacgagggagaaggcggaggctgccctcgagaagggaaacgcggacgaagcggaagcccttctcaccgaggttattgggttcaatgcttgtggtggtctgcatttggtgtacatgagcaggtctaaggcgagattggaaattggggatatccctggtgcacttggggatgctgaggaagcaataagaatagctcccagatttcctcaggctcacttattgcgaggcgacgcactttttgcaatgggtgaatattctgtcgcggaagatgcctatgcagatgccttggatcttgatccatctattcgccggtccaagtctttcagggctcgcgtggaaaggctacgagagaagcttgttagtgccaataatccgtagttcattttgaagctctctctccatcagaagttcgatccacaagtaacgtagatatgttcttggtgaaggtaataatgctcacacactttgcaagccactggtcaggaattgattgttgccacagcttggaggatccaacagttcatatgaatggcttctggaattttctcatgattacatctggactgatgagaacaaactactaagtctcaactacaagtgttttgaaggtaacggaaatgcaacatggttattgtcttgcacttagccggtatgttcatttgtttggattcatacacagatgtcgtcacaatatgttaagtatttccatgctttggcactacatgtcatgaaatttagtatcaaatcaagtactcctgtaacctttattcattttcattttgcaattatatagtttctgggaaaagctgcagttcttattcattgtgcttctgagtatttgtgaccgttgatgtcctttgcagaaaatagtttagcatccctttgattgtaccttttatcgttcttttatctcacctagtcaccttgcggtccttttgcatctattaggtagaaactttcttaatcttgctcatttgggtgttttttttgtaccagtagcttttttaggtcctgttagactatctccagcagattactcatccctatccccgtattcaaacatcactctgcaaacaatgcaaatcagtgttttgggtgaccatattggtgaattgctggaaacggtcttacgtatcccgagaatctaggaggattattctagtttttggttgaattaaaattggtgccttctgccttgacctaaccaaagaaagaaaaatgttttaaccaaggcttgtgatccagaccagagacgactaagtttagcatacacttgggctacatacctcagggtgtgctggcatctgaaagaggcatttcccctcttttcgtggtgtggctttctgaagctacaactaactgctgcacacatacatcatgagaatttgtaagacggccttcacagccagttaaatttttgctggcgttgtggttggtactattgttggtattttgacacaacattagttggtgggttagttaatacgtaaagttgtccattgctgttaaacatcggtcttttttacttacaaaagccatttactgtaagcatgcccaaataatggtttctccaagcttggtctcttaagctttttctcaacgtataaaaggaaagagggaagaactggactgataaggagaaaatatgatggagatcagtagttacaaaacacagttagcaaatccaatacccaagcatttacaaaacagcattgagcactggttttgtaggattcaagttgtagcagctgcttgatgtctgaccttttctatttctttatctattttaggtgctatatccatttttttgtgtatgaaggtatgattgttcatatcaagtttatcttcatgtgtgaatgctgatcagcatggactccatgtgtatcccacataaaggaatcgatcctttttgcacctgtatttttttttgggaacggagctccttttgtccccaaaatcagttggcatatatatttttataaagaaccaaggatatgtgtctacatatggcccacaacattgaagtatgaacttgcaattctggtcttcaaagctgaccagaccaatttggccttgctgccagcaaattgccaccttgctgagattccacaccagcttttgagacaggaaactaatttgtttagtaccatattttttggaggccatcacctggattagtttacgcacatgcagcatgatgagaacattcttagcatggtatattatttattaaaaactaaaaaaaggaggaaatgttagctgttctgattgtgatgttgagctgattggctgccccgtgtgatgcagtgtacagaaagaaaacttatatggataaccttgctgactcgcacattgtctgctggctttgatttggaaaacgccaagtcctgtcttggacattaagatctttgaaatgctcatcccgtctatatattacaccaaataatcgtatcaacacaaaccatatttttttcagttgtagacagcagacatgagacatgcccttatggtacctttttatgatgcagctatgcataaacagaatcctaatatcgttagacttgcaccacctgttttaagaaaatgataaagtcaaggctgtagcaattttattttctgttcctctgccgaatcatcagcatctattgaattgtatatgcaattgtaatcccatttcccttcacagaatgttagcacacccacttattccattccccccaagtgctacagcatgttgctaaaccaaatggtggaaaccgttgctgccataacccctgtcagcttttgtgtaaacttcatatgtaaacttgtgttacttgttaggttgccctagttcaaagctacacatctcagacttcaggtgcaccctcccccagctccccctcactgtaaagcaatgtttggttggtgggatgatccctccttttggtgctgtttggtctgtctacgtcaaacggggccttgattccaggcttacactctttcttaaagacttgttcgtcctcattatccatgtgcttgtgtgcagttcaagcatcgcctgaagtcaaagtcagatgtgcggccaacggaatgcacgagtctggcggctcaggcgcccaacgttttggttcccaccgcttccgatgcgtggcggtaaagccaagcatgcgtggaggcaactgtaggagtagccacaccagatagtactgtactgcactgctgctgccttggggcgtatagcgtttatggtcccgttatttgttgttctgcagtgaaatggaggctttgcccctcgggctgtttgacgttctgatttcactcctttgttttcaaaatgaaggtctccagacgaaaggaaaagtgaaggaattttgaaggattgaaatctaataagaaatttttctatgtgactctttggaacaaaggattgatctcctataaatcctataaaatt

SEQ ID NO: 101631 - DNA, 105 bp, Zea Mays
accagtagcttttttaggtcctgttagactatctccagcagattactcatccctatccccgtattcaaacatcactctgcaaacaatgcaaatcagtgttttggg

SEQ ID NO: 101632 - DNA, 120 bp, Zea Mays
gttcagactgcgttcatttttctcacggctccctgttcatattttcagctgcaaacttttgctcagtctttctaatccagttcatactgctaatttgttctgcgaactgtggagtgcggc

SEQ ID NO: 101633 - DNA, 897 bp, Zea Mays
atgttcctcgccgacaagtacagctcgctgctgcccttccaccaccaccattccaagcccagccgacgccagcagcagaagggggaggcgcaccggttcggcacggcgctggccgcgcgcctccggggcctgctgccgctgccggcctccccgctcgcggcgctcgtgcgggtggccgacctcctcgcgctcacgctcgccgaggcggggcccgcgctcgcctgctccggcgagggcgccgccgtcgccgcccacctcgacgccggcgtcgcgctcctcgacgcctgcaacgccatcgccgcgcggctcgacggcctccgcaggcgccgtctcctcgccagcctcgcgctccacctcctcctctcctccacctcgccgtccgggcggacgcgcgcgcgcgcggcgctcgcggaccgcgaccccccggcccctccgccgctcccttggctcccgttcgagcagccccgcgggcagctcacggccgccgcgcgcgtcctcgccgccgtggacgccgtctcctcgctcgcggcggcggccgcggctaccgtcctcgccggaggacctgccaccttcccctgggtctccggcagcggcggcgacctcccctgggcggagccgttcaacgcgctgtccggccagctcgcggcgctcggcgccggcgaggtgcgcgccgtcgacgaggccgtccggaggctcgcgtcggcgctggactccgggaccgacaacgagggggccgtgcgcgccgcggcgcaggaggttgggaggcgcaccgaggagctcgcgccgcggctggaccgcctgtctgacgccgtcggcggcgtgttccgcgccgcgctgggcctccgcaacgccgagcttggatgcttaatggtgggacccgcggggaagcccgtgtag

SEQ ID NO: 101634 - DNA, 1434 bp, Zea Mays
ccgaacatccttccccaaaacccccccacccaaaggcgaggcagggggagagccgtgcctggtgtggtggctcctgaccaaaacggagtccctcgccgccgccgcttcccgaaatccgccaaatccggagccaatgccgccgtcccctcccaccccggcggcacccaaaactatcgccgacttcttcgcgcgccccgccaagcgcctgcgcgctgccccggccgcctccctctcctccaactcctctccctcctcgctgtcgccggagcagcgccgtcgcgccgacaccaacctggcgctcgcccgcgcgcggcgcaacctccgcctcgccgagtccaaagcgcaagcatcggggggcgcaccgaagctggaggagctcctggtggaggagacgtgggcggaggcgcttcgcggtgagctgcgcaagtcatacgcgctcgagctctgccgcttcgtggcccacgagaggctccacggcccgctgcccgtgtacccgccgccgcacctcgtgttccacgcgctcaacgccaccccgttcgaccgtgtcaaggcagtcatcatcggtcaggatccataccatggccctggtcaggccatggggttgtctttctcagtaccggaggggataaaaataccttctagcttaggtaacatttttaaagagctcaaaaaagacctaggctgcactgtgccatcacatggaaatttggaaagatgggctgtgcagggtgttcttatgctcaataccgtcctaactgtgagggagcatcaagccaactcacatgccaagaaaggatgggagcagtttacggatgaggtcattaagactatatcacaaaagaaatcaggattagtattccttctttggggaaattctgctcaatctaagacaagattgattgacgaaacaaaacatcacatattgaaatctgctcatccatcaggtctgtctgcaaacaggggtttctttggatgcaggcacttctccaaaacaaacgagatcttagagaagctggggctgtctgccatcgattggcagctctagaaaaatcccaagacgacatgtgatttctctgtttgagcttgacaaccaccgttgctgtatggagtggagcagaagcacatgcctcaagggctatcatattcggtcaagattatgtggcgactaaagttgttattcatacatggccaatatggatgtgagtgcttaacgcttcttttgtgccgtgtcttatcctgctttatttactttggcactgtaccagcttgttgcggccattgtggttgtcgtgcgtacgtgcaactactttgcttggcgctaggacacgcccatttgggctgccttgctagatctaagcatctgacgtactagagcttaaccaaccaccctatatatatgcataaagggcctgcctctacggctctaccttccgc

SEQ ID NO: 101635 - DNA, 927 bp, Zea Mays
accaaaagaccattgggctgtcagagtgacaagtagtcaaaatgcaattttgccaatgatagcagagtaaattttgcttagcataatgcttatcagagcataaccttgttctgttctgtgttgttgactttttgtccttgttatatgtagtccctctagccttattcaaaaccatactcctatagtcctatctgttatttccattcttgggtattatatcttgtgtgatagggagactagcttgtcttaccagtgagggagcatcaagccaactcacatgccaagaaaggatgggagcagtttacggatgaggtcattaagactatatcacaaaagaaatcaggattagtattccttctttggggaaattctgctcaatctaagacaagattgattgacgaaacaaaacatcacatattgaaatctgctcatccatcaggtctgtctgcaaacaggggtttctttggatgcaggcacttctccaaaacaaacgagatcttagagaagctggggctgtctgccatcgattggcagctctagaaaaatcccaagacgacatgtgatttctctgtttgagcttgacaaccaccgttgctgtatggagtggagcagaagcacatgcctcaagggctatcatattcggtcaagattatgtggcgactaaagttgttattcatacatggccaatatggatgtgagtgcttaacgcttcttttgtgccgtgtcttatcctgctttatttactttggcactgtaccagcttgttgcggccattgtggttgtcgtgcgtacgtgcaactactttgcttggcgctaggacacgcccatttgggctgccttgctagatctaagcatctgacgtactagagcttaaccaaccaccctatatatatgcataaagggcctgcctctacggctctaccttcc

SEQ ID NO: 101636 - DNA, 1953 bp, Zea Mays
ggaattctcaccgcctccccgtgcggggtgagaggcggtgggtcgtggttgcggtcggcgcgcgaggagggtcgacggcctcgcgccattgggtacgaaaccggccgagactgtgagcggtgggcggccgctgcctggagacagctcaaggcaggtgagttggcccggattccgcgggcgtgtttgttcgtacttcgtggtgggggatttggacggcttcgttgcggttgcgccgttgcggtggttgcttcggtgggtgggggcgggcggctggctggctgggggaggggtcttccctgtcgcctcgccgttcactcgctcagcgacctcgatcggatcctcctcgggactcgggagtgaggaaaaatgcgaggctcctgcggggagctcagagtgcagcgggcacggctcccgagtcaggcggtttccttggtgcccgtgcagggttgatccaggttcgagcgcctcgggttgctggaggatttgcgggggggtgcgtgtttatgggcggctagatcggtgattcttcagctgctctcggtgtgatggcagctgactctagcatggggtttcaccaggggatcaccgcctcgctgtacaaccatcacatgctctcgttccagtccaacagcgacgtcggcatcagcggcgacgccaccggtgccatggtcatggccccggggagtgtgggtggcggcagtagcaacgccgggctgttcctctccgcaaacacaggggtcatgggcaacgcgccgggggtcgccccgtcaaggacctcgtcgggggatgcactccttggtaccgggacgcccaagtataagtacgtaactggtcctccttcggattggagtgaccgcgaggtggccatactgaaggaaggacttgtgagatatgctcgtgaaccgagtatcatgaggtacattaagatagcagctatgcttcctaacaggaccatcagggatgttgcgttgcgatgctggtggtctacaggtaaagagagaaggaagaaacctgatggattctatacaggaaaaaaaatgagagacatgaagccaatccaggacaaaatggttgcatctgtcccaatagctaattttcacatgacacctacaaccaatgtaacccctttttcgatatcaatgcaacatccaaatcaacaaagtcaggttcccaaagaagctcctattgtcgacagtgcaacccagcgtctcctggaggaaaataatcagttgcttaaccagatttctgcaaatattaaaacattcaagacagtggagaacacagatctttttctccgcacgagtaacaacatcaaaacaattttaagcagaatgagcgaaacgcatggtatcatgggtcaaatgcctccattgcctttatccataaatgaagaccatataaattcgcttattcaactgaacagactggttgcatcatatggtacgacaagcatttctcatcatacgaagcaagagccatgaagctagtttaccatacccagggggaaaaacgagacgaccagatggccggacctcctgcaatcctgtaaacgtgctgttgaggaaggcttacatgttgttatactgaccaagcaccagggaaaaatcactgttttccagataatgtttttgcagtgatcaccagagtatcagacactttatcctggactccgcaagtgactgtaaatatcggatgactggaggcattccatgttttgttttactgatcgttcgtgaatgcatttcttcttttcttgttttttattgttatcccagacagggttgcattgctcccaatatgtaactatgtacaatagccactgccctagactgctaggcgtagaacgactccattttctgactatttggacactggaacccaaacatgttgtccaggtgttctgcattcttttttatcttcacttcagaagctttggattagcacttctgatgc

SEQ ID NO: 101637 - DNA, 1838 bp, Zea Mays
ggctggggacgggggcgtggagcggccagcgcgggcacgccgtcgaggcggcgcggcgttggctgcgctggtgcgccctatacgcgtcggcgtacgtgccgctcccactcgctgtcgactgtcgagctttgctgtcatctccctcccctgattctccgccttcccctcctcgccgcccacaatgcttctcccggccgtcgccgccagccgcctggtcctggtcccgttccggctctccgccgcccggcgcatatcctccctgaaggtcccgtggaagcgagaccccgccctcgacgctgccatcgcccgggaccgccgcttcctccaagcgtcccgcctcgtccgcgaggtgctcctctcgccgggtcgccgcctcctcttccgctacctcaccaagcgccgcgagcgcatcaagctccccgtccacgtccccactttcctcaagcgctaccccaccctcctcgccgtctccgctcccccggagcccgtcgcctcgccctccccgcacctcctcgctttcctcgacttcgcctcccgcctctacgagcttcatgcccctctcctcgcctccaggctcgccaagctcctcatgatctcctccacgcgtgctctgcccgtcaccaagatcgccgccgccaagcgctacttcggcctccccgacgacttcctggcctcgctggtcccgaggtaccctggcctcttccgcctcgtcggtgaccccgggcctgacgcgtccgggaacgcgttcctcgagctggttgcttgggacgatgagctggccaagtcggtgatcgaagctaaggctgacaaggaggccgatgtcgtcggaattaggccgaggccaaacttcactgtgaaattgcccaaggggttttacctcaagaaggaaatgagggaatgggtgagggattggcttgagttgccatatatctcgccgtacgcagatgcatccggtctgcatccggcatctccggaagctgagaagagatcgattggtgttttacatgaggtgttgtccctgacagtagagcggaggatggcggtaccaattatcgggaaattttgtgatgagtataggctgccaaatgcatttgctaatgcgttcacgaggcacccaggtatcttctatgtgtcacttaagggtggcatcaagacagcagtattgagggaagcatatgatgagaatggagagcttatcgatagagacccaatgcttgagctgaaggagagatttgtggcaatcatggaagaggggcataagcagtatctagaggacttgaagaggaagagagaggcactgcagaaagacagggaggatgcaggtcgccaggatgcaaaggcagagattgaggatcgggttgaggaggaatggcacagtgaggcttcagaaggagatgatgacacagatgatgcttataggcagtaggaggccatgggaatgcagtgttgttagtggctcttctgcttgtagttccatttgtccctggtcaagtgttgcctggagaactggcagagaaatttggttggtttgcctatgttctttctttaacctgctggctgttaatacaagatatattggaatttaacacactcttagggctagggatttgagtttccaaactggcacttaaggactggtgagatccatttgacctaacaaacttggaagattttcttgtcagcagtcttcatggatgcctttgttgttgttagttgactcactggggctgtggagggtacagctggcttttgtgctgtgacctttgccatccattcggattcagaaattattgtcaagttgatcagtgcaagtctattcctttttatgggattttctt

SEQ ID NO: 101638 - DNA, 1778 bp, Zea Mays
ggctggggacgggggcgtggagcggccagcgcgggcacgccgtcgaggcggcgcggcgttggctgcgctggtgcgccctatacgcgtcggcgtacgtgccgctcccactcgctgtcgactgtcgagctttgctgtcatctccctcccctgattctccgccttcccctcctcgccgcccacaatgcttctcccggccgtcgccgccagccgcctggtcctggtcccgttccggctctccgccgcccggcgcatatcctccctgaaggtcccgtggaagcgagaccccgccctcgacgctgccatcgcccgggaccgccgcttcctccaagcgtcccgcctcgtccgcgaggtgctcctctcgccgggtcgccgcctcctcttccgctacctcaccaagcgccgcgagcgcatcaagctccccgtccacgtccccactttcctcaagcgctaccccaccctcctcgccgtctccgctcccccggagcccgtcgcctcgccctccccgcacctcctcgctttcctcgacttcgcctcccgcctctacgagcttcatgcccctctcctcgcctccaggctcgccaagctcctcatgatctcctccacgcgtgctctgcccgtcaccaagatcgccgccgccaagcgctacttcggcctccccgacgacttcctggcctcgctggtcccgaggtaccctggcctcttccgcctcgtcggtgaccccgggcctgacgcgtccgggaacgcgttcctcgagctggttgcttgggacgatgagctggccaagtcggtgatcgaagctaaggctgacaaggaggccgatgtcgtcggaattaggccgaggccaaacttcactgtgaaattgcccaaggggttttacctcaagaaggaaatgagggaatgggtgagggattggcttgagttgccatatatctcgccgtacgcagatgcatccggtctgcatccggcatctccggaagctgagaagagatcgattggtgttttacatgaggtgttgtccctgacagtagagcggaggatggcggtaccaattatcgggaaattttgtgatgagtataggctgccaaatgcatttgctaatgcgttcacgaggcacccaggtatcttctatgtgtcacttaagggtggcatcaagacagcagtattgagggaagcatatgatgagaatggagagcttatcgatagagacccaatgcttgagctgaaggagagatttgtggcaatcatggaagaggggcataagcagtatctagaggacttgaagaggaagagagaggcactgcagaaagacagggaggatgcaggtcgccaggatgcaaaggcagagattgaggatcgggttgaggaggaatggcacagtgaggcttcagaaggagatgatgacacagatgatgcttataggcagtaggaggccatgggaatgcagtgttgttagtggctcttctgcttgtagttccatttgtccctggtcaagtgttgcctggagaactggcagagaaatttgacatcgaacaatctgacttcgtgcggctcctgaccctggttggaagtgttcgcttcagctaaaacagctccagctgcggcctctctctgcagatcattgtagcagcagcagcgctgccaagggattagttgttgcatcctatgatgcaaccataatatgttcatgcagcaactcagttcagttgtactgtttgactcgagaaatgtaacaagctgtactgttaaaccaggtgatcctattggtgtctcggcgtccc

SEQ ID NO: 101639 - DNA, 505 bp, Zea Mays
gtcatctccctcccctgattctccgccttcccctcctcgccgcccacaatgcttctcccggccgtcgccgccagccgcctggtcctggtcccgttccggctctccgccgcccggcgcatatcctccctgaaggtcccgtggaagcgagaccccgccctcgacgctgccatcgcccgggaccgccgcttcctccaagcgtcccgcctcgtccgcgagacatcgaacaatctgacttcgtgcggctcctgaccctggttggaagtgttcgcttcagctaaaacagctccagctgcggcctctctctgcagatcattgtagcagcagcagcgctgccaagggattagttgttgcatcctatgatgcaaccataatatgttcatgcagcaactcagttcagttgtactgtttgactcgagaaatgtaacaagctgtactgttaaaccaggtgatcctattggtgtctcggcgtcccaagttctgtgacactgaggccagagttcgttgt

SEQ ID NO: 101640 - DNA, 781 bp, Zea Mays
ccactccagactgcactcttcttccttccgcttccgccttcgccacctcccccacctctccctccgtctggtcctgcccgcgcctcccctccccccagtccgtcgataaagccgaggcatcgggacggcggcaggtagaaggagcacccattgcttccgcatctcgcgcaggctctccccaccgcactcccacgcctgataccataccattccgccgccgcatcgacttctcctcctctgaacccgcggcgggggcggacggagatccattccagccggacctggatcggcctactccgacaccggcgctttttgggaagataaacaagactgcccttcagctgagtgctcggaagaagtgggagggatttcacggttcatatccgtatctgcctcgaggaacccgctgcgagaaaaagggagtggacaggggccccccggctgggtcacgagctatggacagaaccgccaatgcggtgttggatatcgagggtctgcctcaaccacctgataaatgctgctccggaagtccaaaaatgatcagggccttgtcacgcaagggttcgaatcggatggaaatgaagggtggtgatgagctggagcagcaagaggatctgaccagaaaacttatcatcaaagttgtgccatctcagctggagcagcagcgggccatgggtcactgcactccctgcgcgcctgtcctcctcattgactccgcggaaggaaggagcagcaggaggtttggccggctcatcacgcccgtcaataaccctcggaggat

SEQ ID NO: 101641 - DNA, 824 bp, Zea Mays
ccactccagactgcactcttcttccttccgcttccgccttcgccacctcccccacctctccctccgtctggtcctgcccgcgcctcccctccccccagtccgtcgataaagccgaggcatcgggacggcggcaggtagaaggagcacccattgcttccgcatctcgcgcaggctctccccaccgcactcccacgcctgataccataccattccgccgccgcatcgacttctcctcctctgaacccgcggcgggggcggacggagatccattccagccggacctggatcggcctactccgacaccggcgtatctccggttaattaaaaaggtccgctggttaacttcttcagctttttgggaagataaacaagactgcccttcagctgagtgctcggaagaagtgggagggatttcacggttcatatccgtatctgcctcgaggaacccgctgcgagaaaaagggagtggacaggggccccccggctgggtcacgagctatggacagaaccgccaatgcggtgttggatatcgagggtctgcctcaaccacctgataaatgctgctccggaagtccaaaaatgatcagggccttgtcacgcaagggttcgaatcggatggaaatgaagggtggtgatgagctggagcagcaagaggatctgaccagaaaacttatcatcaaagttgtgccatctcagctggagcagcagcgggccatgggtcactgcactccctgcgcgcctgtcctcctcattgactccgcggaaggaaggagcagcaggaggtttggccggctcatcacgcccgtcaataaccctcggaggat

SEQ ID NO: 101642 - DNA, 3812 bp, Zea Mays
ccctcgtcctctttcggcgactctgcaatccagcgcggcccaaggatgacgaggtcgacgagatcttcctccatgcagcgctgcttgctcttcctctgaggcctgcccctggccctgtcccggtcttgtccgtctggatttcgctcaggcggggcctttcctctccttgggagtttctgcgacgactgctgctgctgctgcctctgctagctctcgtcgtaacgtaaccgccgctcctgctcctggtgctcggtcgatgcacgcagcgtagcaaccggcggcgagaagaattgcctgcttccctccctcgcggcgctcgcggccgttcatgccctgcaggaaaagagccgcctccttcccggatcccgccgcctctcgccggagatgggaggctcccgctggctgctccacttcctgctcgtctccgtgctgctgcacgtcgtccggtccctggagtcccaggcgtgccaccccgccgacctgagggcgctcctcgacttctccggcggctgggacagcaaggccgccgggctcgtcgggtggggtcccggcgccgccgcctgctgctcctggacgggcgtcgcctgcgatctcgggcgggtcgtcgcgctggatctctccaacaggagcctccacggcgtcatctcccccgcggtcgcctccctcgacggcctcgccgcgctcaacctctcccggaacgcgctccgcggcgccgcgccggaggcgctggcccgcctcccgaggctgcgggcgctcgacctcagcgccaacgcgctctccggcccgttccccgccgccggcttcccggcgatcgaggagctcaacatctccttcaacagcttcgacgggccgcaccccgcgttccccgccgcggcgaacctcacggcgcttgacgtctccgccaacaacttctccggcggcatcaactcgtccgcgctctgcctctcgccgctccaggtcctgcgcttctcggggaacgccctctccggcgagatacccagcgggttgagccagtgcagggcgctcactgacctctccctcgacggcaactgtttcaccgggaacgtccccggcgacctgtacacgctgcccaacctgaggaggctgagcttacaggaaaatcagctcactggcaacctcggcagtgaccttggcaacctctctcagatcgtgcagcttgacttgtcctataacaagttcacaggctccatccctgatgtctttggaaacatgaggtggctagagtccgtaaacctagccaccaacaggttggatggagagttgcctgcttccctgtcaagttgtccactgcttagggtaatcagcctgaggaacaactctctgtctggcgagattgctatcgacttcagccggctgccgaacctgaatactttcgatattggaaccaactatctgagtggcgctatacctcctggcatcgctgtgtgcaccgagctcaggacgctgaatcttgcaaggaacaagctcgtgggggagataccagagagcttcaaggagttgacatccctgtcgtacctctcgctgacagggaatagcttcaccaacctggcatcggcactgcaggtattgcaacacctgcccaacctgacaagcttggtgctgaccaggaatttccggggtggcgagacgataccagtggacggcatcagcgggttcaagagcatgcaggtgctcgtcctggcgaactgtttactcaccggcgtcatcccgccgtggctgcagagcttgggaagcctcaatgtgctggacatttcatggaacaagttgaatgggaatatcccgccatggctggggaagctggacaacctcttctacattgacctgtcaaacaactctttcagtggtgagctccctatcagcttcacacagatgaggagcttgacttcaactaatggctcgagcgagcggtcgccgacagaggacctcccattgttcatcaagaggaactcaactggcaaaggtctgcagtacaaccaagtcagcagcttcccaccgtcgctcatactctcgaacaatctgctcgtggggccggtcttgtcgagctttggttaccttgtgaagctccatgtcctggatctgagctggaacaacttctcagggccgatccctgacgaactgtcaaacatgtcgagcttggaagtgctgaatttagcccacaacgatctcgacgggacgataccttcgtctctaacgaggctgaattttctctccatgttcgacgtgtcgtacaacaatctgaccggagatatacctaccggcgggcagttctccacgtttgcacctgagaattttgacggcaaccctgccctgtgccttcggaactcttcgtgtgcagagaaggactcgtctgtgggagctgctggacacagtaataagaaaaggaaagctgccaccgtcgccctcggactgggaactgcggtcggggttctcctcctcgtgctctgtgcttatgtgatcgtgtcaaggatcgtccattcaaggatgcaggagcgcaatccgaaggccgtagcgaacgccgaggactcggagtgtagttccaactcctgcctggtgctgctattccaaaacaacaaagagttgagcatcgaggacatcctcaagtccaccaacaacttcgaccaggcctatatagtcgggtgcggcggtttcggcctcgtctaccggtcgacgctgccggacgggaggagagtggcgatcaaaagactgtcgggagactactcgcagatcgagcgggagttccaggccgaggtggagacgctgtcgcgggcacagcacgagaacctcgtcttgctgcaaggctactgcaaggtcggcagcgacaggctgctcatctactcgtacatggagaacggcagcctggactactggctccacgagagggccgacgacagcggggtgctgctggactggcggaagaggctacggatcgcgcagggctccgcgagggggctggcgtacctgcacatgtcctgcgacccccacatactgcaccgcgacatcaagtccagcaacatcctcctggacgacaacttcgaggctcacctggccgacttcggcttggccaggctcatctgcgcgtacgagacgcacgtcaccaccgacgtcgtcgggaccctgggctacatccctcccgagtacggccagtcgccagtggcgacctacaagggcgacgtatacagcttcggcatcgtcctgctcgagctgctcaccggccggaggcccgtcgacatgtgccggcccaaggggaccagggacgtcgtgtcgtgggtgcttcggatgaaggaggagggcagggaggctgaggtcttccatccgagcatacaccacgaggacaaccaaggccagctggtgaggatcctcgacattgcgtgcctttgtgtcaccgctgctcctaaatcgagaccgacgtcgcagcagctagtcgcgtggctggacgacatcgcggagggctgaggcttcattctttgctgcagtcctagtttcttcccagtgccttcagtttgatagtttcttaagaatgattattagctgtgtacataatatttacagagtgatatgccgagagttctcttcttgtctttctctttatctgtctagtgatgctgatgacatcaacatcttcatttacttggtaaggtggttgcaagatcaccggagagtgtaaaagtgctttgtaggcttaccctcagtacaataatctagccttgacatgagcagctttcctacagatctgtggcatgccttgtaacttgagttactcgtacgagagacattttgcaggccttattttc

SEQ ID NO: 101643 - DNA, 3199 bp, Zea Mays
ccaccccacaccctctcccatctctctctccgtgccctcctcctcccccccagtccgccccacccttccggccctccccctcttttatatccagtaccatggtgatctccgagctcgggtgagctgatgagaatgcggccgatttgaggaaggctgtgggcgcgatggatgcggtttcgggcggattcgctaggaggctgtagaggttaggttccggtgtcccccggcccggccggtcgtgggagatgagctcctcgtccgcggccagcatcgggcagccgccgccgcccgcgccgccgccggaagaagagaagaagtgcctcaactcggagctgtggcacgcctgcgccggcccgctcgtctgcctccccaccgtcggtacgcgcgtcgtctacttcccgcagggccacagcgagcaggtggcagcgtcgacgaacaaggaggtggacgggcacatccccaactaccccaacctgccgccgcagctgatctgccagctccatgatgtcacaatgcatgcggatgtggagacagacgaagtgtacgcgcagatgacgctgcagccgctcaatccacaagagcagaacgacgcgtacctgcctgccgagatgggaatcatgagcaagcagccgacgaattacttctgcaagacgctgactgcgagcgacaccagcacgcacggcgggttctctgtgccccgtcgtgcggccgagcgcgtcttccccccgctggatttcacacagcagcctccagcacaggagcttattgcacgggatattcatgatgttgagtggaagttcaggcatatcttccgaggccagcccaaaagacacctgctgacgactggctggagtgtgtttgtcagtgctaagagacttgttgctggagattctgtgctattcatatggaatgagaaaaaccagcttttgcttggaatcagacacgctacccggccacagactgtgatgccctcttctgttctttcgagtgacagcatgcacatcggactccttgcagcagcagctcatgctgctgcaacaaacagccgcttcacaattttctataatcctagggcaagtccaacagaatttgttatacccctttcgaaatacatcaaggctgtttttcacacgcggatatcagttgggatgcgattcaggatgttatttgagactgaggaatcaagtgtccgcaggtacatggggacaataacagaagtgagtgatgctgacccagtgcgttggcctagttcctattggagatcagtgaaggttggttgggatgaatcaaccgcaggagaaaggccacctagagtttctctgtgggaaattgagccactgacaacctttcctatgtatccatccctgttcccactgcgagttaagcatccttggtattcaggacttgctgctcttcatgatgacagcaatgctttgatgtggctgagaggagtaaccggtgaagggggctttcattctttgaacttccagtcacctggtataggttcctggggacaacagagactccatccatccttacttagcaatgaccatgatcagtatcaagcagtggttgctgccgcagctgcctcccagtccggtggttatctgaagcagcaattcctacaccttcaacaacctatgcagtccccacaggagcagtgcaatctcaatccgctgttgcagcaacaaatactacagcaagcgagccaacagcagatggttagttctgatgctcaaaatattcagtccgtgctcaacccaggtgctattcagcagcagctccaccaactccagcagatgcagcatactcataatgaccagaagcaaaagattcaaccagatcaacagtaccaagttgctagcagtgcggttctcccgagtccaacatcattaccaagccatttgcgtgaaaaatttggcttctctgatcctaatgtgaactcttccagcttcatcagctctagcagcaacgaaaacatgctggaatcaaacttccttcaggtaagttcaaaatccgtggatttgtctagattcaaccaaccagtagttagcgagcagcagcagccgcaacaacaacaggcatggaagcaaaagtttatgggctcacagtcaatgtcttttgggggctcggtttcgcttaactcgcccactagcaaagatggttctgttgacaacaaagttggtcgtgatgtgcagaaccagtccctttttagccctcaagtcgactcttcctccctactgtacaatatggtacctaatcttacctcaaatgttgctgataataatatatcagcgtttccctctggatcaacatatctgcaaagtccaatgtatggttgtctggatgactcttctggtttattgcaaaatacaggagagaatgatccgacaactagaacttttgttaaggtttacaagtcaggatcagtggggagatccttggacatcacccggttctctaattatgctgaacttcgagaggaactgggtcagatgttcggcattaagggtcagttggacgaccctgatagatcaggctggcagcttgtatttgtcgacagggagaacgatgtgcttctccttggagacgacccgtgggagtaagaaaccatcactacaattatagtttcaaattgtgattttcaatagtatatacatttgaattttttatatctttacaatgtattagaaaaaatatcacactgcatagttcacgctctgatagagtgatagtaacttgttttttttttgtttaatttgtgtaggcagtttttttacccaactgcccattagcctcatcaatatctattgtcccttgcatttgaatggacctacatgttgttttcaatggctcctgatgacctcagacatatctacatgtgcttgattctggcatacatctactatatgcattcaagttacaaaaatgattaatccacgtcccttgatttatgatacttcaatactcaggaagccattttagctaatggctctcagtgtcagcctgataactggggtttgggggtcatctcggtcatgcgaacgagttgttttgtcttaatgcaacacccgggggaggtcttcctccctcctttattacaaactaaagcttacttgtgatacggatatcatgtttctggatattttaagtgatggatgcaacatatcaatcttagtgtgtgcattattatgcatgc

SEQ ID NO: 101644 - DNA, 3159 bp, Zea Mays
ccaccccacaccctctcccatctctctctccgtgccctcctcctcccccccagtccgccccacccttccggccctccccctcttttatatccagtaccatggtgatctccgagctcgggtgagctgatgagaatgcggccgatttgaggaaggctgtgggcgcgatggatgcggtttcgggcggattcgctaggaggctgtagaggttaggttccggtgtcccccggcccggccggtcgtgggagatgagctcctcgtccgcggccagcatcgggcagccgccgccgcccgcgccgccgccggaagaagagaagaagtgcctcaactcggagctgtggcacgcctgcgccggcccgctcgtctgcctccccaccgtcggtacgcgcgtcgtctacttcccgcagggccacagcgagcaggtggcagcgtcgacgaacaaggaggtggacgggcacatccccaactaccccaacctgccgccgcagctgatctgccagctccatgatgtcacaatgcatgcggatgtggagacagacgaagtgtacgcgcagatgacgctgcagccgctcaatccacaagagcagaacgacgcgtacctgcctgccgagatgggaatcatgagcaagcagccgacgaattacttctgcaagacgctgactgcgagcgacaccagcacgcacggcgggttctctgtgccccgtcgtgcggccgagcgcgtcttccccccgctggatttcacacagcagcctccagcacaggagcttattgcacgggatattcatgatgttgagtggaagttcaggcatatcttccgaggccagcccaaaagacacctgctgacgactggctggagtgtgtttgtcagtgctaagagacttgttgctggagattctgtgctattcatatggaatgagaaaaaccagcttttgcttggaatcagacacgctacccggccacagactgtgatgccctcttctgttctttcgagtgacagcatgcacatcggactccttgcagcagcagctcatgctgctgcaacaaacagccgcttcacaattttctataatcctagggcaagtccaacagaatttgttatacccctttcgaaatacatcaaggctgtttttcacacgcggatatcagttgggatgcgattcaggatgttatttgagactgaggaatcaagtgtccgcaggtacatggggacaataacagaagtgagtgatgctgacccagtgcgttggcctagttcctattggagatcagtgaaggttggttgggatgaatcaaccgcaggagaaaggccacctagagtttctctgtgggaaattgagccactgacaacctttcctatgtatccatccctgttcccactgcgagttaagcatccttggtattcaggacttgctgctcttcatgatgacagcaatgctttgatgtggctgagaggagtaaccggtgaagggggctttcattctttgaacttccagtcacctggtataggttcctggggacaacagagactccatccatccttacttagcaatgaccatgatcagtatcaagcagtggttgctgccgcagctgcctcccagtccggtggttatctgaagcagcaattcctacaccttcaacaacctatgcagtccccacaggagcagtgcaatctcaatccgctgttgcagcaacaaatactacagcaagcgagccaacagcagatggttagttctgatgctcaaaatattcagtccgtgctcaacccaggtgctattcagcagcagctccaccaactccagcagatgcagcatactcataatgaccagaagcaaaagattcaaccagatcaacagtaccaagttgctagcagtgcggttctcccgagtccaacatcattaccaagccatttgcgtgaaaaatttggcttctctgatcctaatgtgaactcttccagcttcatcagctctagcagcaacgaaaacatgctggaatcaaacttccttcaggtaagttcaaaatccgtggatttgtctagattcaaccaaccagtagttagcgagcagcagcagccgcaacaacaacaggcatggaagcaaaagtttatgggctcacagtcaatgtcttttgggggctcggtttcgcttaactcgcccactagcaaagatggttctgttgacaacaaagttggtcgtgatgtgcagaaccagtccctttttagccctcaagtcgactcttcctccctactgtacaatatggtacctaatcttacctcaaatgttgctgataataatatatcagcgtttccctctggatcaacatatctgcaaagtccaatgtatggttgtctggatgactcttctggtttattgcaaaatacaggagagaatgatccgacaactagaacttttgttaaggtttacaagtcaggatcagtggggagatccttggacatcacccggttctctaattatgctgaacttcgagaggaactgggtcagatgttcggcattaagggtcagttggacgaccctgatagatcaggctggcagcttgtatttgtcgacagggagaacgatgtgcttctccttggagacgacccgtgggagtcatttgtgaatagtgtatggtacatcaagatactttcacctgaggatgtgcataagatgggaaagccaggaaacgatccacgctacctatcttagctacctatcttaaatcgatacatggagctctttctggctcccatgacgattctgcggcacactgcagcactgttcacgacggccctgctctactgtgctcgcatgttcgcccgtgtcatctctactctctagcatgcacaccgtgctcgtcttcagaagacgaactccccgtcgcttgtatccggtgcaggtcacccgctcctggactgatattttgtaggttccacgtaggaatcagtatcagcaactctatcctagtttgtggtaggctcgcgcggcgctcgttcctgtgtcgcatcaggatcttcggactaaaatgcgtagtcgaaaccgttctcgtgattcgtaagctattcatgtatttgaggattcctcgacatgctttcgacgatgaactgcaataatctgaatgcaggaggattgtttgagatttgtacttcagttttgtgtctgccggttt

SEQ ID NO: 101645 - DNA, 815 bp, Zea Mays
aagtataatcgagtctactaaaaacaaatttaagcccttcctcatgtaatcattttttaaaattcaggtttacaagtcaggatcagtggggagatccttggacatcacccggttctctaattatgctgaacttcgagaggaactgggtcagatgttcggcattaagggtcagttggacgaccctgatagatcaggctggcagcttgtatttgtcgacagggagaacgatgtgcttctccttggagacgacccgtgggagtcatttgtgaatagtgtatggtacatcaagatactttcacctgaggatgtgcataagatgggaaagccaggaaacgatccacgctacctatcttagctacctatcttaaatcgatacatggagctctttctggctcccatgacgattctgcggcacactgcagcactgttcacgacggccctgctctactgtgctcgcatgttcgcccgtgtcatctctactctctagcatgcacaccgtgctcgtcttcagaagacgaactccccgtcgcttgtatccggtgcaggtcacccgctcctggactgatattttgtaggttccacgtaggaatcagtatcagcaactctatcctagtttgtggtaggctcgcgcggcgctcgttcctgtgtcgcatcaggatcttcggactaaaatgcgtagtcgaaaccgttctcgtgattcgtaagctattcatgtatttgaggattcctcgacatgctttcgacgatgaactgcaataatctgaatgcaggaggattgtttgagatttgtacttcagttttgtgtctgccggttt

SEQ ID NO: 101646 - DNA, 988 bp, Zea Mays
tcggcccaaaccaagtagcgtctagggttttagcctctccaaccgcacgatggacaccgacgcgagaaggcagggggagagaaaatggcgtatttgtcccgcacagccgccgccgtcgccgtcgccgtgaggtcggcggtccgctccgcacctctcactggccgcgtcctcggagcgccactgccttcccttgcctcgccttccgctgcccggtccgcccgaatcctccgcaggacggcggccgcggcgtcggcggggctggagactctaatgccgctgcacagcgcggtggcggccgcgcggcttaggtcctgcatcgtcgtcgactcctcgtgctggagctcgctctcgcaaggtttaaacaagcgcatctgatcatggctaggagctgagcacagaagagaagtgaggacaacgagttagaacgaagtcatctcttttgcagatatttgtaacatgtactactttggttgttgctctatgtgtttgctcatgtcttcaatggagcatgcaaaatagttccttgtaacttgcttggctcttattttcagtttggtcatgagctatgctgaaggaaaaaacttgtacttgtaataaaaaaacacttcagttttttctttaggtgtgcaaaattactccatttgaaataatggcagcatatggtattacatcttgtatccatggcctgacttgctcttgtatttggtgatataggatatgctttgcctttatgagaggagaggtgcacctgaagaaaccaatgaacattaggaattacaaacaagggctgtaataatgtgattgttgtaaactaattttacctttgatgttcattgaatcatccacagatgtacaactggcatttgttgatgttgggattttatttacgtggatccatgaattacctgcagctcctctttcaaacggttgcttcattattggcattgggatgctcagatattattttcaattccgatgtaggcatcac

SEQ ID NO: 101647 - DNA, 679 bp, Zea Mays
tcggcccaaaccaagtagcgtctagggttttagcctctccaaccgcacgatggacaccgacgcgagaaggcagggggagagaaaatggcgtatttgtcccgcacagccgccgccgtcgccgtcgccgtgaggtcggcggtccgctccgcacctctcactggccgcgtcctcggagcgccactgccttcccttgcctcgccttccgctgcccggtccgcccgaatcctccgcaggacggcggccgcggcgtcggcggggctggagactctaatgccgctgcacagcgcggtggcggccgcgcggcttaggtcctgcatcgtcgtcgactcctcgtgctggagctcgctctcgcaaggtttaaacaagcgcatctgatcatggctaggagctgagcacagaagagaagatatgctttgcctttatgagaggagaggtgcacctgaagaaaccaatgaacattaggaattacaaacaagggctgtaataatgtgattgttgtaaactaattttacctttgatgttcattgaatcatccacagatgtacaactggcatttgttgatgttgggattttatttacgtggatccatgaattacctgcagctcctctttcaaacggttgcttcattattggcattgggatgctcagatattattttcaattccgatgtaggcatcac

SEQ ID NO: 101648 - DNA, 659 bp, Zea Mays
tcggcccaaaccaagtagcgtctagggttttagcctctccaaccgcacgatggacaccgacgcgagaaggcagggggagagaaaatggcgtatttgtcccgcacagccgccgccgtcgccgtcgccgtgaggtcggcggtccgctccgcacctctcactggccgcgtcctcggagcgccactgccttcccttgcctcgccttccgctgcccggtccgcccgaatcctccgcaggacggcggccgcggcgtcggcggggctggagactctaatgccgctgcacagcgcggtggcggccgcgcggcttaggtcctgcatcgtcgtcgactcctcgtgctggagctcgctctcgcaaggatatgctttgcctttatgagaggagaggtgcacctgaagaaaccaatgaacattaggaattacaaacaagggctgtaataatgtgattgttgtaaactaattttacctttgatgttcattgaatcatccacagatgtacaactggcatttgttgatgttgggattttatttacgtggatccatgaattacctgcagctcctctttcaaacggttgcttcattattggcattgggatgctcagatattattttcaattccgatgtaggcatcacttgaaatagcttcaattatgtgccttcctt

SEQ ID NO: 101649 - DNA, 1653 bp, Zea Mays
atagaaaacactagtactgtcccctcccggacatcagagacagacacagtagagacgaggcagaggcttctagatctactgccagctcggcagcaacaaagccgaagcgtctcgcgtgcgcggccgccaccggggattagggatggcggcgaagaaggtgctcatgctctgcggcgactacatggaggactacgaggtcatggtcccgttccaagcgctgcaagcgtatggggtgtccgtggacgccgtctgccctagcaagaaggccggcgacatctgccgcaccgccgtccatcagctgaccggtcaccagacatactctgagacaaaaggccataatttcacactgaatgcttcatttgatgagattactgctagtgaatatgatggattggtaattcctggagggcgtgcaccagaataccttgcgatggatgaaaaggtgcttgacctagtcagaatgttctctggtgctaagaagcctattgcatcagtttgtcatggacagttgattttagcggcagcaagagtagtcgagaaccgtacctgcacagcatttccggctgttaaaccagttttggttgctgctggtgccaagtgggaagagcctgacacaatggcaaaatgcactgttgatggcaatctcatcacagcagcgacttataattctcatcccgaattcatcagcctatttgtcaaagcactcggaggttcagtggcaggctcagataagagaatactgttcctatgtggggactacatggaggattatgaggtcatggtcccattccaggctctccaagctcttggctgccatgtcgatgccgtttgccccgacaagggagctggggagacgtgcccgacagccattcatgatttcgaaggtgaccagacctacagcgagaagcctggccacgattttactctgacagcgtcgtttggaagtgtggatgcttcgagctacgacgcgcttgtggttcctggcggacgggctccagagtacctggctctgaacgataaggtcatcagcttggtgaaggccttcgcggagagcggaaagccaatcgcgtcgatctgccacggccagcagatattatccgctgccggagtcctcaaggggaagaagtgcaccgcatacccagccgtgaagctgaacgtgttgctcggtggcgggacctggctggagcctgacccgatccaccgctgcttcaccgatggcaaccttgtgaccggcgcagcctggccaggccacccagagttcgtgtcccagctcatggcgttgctcggcgtcaaggtttccttctgaagtccaaactgaaagggcaaggcagaaagagctctggctcaacctggggaggggcgtgatagcatagctttggatttccagatagaagagaacagactcaaaacgacaccttatagcgatcgctgcacttaatccttgttccatgcgcagcaagcctcaggcttattacccttgtttgtcagcgttgtgtaaaaactgtaacccggatgctgtttcttcttcttcttcttggttccttcttttttctgagtcgtcctttgtggattcaaataataaataaagtcttgtatactgctgtttgttgatctggtactgtgcttcgagcagctagatggccaacaaagaaa

SEQ ID NO: 101650 - DNA, 1767 bp, Zea Mays
atagaaaacactagtactgtcccctcccggacatcagagacagacacagtagagacgaggcagaggcttctagatctactgccagctcggcagcaacaaagccgaagcgtctcgcgtgcgcggccgccaccggggattagggatggcggcgaagaaggtgctcatgctctgcggcgactacatggaggactacgaggtctcttcctctctccccctcttctcgcgtcgcctcctgctgaattacatgtattttggatcgggaatcagccctcctgaaacaaaatcggttcttgaattgatgctgggttaggtcatggtcccgttccaagcgctgcaagcgtatggggtgtccgtggacgccgtctgccctagcaagaaggccggcgacatctgccgcaccgccgtccatcagctgaccggtcaccagacatactctgagacaaaaggccataatttcacactgaatgcttcatttgatgagattactgctagtgaatatgatggattggtaattcctggagggcgtgcaccagaataccttgcgatggatgaaaaggtgcttgacctagtcagaatgttctctggtgctaagaagcctattgcatcagtttgtcatggacagttgattttagcggcagcaagagtagtcgagaaccgtacctgcacagcatttccggctgttaaaccagttttggttgctgctggtgccaagtgggaagagcctgacacaatggcaaaatgcactgttgatggcaatctcatcacagcagcgacttataattctcatcccgaattcatcagcctatttgtcaaagcactcggaggttcagtggcaggctcagataagagaatactgttcctatgtggggactacatggaggattatgaggtcatggtcccattccaggctctccaagctcttggctgccatgtcgatgccgtttgccccgacaagggagctggggagacgtgcccgacagccattcatgatttcgaaggtgaccagacctacagcgagaagcctggccacgattttactctgacagcgtcgtttggaagtgtggatgcttcgagctacgacgcgcttgtggttcctggcggacgggctccagagtacctggctctgaacgataaggtcatcagcttggtgaaggccttcgcggagagcggaaagccaatcgcgtcgatctgccacggccagcagatattatccgctgccggagtcctcaaggggaagaagtgcaccgcatacccagccgtgaagctgaacgtgttgctcggtggcgggacctggctggagcctgacccgatccaccgctgcttcaccgatggcaaccttgtgaccggcgcagcctggccaggccacccagagttcgtgtcccagctcatggcgttgctcggcgtcaaggtttccttctgaagtccaaactgaaagggcaaggcagaaagagctctggctcaacctggggaggggcgtgatagcatagctttggatttccagatagaagagaacagactcaaaacgacaccttatagcgatcgctgcacttaatccttgttccatgcgcagcaagcctcaggcttattacccttgtttgtcagcgttgtgtaaaaactgtaacccggatgctgtttcttcttcttcttcttggttccttcttttttctgagtcgtcctttgtggattcaaataataaataaagtcttgtatactgctgtttgttgatctggtactgtgcttcgagcagctagatggccaacaaagaaa

SEQ ID NO: 101651 - DNA, 238 bp, Zea Mays
atttttttctttgtttgtttttttttttttttgtaaaaaaagcaaagaacaacaaaagctaacgaacgcagaaaaaagagggatcgaaaggaaagcgagaagacagcgcggaatggcagaaacgaagaacgaacttggcaagagcaaattcagatcagatcgcgttcacctgtcctgcgttgtgccaagcgcgatgatcgacataggattttagataatcttccgtgccttttttttt

SEQ ID NO: 101652 - DNA, 656 bp, Zea Mays
tagaaaaaatatgaaatgcgtggatggaagcgaaatagaggcgctgggccgctggcacggagaaacaacgcagcgtaaggcgcgccagccgtggacgtgtacgtgtacccgtgtcgtgtctaaacggacttcctcatctccgcgtctatttaaggcccactcctcgcatcgcctttaactcccatcccagatcaggattagccgaccacccgccgaaggccagagagaaatatctcatcttctctccaccggatcggttcaatcgagagcgagggagaaagggaggtggtgcgtcgaggggggccgagattttgccggtttggagccagataggggtatgagctgcttcgcgcaccgccgccgctccgacgtcgcccgccgccaggacggcctcctcgtcttcgtcttcttcctctcgattcccatacgtaccagtagttttaatttaagtagtagtaattgtagtagcaatctcttgtaaactgcgctcgcctttgcgtgttcgtggtccttttgcgctttctcgtccctctttctctcaatctctccttattcttctccttccacggcgaagccggcggctggtatggatcccaatggcctcaaaactggaggtattgaaatttcgttttatctctctgtttttatgatgttta

SEQ ID NO: 101653 - DNA, 2411 bp, Zea Mays
tagaaaaaatatgaaatgcgtggatggaagcgaaatagaggcgctgggccgctggcacggagaaacaacgcagcgtaaggcgcgccagccgtggacgtgtacgtgtacccgtgtcgtgtctaaacggacttcctcatctccgcgtctatttaaggcccactcctcgcatcgcctttaactcccatcccagatcaggattagccgaccacccgccgaaggccagagagaaatatctcatcttctctccaccggatcggttcaatcgagagcgagggagaaagggaggtggtgcgtcgaggggggccgagattttgccggtttggagccagataggggtatgagctgcttcgcgcaccgccgccgctccgacgtcgcccgccgccaggacggcctcctcgtcttcgtcttcttcctctcgattcccatacgtaccagtagttttaatttaagtagtagtaattgtagtagcaatctcttgtaaactgcgctcgcctttgcgtgttcgtggtccttttgcgctttctcgtccctctttctctcaatctctccttattcttctccttccacggcgaagccggcggctggtatggatcccaatggcctcaaaactggagatattttgttctcacctggttggctggttccgtatgaatctcgtcctgatctcaaataaataaatgaaaaaaatccaggccttttgctcccgaccatcgagaggcggtgcacgtcgcctccatccgtcattgtcatcggcggtggcatctcgggcgttgcagctgcccgtgccctctccaattcttcatttaaggtgactgttttggaatcgagagatcgtattggcgggcgcattcatactgataactcgtttggatgcccaattgatatgggagcctcatggctacacggcgtgtgcaatgagaatccactggcaccattgataagctatcttgggctgaggttataccgcacaagcgatgataactcagttctgtatgatcatgatttagaaagctatgctctctttgataaggatggtaatcaggtcccaaaggagacagtcgataaagttggagaaacattcgagagaattcttgaagagacggtgaaagtgcgcgatgagcaggaacacgacatgccactgctacaggcaatttctattgtgtttgagaggcacccccatctaaagcttgaagggctagatgatcaggtcttacaatggtgtgtctgccggcttgaggcatggtttgctgcagatgcagatgaaatatctctgaagaactgggatcaggagcgtgttcttactggtggacatggactgatggtaaatgggtactatcctgttattgaagctcttgctcaaggtcttgacatcaggcttaaccaaagggtcaccgaaattacccgccagcacaatggagtcaaggtcactactgaagatggcacaagctacttggccgacgcctgcataatctcagtgccactcggcgtgctcaaggcgaacgtaataaagttcgagcctgagctgccccagtggaagagctccgccatcgccgacctcggcgtgggcaccgagaacaagatcgccatgcacttcgacagggtcttttggcccaacgtcgaggtgctgggaatggtcgggccgacgcccaaagcctgtgggtacttcctgaacctgcacaaagccaccggcaatccggtcctcgtgtacatggccgccggaaggttcgcccaggaggtggagaagctgtcggacaaggaagccgtcggcctggtcgtttctcacctgaagaagatgctcccggatgccactgaaccgacgcagtacctggtgtcgcgatggggctccgaccccaactccctggggtcctactcgtgcgacctggtcgcgaagccggccgacgtgtgcgcgaggttcgccgcccccgtcgagaacctgcacttcgccggcgaggcggccagtgccgagcactcggggtccgtgcacggcgcctactcgtcgggcatcgccgctgccgaggaatgcaggaagcggctcctggcgctgaagggcatcccggacctggtccaggtcgcggcgtgggaggagatggccggagctgtggctcctctgcagatttgcaggacctgagtgagattggatcactggctgcctttggacattggagtggatcgtggatcgcttcgctgctccctgatggttgccgagtctttttttatatttaccttaccttgaaggccgttgtgtcttgtctggaataaatcaagattgactggcactgaaagtgtcatcgcgtcactctttcatacttattaataaatatcacaagtctgtcctgagatctcagcctggtgcctgcgtgctgcctttgccttgtatatgacgttttactttcttttagtctcaattattc

SEQ ID NO: 101654 - DNA, 2190 bp, Zea Mays
tagaaaaaatatgaaatgcgtggatggaagcgaaatagaggcgctgggccgctggcacggagaaacaacgcagcgtaaggcgcgccagccgtggacgtgtacgtgtacccgtgtcgtgtctaaacggacttcctcatctccgcgtctatttaaggcccactcctcgcatcgcctttaactcccatcccagatcaggattagccgaccacccgccgaaggccagagagaaatatctcatcttctctccaccggatcggttcaatcgagagcgagggagaaagggaggtggtgcgtcgaggggggccgagattttgccggtttggagccagataggggtatgagctgcttcgcgcaccgccgccgctccgacgtcgcccgccgccaggacggcctcctcgtcttcgtcttcttcctctcgattcccggcgaagccggcggctggtatggatcccaatggcctcaaaactggaggccttttgctcccgaccatcgagaggcggtgcacgtcgcctccatccgtcattgtcatcggcggtggcatctcgggcgttgcagctgcccgtgccctctccaattcttcatttaaggtgactgttttggaatcgagagatcgtattggcgggcgcattcatactgataactcgtttggatgcccaattgatatgggagcctcatggctacacggcgtgtgcaatgagaatccactggcaccattgataagctatcttgggctgaggttataccgcacaagcgatgataactcagttctgtatgatcatgatttagaaagctatgctctctttgataaggatggtaatcaggtcccaaaggagacagtcgataaagttggagaaacattcgagagaattcttgaagagacggtgaaagtgcgcgatgagcaggaacacgacatgccactgctacaggcaatttctattgtgtttgagaggcacccccatctaaagcttgaagggctagatgatcaggtcttacaatggtgtgtctgccggcttgaggcatggtttgctgcagatgcagatgaaatatctctgaagaactgggatcaggagcgtgttcttactggtggacatggactgatggtaaatgggtactatcctgttattgaagctcttgctcaaggtcttgacatcaggcttaaccaaagggtcaccgaaattacccgccagcacaatggagtcaaggtcactactgaagatggcacaagctacttggccgacgcctgcataatctcagtgccactcggcgtgctcaaggcgaacgtaataaagttcgagcctgagctgccccagtggaagagctccgccatcgccgacctcggcgtgggcaccgagaacaagatcgccatgcacttcgacagggtcttttggcccaacgtcgaggtgctgggaatggtcgggccgacgcccaaagcctgtgggtacttcctgaacctgcacaaagccaccggcaatccggtcctcgtgtacatggccgccggaaggttcgcccaggaggtggagaagctgtcggacaaggaagccgtcggcctggtcgtttctcacctgaagaagatgctcccggatgccactgaaccgacgcagtacctggtgtcgcgatggggctccgaccccaactccctggggtcctactcgtgcgacctggtcgcgaagccggccgacgtgtgcgcgaggttcgccgcccccgtcgagaacctgcacttcgccggcgaggcggccagtgccgagcactcggggtccgtgcacggcgcctactcgtcgggcatcgccgctgccgaggaatgcaggaagcggctcctggcgctgaagggcatcccggacctggtccaggtcgcggcgtgggaggagatggccggagctgtggctcctctgcagatttgcaggacctgagtgagattggatcactggctgcctttggacattggagtggatcgtggatcgcttcgctgctccctgatggttgccgagtctttttttatatttaccttaccttgaaggccgttgtgtcttgtctggaataaatcaagattgactggcactgaaagtgtcatcgcgtcactctttcatacttattaataaatatcacaagtctgtcctgagatctcagcctggtgcctgcgtgctgcctttgccttgtatatgacgttttactttcttttagtctcaattattc

SEQ ID NO: 101655 - DNA, 2094 bp, Zea Mays
tagaaaaaatatgaaatgcgtggatggaagcgaaatagaggcgctgggccgctggcacggagaaacaacgcagcgtaaggcgcgccagccgtggacgtgtacgtgtacccgtgtcgtgtctaaacggacttcctcatctccgcgtctatttaaggcccactcctcgcatcgcctttaactcccatcccagatcaggattagccgaccacccgccgaaggccagagagaaatatctcatcttctctccaccggatcggttcaatcgagagcgagggagaaagggaggtggtgcgtcgaggggggccgagattttgccggtttggagccagatagggccggcggctggtatggatcccaatggcctcaaaactggaggccttttgctcccgaccatcgagaggcggtgcacgtcgcctccatccgtcattgtcatcggcggtggcatctcgggcgttgcagctgcccgtgccctctccaattcttcatttaaggtgactgttttggaatcgagagatcgtattggcgggcgcattcatactgataactcgtttggatgcccaattgatatgggagcctcatggctacacggcgtgtgcaatgagaatccactggcaccattgataagctatcttgggctgaggttataccgcacaagcgatgataactcagttctgtatgatcatgatttagaaagctatgctctctttgataaggatggtaatcaggtcccaaaggagacagtcgataaagttggagaaacattcgagagaattcttgaagagacggtgaaagtgcgcgatgagcaggaacacgacatgccactgctacaggcaatttctattgtgtttgagaggcacccccatctaaagcttgaagggctagatgatcaggtcttacaatggtgtgtctgccggcttgaggcatggtttgctgcagatgcagatgaaatatctctgaagaactgggatcaggagcgtgttcttactggtggacatggactgatggtaaatgggtactatcctgttattgaagctcttgctcaaggtcttgacatcaggcttaaccaaagggtcaccgaaattacccgccagcacaatggagtcaaggtcactactgaagatggcacaagctacttggccgacgcctgcataatctcagtgccactcggcgtgctcaaggcgaacgtaataaagttcgagcctgagctgccccagtggaagagctccgccatcgccgacctcggcgtgggcaccgagaacaagatcgccatgcacttcgacagggtcttttggcccaacgtcgaggtgctgggaatggtcgggccgacgcccaaagcctgtgggtacttcctgaacctgcacaaagccaccggcaatccggtcctcgtgtacatggccgccggaaggttcgcccaggaggtggagaagctgtcggacaaggaagccgtcggcctggtcgtttctcacctgaagaagatgctcccggatgccactgaaccgacgcagtacctggtgtcgcgatggggctccgaccccaactccctggggtcctactcgtgcgacctggtcgcgaagccggccgacgtgtgcgcgaggttcgccgcccccgtcgagaacctgcacttcgccggcgaggcggccagtgccgagcactcggggtccgtgcacggcgcctactcgtcgggcatcgccgctgccgaggaatgcaggaagcggctcctggcgctgaagggcatcccggacctggtccaggtcgcggcgtgggaggagatggccggagctgtggctcctctgcagatttgcaggacctgagtgagattggatcactggctgcctttggacattggagtggatcgtggatcgcttcgctgctccctgatggttgccgagtctttttttatatttaccttaccttgaaggccgttgtgtcttgtctggaataaatcaagattgactggcactgaaagtgtcatcgcgtcactctttcatacttattaataaatatcacaagtctgtcctgagatctcagcctggtgcctgcgtgctgcctttgccttgtatatgacgttttactttcttttagtctcaattattc

SEQ ID NO: 101656 - DNA, 2336 bp, Zea Mays
tagaaaaaatatgaaatgcgtggatggaagcgaaatagaggcgctgggccgctggcacggagaaacaacgcagcgtaaggcgcgccagccgtggacgtgtacgtgtacccgtgtcgtgtctaaacggacttcctcatctccgcgtctatttaaggcccactcctcgcatcgcctttaactcccatcccagatcaggattagccgaccacccgccgaaggccagagagaaatatctcatcttctctccaccggatcggttcaatcgagagcgagggagaaagggaggtggtgcgtcgaggggggccgagattttgccggtttggagccagataggggtatgagctgcttcgcgcaccgccgccgctccgacgtcgcccgccgccaggacggcctcctcgtcttcgtcttcttcctctcgattcccatacgtaccagtagttttaatttaagtagtagtaattgtagtagcaatctcttgtaaactgcgctcgcctttgcgtgttcgtggtccttttgcgctttctcgtccctctttctctcaatctctccttattcttctccttccacggcgaagccggcggctggtatggatcccaatggcctcaaaactggaggccttttgctcccgaccatcgagaggcggtgcacgtcgcctccatccgtcattgtcatcggcggtggcatctcgggcgttgcagctgcccgtgccctctccaattcttcatttaaggtgactgttttggaatcgagagatcgtattggcgggcgcattcatactgataactcgtttggatgcccaattgatatgggagcctcatggctacacggcgtgtgcaatgagaatccactggcaccattgataagctatcttgggctgaggttataccgcacaagcgatgataactcagttctgtatgatcatgatttagaaagctatgctctctttgataaggatggtaatcaggtcccaaaggagacagtcgataaagttggagaaacattcgagagaattcttgaagagacggtgaaagtgcgcgatgagcaggaacacgacatgccactgctacaggcaatttctattgtgtttgagaggcacccccatctaaagcttgaagggctagatgatcaggtcttacaatggtgtgtctgccggcttgaggcatggtttgctgcagatgcagatgaaatatctctgaagaactgggatcaggagcgtgttcttactggtggacatggactgatggtaaatgggtactatcctgttattgaagctcttgctcaaggtcttgacatcaggcttaaccaaagggtcaccgaaattacccgccagcacaatggagtcaaggtcactactgaagatggcacaagctacttggccgacgcctgcataatctcagtgccactcggcgtgctcaaggcgaacgtaataaagttcgagcctgagctgccccagtggaagagctccgccatcgccgacctcggcgtgggcaccgagaacaagatcgccatgcacttcgacagggtcttttggcccaacgtcgaggtgctgggaatggtcgggccgacgcccaaagcctgtgggtacttcctgaacctgcacaaagccaccggcaatccggtcctcgtgtacatggccgccggaaggttcgcccaggaggtggagaagctgtcggacaaggaagccgtcggcctggtcgtttctcacctgaagaagatgctcccggatgccactgaaccgacgcagtacctggtgtcgcgatggggctccgaccccaactccctggggtcctactcgtgcgacctggtcgcgaagccggccgacgtgtgcgcgaggttcgccgcccccgtcgagaacctgcacttcgccggcgaggcggccagtgccgagcactcggggtccgtgcacggcgcctactcgtcgggcatcgccgctgccgaggaatgcaggaagcggctcctggcgctgaagggcatcccggacctggtccaggtcgcggcgtgggaggagatggccggagctgtggctcctctgcagatttgcaggacctgagtgagattggatcactggctgcctttggacattggagtggatcgtggatcgcttcgctgctccctgatggttgccgagtctttttttatatttaccttaccttgaaggccgttgtgtcttgtctggaataaatcaagattgactggcactgaaagtgtcatcgcgtcactctttcatacttattaataaatatcacaagtctgtcctgagatctcagcctggtgcctgcgtgctgcctttgccttgtatatgacgttttactttcttttagtctcaattattcaaa

SEQ ID NO: 101657 - DNA, 2626 bp, Zea Mays
ttcctgttctatccccgtcaccctttttcaccccaccccattctccttcttcctccagagtccagacggcgtgcttccgcctgccgccgccggcgagctgcttgcccgcagcatgactccgcatcctggccgcctcgtcctaccaccggcggctccttctccctgaaccccgccgcgcgccaggcaccacgcctccctccgcagtcacacgagcacgcggccgtcctctgccgcaccgcgccgcctccagacgcctcgctcgtcaggtctctccacctccgcctgcgaacgttcggcccagctccggcgagttcctccgcaattccggatctgctggagcgccagcaaggcggtctctccaaccctccggagtccggaccagcaagggttctgatctcccatgccacagtttataacgttgaaggattcaaaaatctacagaactagatgatacttgcataatgcagtcctcaggtatttggaaggcgcatgctggttcatcacagtcagagggttcgggtctggatatggagaggaacggatgcaatcataattattgtccatctcctctccaaccaattgcctcagctggtcagcactctgaaagcagcgctgcatacttttcttggcctacatctactctaatgcacgggtcagctgaaggccgtgctaattactttgggaacctacagaagggtgtactaccaggacatcttggtcgcttgccaaagggccagcaagctaccaccttacttgatttaatgattataagagcattccacagcaagatcctccgccggtttagtcttggtacagcaataggctttagaatcaggaaaggaacattgactgacacacctgccatccttgtgtttgttgctcgaaaggttcacaggaagtggctcagcgctactcaatgtcttccaactgcccttgagggacctgggggtgtgtggtgtgatgttgatgttgttgaattttcttattatggtgcaccagccccaacaccaaaggaacaactttatgatgagcttgttgatggattgcgtggtagcgaccctattgtaggctcaggttcacaggtggctagtcttgagacctatgggactttgggtgccattgtgaagagtcaaactggcaataaacaagttgggttccttacaaacaggcatgttgcggttgatctggattatcccaaccagaagatgttccatccgctacctcctaatcttgggcctggagtttacctaggtgccgttgagagagcaacatcatttataacagatgatgtttggtacgggatttacgcaggaacaaacccagaaacttttgtccgagctgatggtgcatttataccgtttgctgatgactttgacattacaagtgtcagcacatcggttaaaggagttggagtcattggtgatgtaaaggcaattgatttgcaatcctcaattggcagtctcattgggagacaagttgtcaaagttggaagaagttctggtctgacaacaggaactgttgtcgcatacgcacttgagtacaatgatgagaagggaatatgcttcttcactgactttcttgtcgttggggagaaccaacaaacatttgatcttgaaggggacagcggaagcctcataatcttgacaggacaagacggtgagaagccacagcctatagggattatttggggtggtacagctaatcggggaaggttgaaacttaaaagtggccagggtccggagaactggaccagtggagttgaccttggccgccttcttgatctcttggagctagatctgatcacaacaagtgaagggctacaagctgccttggaagaacaaaggattactctagccgccgctgctgctgcggcaactaattcaactgccacagaatcgtcacctgttgctggccctcaagagaatgataaaatcgacaaaatctatgaacctctcggcatcaacatcattcctcgggacagttcttccatatcaacagaccaacccaacgagaatgtggaagagctaaacctgatgtctccgatgcgcaacggtcaagaaggcaacggtgacttgaataacttgatggacttggaactggaaaattcacctgatggtatttgtattgccctgaacctgggagagcgggagccaaaaagactccgctcagattttgattcgaccctggacatggacttgcagaaatgaggctgttatgctgcagacttgttgcaggaggctctgcactattcagcttttgtgttgatcattgaaggtatggccataaaggaaataatatgtttctggacgactggacctgttgtcctgcttggagccggtctgggttaagctgtgaagctcctgctgcagttttgcgtctagtgtcaagtgctctagtatatctagtgttgcgtaagatgtcggcacctcaatttgacagaggcgccatacttcttgcccatgtaatgttgtcatttgttgtatgctcgtgtatatgtactacatgaagcattgtaaaattgagcaacagcaaccggagctcgagaatcttaggcgcatgcgcaaccatccaccaaccccgtacctgatgaattgacaataaagctggatattttaggtgtttggaa

SEQ ID NO: 101658 - DNA, 291 bp, Zea Mays
atggcgggggtctctcgcgcgatcagggcctgcgccgccacgtcccagcgcaccctggtcgctgcttcggcggtggcgctgccgaaggaggcgagggtgaaagcggcaacggtcgggcgcagggggcggggtccggaggacgggaggcgcgtgcagtgggcgttcctcgggtgccccggggtggggaagggcacctacgccagccgcctctcgcagctgctcggcgtcccacacattgccaccggcgacctcgtccgcgacgccctggcctcccctggcccctgctgttaa

SEQ ID NO: 101659 - DNA, 696 bp, Zea Mays
atggcggattgggatgacccaaatgccccttggacggggttacagactccttgtaacgacactgataaattactctttgcaacacccatgagaatcgcaattggcgatggagccaagacctccttctggcattgcacttgggtcaatgatcaacgacccaaggacattgtgcctgacatcttcgtcgcctcctctgaccgtaggctctctgttcgggaggccttgaccgatagcgcatggattcaattcatgggtcacacttgtttcaatctcaaagcccttatttggaagccatgtgggtcatataaatgcaaactcttcgcttggcttatcatccgcaaccggctttggacctctgataggctcgcagcacgtggatggctgcatagtccttcttgtccactctgcaagcggcactccgaaacacctcatcatattattgctagttgcccctactcaaggagaatttgggacgccctagcatcttggctctccatcggccctttatctctagctacctggatggactccactttgatcaagcagtggtggttcatggtcggctcatccgttgcgcctaaaaagggggacacgctccctatttttgctggtggtttggcaaatttggctggaaagaaacaaccgcactttccaaaggccagagaggtcagtggcagacctgctagcaacaattaa

SEQ ID NO: 101660 - DNA, 1943 bp, Zea Mays
ctgccacgctccaagccttgcactgcactgcactgcgctgcgcccgatccgaagcgaaacgccctctaactgcactgctgcgtgcgtacagtgcacctctttggttgggtgggttaaagcttaacgccaccactaaacccaggccagcacaacgccgtggccatgtaaatacgggggtgcccagtccagtggcctcctcgccagccttcgccgcgcgtccgacccaaacccaaccacaccgccctcccctagctcgtcgcgtcccgacccgatgccgtagctagcagcggccctgcagccagccacccacccacgcctgcagccgtcgcatgtcggacaacaccgtagccaaggcggcggcagcgaccatgacgcccgccgccgcctccgacccgtcgccgtcgtcctcgtccggcgtcggggcgtccccgctcgcgctgctccgcccgcacgcgcacggccacatgacgccgccgtcgccggcgctcgcggccccgccgccgtccccggcgtccgcgccccgggactaccgcaagggcaactggacgctccaggagacgctcgtcctcatcacggccaagcgcctggacgacgaccgccgcgccggaggcgcccatgcccacgcccacgccctggccgggtcgcccaccacgccgcgctcggcggagcagcgctggaagtgggtggagaactactgctggaaccacggctgcctccgcagccagaaccagtgcaacgacaagtgggacaacctcctccgcgactacaagaaggtccgcgactacgagtcccgcgccgccgccgccgcgccggccgccgcgccggccacgagggctctcccgtcctactgggccatggagcgccacgagcgcaaggaccgtaacctgcccaccaacctggcgcccgaggtgttcgacgcgctcaccgacgtgctctcccgccgcgccgcgcgccgagggggcgcggcgatcacggccgccccgccgccaccccagctcgcgctgcctgctccgcctccgcctccgccgcttcctcctccatcgccaccgaagccccccatcgtccagccccgcgctccgcctcctccgctgccgcttccggcggccgtgcctccgccggcgacgtccgtttccgcggaggagctgacggggtcgtcggagtccggtgaggacgacgacgggtcggacgccgtggcggagccggagccgaagcggcggcggctgaaccggctggggtccagcgtggtgcgcagcgcgacggtgctggcgcgcaccctggtggcgtgcgaggagaagcgggagcggcggcaccgggaggtcctggagctggaggagcggcggctgcggctggaggaggagcgcacggaggtgcggcgccagggcttcgcgggcctcgtctccgccgtcaacagcctctccagcgccatccacgccctcgtctccgaccaccgcagcggcgactccgcctcccggtgatcgggccgggcaggccggcaactaacgctcggccttgaccgtccgtcgttgtcaacacctctcccagctcagctcggctcggctcatctgccgccgcgccggcgttcgttgtgcgatccgtcgtccgtcgcggccgggcggctatatctgggctccgacgacaacatgatccaggtatcgaccgacaaaccgaccgaccgaccaggatgtaaataaggtgaagcgtgattcattgtttgttggaggctgtgtgactccgaattcttttggaggtggtggaatggaagcgtgtgtgtagcattgcattggtccgtctcgctcgcgtgcatgtagtagtagtaagtacaacgtgtcctcctgctgctgctgctgctagtgctaggtatctgctttgagctccctccctccccttttttttgtgcatgcattgactcgttgttgactggagatggagcttgcgttgcgatc

SEQ ID NO: 101661 - DNA, 1176 bp, Zea Mays
atggttcagaagaagaagaaagcggccgcggcgcccaaactccgcaagcttccgaagcgcgacgcggataagaagctcgggaagaagggtgacatggcagagttcagggcgcagctggactcccttgggctgaagatagtccaagtcacggcagatgggaactgcttcttcagggcaatgggtgaccagcttgagggcgatgaggaagagcacatgaagtaccgagatatggttgtggattacattgtgaaacaccgtgaggagtttgagccatttatcgaggatgaagttccgtttgaagaatattgcaactctatgctaaaggatgggacttgggctggccacatggagctgcaagccgcttctctgctgacaagaagaaatatatgcattcacatgcttaattcaccacgttggtacataaacaacttttctggccgtgaagctactaacatggttcacttgtcttatcatcatggtgagcattacaacagtgtcaggctgagagaagatccatgtcaaggtcctgcaatgccagttgtcatcaagttacagactgattccaatatatccaacacaaacaataacgctcaaacaaaagcaaaggaggtgaagaaatcttcacacaggtcaacctatgacgacacatcagttaaattggtcatggctggaactggatgttctgacattgccatagctgagcatgttctcggagaaatggatggtgatgttgatgctgctattgagtacctgatagcggagcgacttgcagtcagtactgatgatgcggaggtagacctttatataaaccatgcatttaacggagatgaacctaccaagaggcaagaggataataacatgatcgagcacaaggatgaagcaaattgttccaacgaagatgaaactgtcgagaaaccaaagcattcaaacgctgtgcattctaagaaggagaagtccaaaaccaatggttgttgctcttgtggatctgcaaggaagcacaaggcgtcttgtagtctagccacagcatcatcatcaagagagcctccaagggccaagggcgggcaagggaaaggccagagaggaaagaagcagaagaagaaagagcaagcggaagcagcagctgccaaggccaaggagtctgcaattgtgccagacctaggagctctttgcatctga

SEQ ID NO: 101662 - DNA, 122 bp, Zea Mays
tccgcaagttaaatatgaaaatgaaaacggtagaggtattttaccgaccgttttcatccctacatgtagctttgaaatgagaagggcatcttgaaatgcctatatttattataaaaggaaac

SEQ ID NO: 101663 - DNA, 769 bp, Zea Mays
atatatgtgcacactgcgaagcaatcctaaccgccaccagcatccgcctctcttctcagtgccagccgccgtgcgctcgctctctctgtccctcaaggccttcgccggcgaagagcgcctagtcacccaccaggatgaagtttgttgctgcttacctgcttgctgtccttgctgggaactccagcccctctgctgaggacttgacggccattctggagtcagttggctgtgaagttgacaatgaaaagatggagctcctgctgtcccaactgagcggtaaggacattaccgagctcattgctgcgggcagggagaagtttgcttcagtcccatgcggcggcggcggcggtatggctgtggcagcagctggccctgctgctggcggagctgctcctgcagctgaggcgaagaaagaagagaaggtggaggagaaggaagagagcgacgatgacatgggcttcagcctcttcgactgagctgtgtgggcagtcatcacatcagagtagtttgttttgttttgacttttgagtcgtggaaccagaggaaaatcgtagtcgttgcttggactttaacctcgttttatgttggaaactagtttgaaaggctcctactgtctttatatttggtaattcagccgtaggtcgacattgcctccagagatgttatgaattggtcaggtttcctggctgctcactgttatgttgttacatgtcgacatcgcctcgttcatccttgcgtacgtgcgtggtaccatcgaatctgttgatag

SEQ ID NO: 101664 - DNA, 1881 bp, Zea Mays
ataattgtaaagactattaagattctaccctcatctactttattatcgcatgggagtatgggacctataaatctaacggcgtgccgagccccggagagcacacaccgaccgaaccgaaaaaacagagaatccaaaagaaaggaacagggaggtggggaaaagcgcagggcgaagaaaggaaagggacgcacgtctcgtcacgtcctccaccggtccacccccgccgtcatggctgccctgggcctgctcctgctcctcctcctcgccgtcgtcggtgccgccaacgccgcggcgcccggcggcagaatgtccatcatctcctacaacgaggagcacgccgcgcgcgggctggagcggacggagccggaggcccggacgctgtacgagctctggctcgccgagcacggccgcgcctacaacgcgctcggcgagcgcgaccgccgcttccgcgtgttctgggacaacctccgcttcgtcgacgcgcacaacgagcgcgccgcggagcacggcttccgcctcggcatgaaccagttcgccgacctcaccaacgacgagttccgcgccgcgtacctcggcgccaggatccccgcctcccggagaaggggaaccgccgtgggggagaggtaccgccacggcggtggcgccgaggagctgccggagagcgtcgactggagggagaagggcgccgttgcgcccgtcaagaaccaggggcagtgcggaagttgctgggctttctctgcagtaagctcagtagaaagcgttaaccaaattgttactggtgagatggtgaccttgtccgagcaggagcttgtagagtgctcgactgatggagggaacagcggctgcaatggtgggcttatggatgccgcatttgattttatcataaagaacgggggcattgatactgaaggagactacccttacaaagctgtggatgggaagtgtgacatcaacagggaaaatgccaaggttgtgagcatcgatggctttgaagatgtgcctgaaaacgacgagaaatcattgcagaaggcagttgctcaccagcccgtcagcgttgccattgaggctggtggccgggagttccagctgtacaaagcgggtgtctttactggaacttgcaccacgaatcttgaccacggtgtcgtcgctgtcggctacggcaccgaaaatgggaaggactactggattgtccgcaactcttggggtgcaaagtggggcgaggatggttacatccgtatggagaggaacgtcaatgccaccactgggaagtgcgggattgctatgatggcatcctaccctaccaagaagggcgcaaaccctcccaagccgtctccaacccctccaacgccgccgcctcccccggttgccccggacaatgtctgcgatgagaacttctcctgcgcagcgggcagcacctgctgctgtgcgtttggtttcaggaacgtctgcttggtctggggttgctgtccgatggaaggtgccacctgctgcaaggaccacgccagctgttgcccgccgggttaccctgtgtgcaacgtcagagccggaacttgctcggtgagcaagaacagcccgctgagcgtgaaggccttgaagcgcaccctcgccaagctgaacagcgcatgagctcgtccagacatcagggatcatcgatctggagaggaatgggaccaccgcccggagcttttcagactctgcgtcctgatacaagctttcatagataacattatattgtatctaagtattacttggcgtcccatgaatccgttgtaaatatcaagctataatttctactatctttgttctcgaatttttattgcccgctaatttttttttttgaacagggctcctttgaaatgtaggaatttcatagaaatgata

SEQ ID NO: 101665 - DNA, 979 bp, Zea Mays
tccgttctccaacaaagcgggctgattggcactcctgctcccaagttccccactcccttccccgaattccggaccgagtcgatggcggcgacggcggagagcccctcgaccggcggcttcgtgctgtggctgcacggctccggcgggtcgggcgacgagagccgcgcgcaggtcgcgccctacttctccgacccgggcgtcgcctcctccgtccggctgtccttccccaccgcgcccacgtccttcatcccttgctacggtgatgtggtgatcacggcttggttcggcatctcggaggttcctattaccgcgaaaactgttagagatgagaaagaagtccttaaagctgttgagtatgtgcatgaattgatagacaaagaagtagctgcgggaacgagcccgtcaaacatattcgtttgtgggatgagccaaggaggtgctctagctatagcgagtgctctactctacccaaaaactctgggtggctgtgctgtcttcagtggctcagttccgccgaataaatcattcgccgataaggtgtcacctgaagctagaaagacaccggtgttatggtttcatgggatggcagatggggtggtcctatttgaagcaggacatgctgggtgtgcatttttagaggagcttggcatgtcctgtgaattcaaggcttatcctacccttggacattcattggttgacgaagagcttcaatactttcagcaatggatcctgattcgtctagggatggctgcatctggagcggctgaaaccgcaaggccatcatcgtcatctaaccacaacgaccatctccaatagctgttttttttgtcattgcttagtttctagtacaattcattgctgctatctttgcgtggcacatcagttctcgttgtgacgaacataaacatctttcttaatctccttcacattatttttttataatagcagtaattgacttaacattattcaactaaggaat

SEQ ID NO: 101666 - DNA, 1154 bp, Zea Mays
actagtttttttttgaacaaaaaaaaagactattttccaaacaacttcaagttctcggcaacgcattttgggccggctcggcccttgacccatgagtagcctgatccgcttgctcttcaccctcgccgcggccatcggcgcggcctcgctcctcgtcgcctcactccgccgccgcgcgccgcctcccgggcttcccgccaagctcgtcccctcctcccacatggcaggacgcaaccggagtttcgtgctgtggctgcacggcctcggcgactcaggccctgccaacgagcccatccgcaacctcttctccgccccggagttccggctcgccaagtggtcgttcccctccgctccccgcgcccccgtatcatgcaacaatggttttgtcatgccgtcgtggttcgatatccacgagcttcccatgagcgctggctctccgcaagatgagactggggttctcaaggctgtcgaaaaggtgcacgccatgatagacagggaagtagccgatggcatccaccctgagaacatatttgtttgtggattcagtcaaggaggtgctctgacattagctagcgttttgctttatccgaagaagttaggtggaggagcagtgttcagtgggtgggtgcctttcagttcatcagtcactgagaggatttcacctgaagcgaggaagaccccgtttctttggtcacatggaatggctgacaaagtagtattgtttgaagctggccaggctggtccaccgtttttgcaaagcgctggtgttaactgtgagttcaaggcatatccagatctgggtcattcgctttcccaagaagagctactttatcttgagtcgtggatcaagagtcgtctaaatgcctctcaagagaaggacggttaactgattccatcatgcttaagtggcatttatttagtatttttattatacgatacacagatcaactacttgtcctggaatttgttatttggaatttccgattggttatcgttgtcgggtgaataagggcacatagaaccgggatcttctgctggccatggatgttctaaatgcacttgtaacggccctggtatctgacactctcctacaatacaagggctgcagctctagcttgaattgcctggtcaactaaactgtctttgccatggat

SEQ ID NO: 101667 - DNA, 1234 bp, Zea Mays
actagtttttttttgaacaaaaaaaaagactattttccaaacaacttcaagttctcggcaacgcattttgggccggctcggcccttgacccatgagtagcctgatccgcttgctcttcaccctcgccgcggccatcggcgcggcctcgctcctcgtcgcctcactccgccgccgcgcgccgcctcccgggcttcccgccaagctcgtcccctcctcccacatggcaggacgcaaccggagtttcgtgctgtggctgcacggcctcggcgactcaggccctgccaacgagcccatccgcaacctcttctccgccccggagttccggctcgccaagtggtcgttcccctccgctccccgcgcccccgtatcatgcaacaatggttttgtcatgccgtcgtggttcgatatccacgagcttcccatgagcgctgtgagttcactccataacattagcaatcaaatagaccaaggcactggaattttgatgtagctgcgattttgaacgagtagggctctccgcaagatgagactggggttctcaaggctgtcgaaaaggtgcacgccatgatagacagggaagtagccgatggcatccaccctgagaacatatttgtttgtggattcagtcaaggaggtgctctgacattagctagcgttttgctttatccgaagaagttaggtggaggagcagtgttcagtgggtgggtgcctttcagttcatcagtcactgagaggatttcacctgaagcgaggaagaccccgtttctttggtcacatggaatggctgacaaagtagtattgtttgaagctggccaggctggtccaccgtttttgcaaagcgctggtgttaactgtgagttcaaggcatatccagatctgggtcattcgctttcccaagaagagctactttatcttgagtcgtggatcaagagtcgtctaaatgcctctcaagagaaggacggttaactgattccatcatgcttaagtggcatttatttagtatttttattatacgatacacagatcaactacttgtcctggaatttgttatttggaatttccgattggttatcgttgtcgggtgaataagggcacatagaaccgggatcttctgctggccatggatgttctaaatgcacttgtaacggccctggtatctgacactctcctacaatacaagggctgcagctctagcttgaattgcctggtcaactaaactgtctttgccatggat

SEQ ID NO: 101668 - DNA, 1307 bp, Zea Mays
tttttttctctcctcgtggtcgccagcactgccgtgccgagccggaggccgagctcggcagctgcccgcctcggtgtgtcgccgccgcaccccacccacgtagcaaaagccgtcttcccgtaccgtaggcagcggcaaacagcgccccctcatcactcggtctcgttccctcctctccaacttcactcgcgtcgcgcccctccactgcaccagcgtcatggcggtggcctcgacctcgccgctgtccgccaagcccgccacggccccttcgccgcccgctcccggatccgggctcctcgctctcggcgttcgccgcgcccccgccactgccgcgtggaggaggctccgcgtggaggcgatcaggacgcagcgaacggaggtgcccgtcgaggagtccgcccccgccagggacgccgccgctgccgcgcccctggacggaaacggagccggagcggacggctccgtggttccttcctcggacgacagctgggttgtcaagctcgagcagtcgttcaacattttcgccacggattcggtgattatggtactcaagggcgtgtacggtgatcggtactacgccaggttctttgcgctggagacgattgcgagggtgccgtacttcgcattcatatcggtgcttcacttgtatgcgacctttggatggtggagacgagctgattacataaaggttcactttgcgcagagctggaacgagttccatcacctcttgatcatggaagaattgggtggcgactctttgtggtttgactgttttcttgctcggtttatggcattcttttactacttcatgactgttgcaatgtacatgctgagcccacgaatggcatatcacttttccgaatgtgtggagagacatgcatattccacctatgatgagttcctcaagctccatgaagaggaattgaaaagactaccagctccagaggcagcattgaactattacatgaatgaggacctttacttattcgatgagtttcaggcatcaagaactccaggttctaggaggcctaaaatagataacttatacgatgtattcgttaatatacgagaagatgaggcagagcactgcaagacaatgaagacctgtcaaacacatggaaatcttcgttctcctcattcaacgccgaactgcttagaagatgatacggaatgtgtaatacctgaaaacgactgtgaaggtattgtggactgtgtcaaaaagtcccttacaaagtaaatagactatattctttaatgtgtttgactgttttcaggtgtcgtagtatacaaagtataaaattttgatg

SEQ ID NO: 101669 - DNA, 1430 bp, Zea Mays
caagcacggcaaacagcggctcccggcactgcgaatatagccctcgttccctccgtccctcgtctcgtctccagactctccaccatcactcgcgcgccggcgccgctcacacgcccatttccaccccacaagacccacacggaatcccggcaccctacctctccaacacgcaccagcatcatggcggtggcttcgacctcgccgctatccgccacggccccctcgccgcccgctccggtgtccgggttcctcgctctccccgcccgccgcggctgcgcaacgcgcctcggctccgccgccgcgtggaggaggcttcgcgtggaggcgatctggaagcagcaggagaagcagcgggcagaggtgtccgtcgaggaacccgcccccgtcagggaggccgccgcgcccctggacggagtcggagctgacgaccccatggttccttcctcggacgagagctgggtggtcaggctcgagcagtcggtcaacattttcctcacggaatcggtgattatactactcaataccgtgtaccgtgatcggaactacgccaggttttttgtgctggagacgattgccagggtgccgtatttcgcgttcatatcggtgcttcacatgtatgaaacctttggctggtggagacgagctgattatctaaaagttcactttgcgcagagcttgaacgagtttcatcatctcttgatcatggaagaattgggtggcaacgctatatggattgattgtttccttgctcgatttatggcgtttttttactacttcatgactgttgcgatgtacatgttgagcccacgaatggcatatcacttctctgaatgtgtggagagacatgcgtactccacctatgataagttcctcaagctccatgaagaggaattgaaaacactaccagctccagaggcagcattgaactattacctgaatgaggacctttacttatttgatgagtttcagacaacaagaattccatgttctaggaggcctaaaatagataacttgtatgatgtattcgtcaatatacgagatgacgaggcagagcactgcaagacaatgaaggcatgtcaaacacatggaactcttcgttctcctcactcaatgccgaactgcttagaagctgctacagaatgtgtaatacctgaaaacgattgtgaaggtattgtggactgtgtcaaaaagtcccttacaaagtaaatagtatgtagaatcctctttcgtgtgttttcaggcatcatagtatacaaaagtacaaattctggatgatatcctctcttttttcctgtgtatctttgttaaagcaaaatccgggtcatatatcacacagaagtcagtgtagatacaattatgcaacagaatcaaatatctaacattgaagatatgagaatattcaggctgtgaagcattgcctcgtcgcttgc

SEQ ID NO: 101670 - DNA, 5703 bp, Zea Mays
caagcacggcaaacagcggctcccggcactgcgaatatagccctcgttccctccgtccctcgtctcgtctccagactctccaccatcactcgcgcgccggcgccgctcacacgcccatttccaccccacaagacccacacggaatcccggcaccctacctctccaacacgcaccagcatcatggcggtggcttcgacctcgccgctatccgccacggccccctcgccgcccgctccggtgtccgggttcctcgctctccccgcccgccgcggctgcgcaacgcgcctcggctccgccgccgcgtggaggaggcttcgcgtggaggcgatctggaagcagcaggagaagcagcgggcagaggtgtccgtcgaggaacccgcccccgtcagggaggccgccgcgcccctggacggagtcggagctgacgaccccatggttccttcctcggacgagagctgggtggtcaggctcgagcagtcggtcaacattttcctcacggaatcggtgattatactactcaataccgtgtaccgtgatcggaactacgccaggttttttgtgctggagacgattgccagggtgccgtatttcgcgttcatatcggtgcttcacatgtatgaaacctttggctggtggagacgagctgattatctaaaagttcactttgcgcagagcttgaacgagtttcatcatctcttgatcatggaagaattgggtggcaacgctatatggattgattgtttccttgctcgatttatggcgtttttttactacttcatgactgttgcgatgtacatgttgagcccacgaatggcatatcacttctctgaatgtgtggagagacatgcgtactccacctatgataagttcctcaagctccatgaagaggaattgaaaacactaccagctccagaggcagcattgaactattacctgaatgaggacctttacttatttgatgagtttcagacaacaagaattccatgttctaggaggcctaaaatagataacttgtatgatgtattcgtcaatatacgagatgacgaggcagagcactgcaagacaatgaaggcatgtcaaacacatggaactcttcgttctcctcactcaatgccgaactgcttagaagctgctacagaatgtgtaatacctgaaaacgattgtgaaggtattgtggactgtgtcaaaaagtcccttacaaagtaaatagtatgtagaatcctctttcgtgtgttttcaggcatcatagtatacaaaagtacaaattctggatgatatcctctcttttttcctgtgtatctttgttaaagcaaaatccgggtcatatatcacacagaagtcagtgtagatacaattatgcaacagaatcaaatatctaacattgaagatatgagaatattcaggctgtgaagcattgcctcgtcgcttgctgtgctgtggatatgatttataaaacgttgcattcttgttgcatcgtatactcacgaatgcagtgtccaaaaagcagtatagacaaatcccatgatcaggacttgaggcaccgtgcaatcccaccagtcacaacagcacattccgtggaagttttcaccgtaaaatatcttgccgtcaaaccagcacagtgtacatacaaatgtatatatttacattttttcagaaaatgtatatatttacttcgacaaaccattacataagctattcgcccttttcaataccattgtgattattttttgtgttaaaactatgtatatgagcctatctaagcactaagcatgaatataggtgagtgaggtatgtagcacagtagaacattttttatgctcacatcttgcatactttgtcatctttacattcgccctgcggaagggaaatgcagtcagtaaactgaagctgctgaaatgttcactcgcaaccagtatgattactgattggtactgagcacagcatcaggcaaaagaagtgagctgatgatcagaaggacaacttactgcagcttttctagcggaggtcgacctatcgtaggtaggaaaaaagagtgatcaaatttgctcacccaatgcgaaatattcagtgcacatttgcattaagtttcgttgaagttttgatccaactaccacaacaaatggaagtacactgtcataagtcaaccatgtgcaaagttcttagcacctatacctgtaatttgcattcggtatttcgcccacacgccatatattgcatttgccatcgtagctacctgcatagaattagaagatgaacaaagaagtacaggtgtcagcaagaaggtaaaacttatctcatttggaaaatgttctgcttatataaaaagcatgaagtgaatggaacaagacgatcatatgttctctctgtaagtagtgacttacaggttgaacctagtaaggctggctccaacaagaccctctaaaaggtcctgtaccctaaatttagaggacgatgacatcctctactcactccagcaacgtcctctaaacggtcctctaaatttagagaacgccgctggatcctctatatgtagagtttctctaaacggttctctatctatttgaatactttaaacaaccggtttaataaaactaaaatatgtacaatacatttgaaagtatgacaaatacgtacgtacaaaaattaaaaaattaaaaatgtttttaatataggtatttacatatagaggacgtgatttaaaggacgttgttgaagagaaagtagatataggagatggaatcttttaaagaagactgtaaaggacggatatagaggatgtatatagaggacgttgctggagacagtctaacagcataaacccagtcgagtcctacttcctcgtacaattttctaaatgcctgcaataataacataataaatattagcatgaaacatacctgatgcttagactaaaaagaatcaaaattctgacttggtcttttatttgccttggcatcacactcatactctgttagaacagtgtttcaactatgttgatagatcagagtattctacatcaagttctttagaacattgtttcgaaggtgtcgcctaggcaccaagacgtacgcagctccccttgggaaacagcggcggcatgtggcctaggcatcgcctaggcgtgtaggcggacccagcactagcctggatcctagtcaacttttaaacgctgctttagaatgatttactgtggttaaactactgtgacagtttagtgattataagctatgcatgtaatgctgtcctgaatcctgtcaagaaaacatagcttgcttggtgctggaagagaacagcattgattttggcttgtacaaactcatctatgcattaacagttgcacatagttaagtgaacacaagggaaacagctgtatcacagtattatgttaaagaaacttctaatcattcataaataacatgtatagctcggccggggagggaaagaccgtcctcccggtattatattaagaagagaccgaaacatggtcccggccgagaaaatccccgaaccctggcccccatcactagcgggccgtcaccgcccactctgcaacggcccagccggagggtggcgcgcaggacgtaacccgggagcggacggggcacagcgaggggatttttttaaccaagccagaaattcgcccccgaggggaatcgaacccaggacctggaggtgctactcggaagccttaaccattacgctagaggccctttcgcataacatgtatagctcaattggtcatttccttcatttgatgtaaaaaatttcagacaatcagcctagtctgatttaactatccaacagtttatctggcattaagcaagtagactgcccattgcaaagttaaatccccgacgactttggtaggacatgatgttaatgttctacctcaacatctgtgataacagttccatctgaaagaatggcatgtatcttccccatgacctgagaagaggaaggaaaaatatttactagaaaattaaataaacattgtacatgatctcctaccttctcgtattcatctctctggccacaatacagaatgcgaactttcaatctggtcccagtaaacaaattactaataagaagtcctatattcccccagaaagtgaatggcaggaactgaggaataaatggcactctagcagtggagtaaatggtggtcatacactaggctcttcatgattttaatatttttttagaactttttgacaaagcttagaagcacaaatgcaaacaagctaggaaccatgaggaagcaattgaattatcagaatagaagtgcccagtacaaaatggcagccatgaaatattcaaaaccaagtgtttaagcaaggaagaaaaagatcatgattcaatattttttcagtggaacgcacttgccaaaaattgcaagagttatctctgtgtgtgccattatactaatgaaaagcaatgtttacaccatagcctttgggaaacaaaacacgacatgaccaatttcattaacgagaaatcataaagtgggtgagcaagaaaagtgaaataaattgaagtgatacgcacagtttcataatcaaggccttgattgtcatctggagagtaatctttagagcttatgtcaacaaactttattgccccatatgatttgtttctttccctcagcatgtttacctgcacagacatgaaattacatggaagtttagctgcaatggtatcagtatgatggtcaccttttgtttcagctataaacaacataagttaagaaaatccatccaggcttgaataagtaaaaataagtcaaatggcatgtgcctttcatgagatagtgatgcacataaagctctaacatgactagcactagtgatagggtcctaaaatatacaggaaaggttcatggtgaagaactccatggtctgcaccgagtgccactgaaaagatgggtttccgatatcacaactgaagttctttgatataaaaggtaaagtatagagctggtgaagatttcatgggaaaagttaatcaggaagtatctgctcaggtatacaaactgaaagctaaagcatctttcagaacataaatatcacatgagttcaacaagaatttatctacggcatgtgatgattaataatccatgcaataatctgtactttccatttgtctcaggctcatggctgtctactctcagtagtcagtagttgattaggcatcaagatcagcgctggaaatggaactcaaagaactaatcaaagtggaatcaacataccattacttaaaatattcaaggtaactgaatggtgcccctgggataccaaatagatgcagaagatctagtttccacaaccgggtgagaaaaaaagtagtgaatgcagtatgaattacccatactgcctgctatacaatcagcaatgccatcatcgagtgacatgtgcccattaattcaacatgcttactaatcactgccttattggaaaataaggctatcttcttccagaagctgcatcgtagagttctagcgcaacatacctcacgcatacagagagggcaatcaccgtcatagagcatcttgatcctcctagtttcagatttgctatcgtccttcacgtctgatgtaggggctactttaatgtcggaatgaacttggcacctgaaagctgatgtacaattcgtgcttcataacctgattatgctgcataaaaacatagtcctaacagaacattctgg

SEQ ID NO: 101671 - DNA, 919 bp, Zea Mays
ggcaaacagcggctcccggcactgcgaatatagccctcgttccctccgtccctcgtctcgtctccagactctccaccatcactcgcgcgccggcgccgctcacacgcccatttccaccccacaagacccacacggaatcccggcaccctacctctccaacacgcaccagcatcatggcggtggcttcgacctcgccgctatccgccacggccccctcgccgcccgctccggtgtccgggttcctcgctctccccgcccgccgcggctgcgcaacgcgcctcggctccgccgccgcgtggaggaggcttcgcgtggaggcgatctggaagcagcaggagaagcagcgggcagaggtgtccgtcgaggaacccgcccccgtcagggaggccgccgcgcccctggacggagtcggagctgacgaccccatggttccttcctcggacgagagctgggtggtcaggctcgagcagtcggtcaacattttcctcacggaatcggtgattatactactcaataccgtgtaccgtgatcggaactacgccaggttttttgtgctggagacgattgccagggtgccgtatttcggtgagggctccgttttgtcatatgcttgcagttgcggtgtatgaaaaggtccctaaagagttttgcagcgttggtttcggtcgtgccgttgctgttctttcttttttactctgcttggttatgaacagcgttcatatcggtgcttcacatgtatgaaacctttggctggtggagacgagctgattatctaaaagttcactttgcgcagagcttgaacgagtttcatcatctcttgatcatggaagtacgcatctttccagtaaaatccatgtgtgccagatcttcctttcagtgctattatgtcaaagttatatcacggcttaattttattccg

SEQ ID NO: 101672 - DNA, 1612 bp, Zea Mays
ggcaaacagcggctcccggcactgcgaatatagccctcgttccctccgtccctcgtctcgtctccagactctccaccatcactcgcgcgccggcgccgctcacacgcccatttccaccccacaagacccacacggaatcccggcaccctacctctccaacacgcaccagcatcatggcggtggcttcgacctcgccgctatccgccacggccccctcgccgcccgctccggtgtccgggttcctcgctctccccgcccgccgcggctgcgcaacgcgcctcggctccgccgccgcgtggaggaggcttcgcgtggaggcgatctggaagcagcaggagaagcagcgggcagaggtgtccgtcgaggaacccgcccccgtcagggaggccgccgcgcccctggacggagtcggagctgacgaccccatggttccttcctcggacgagagctgggtggtcaggctcgagcagtcggtcaacattttcctcacggaatcggtgattatactactcaataccgtgtaccgtgatcggaactacgccaggttttttgtgctggagacgattgccagggtgccgtatttcgcgttcatatcggtgcttcacatgtatgaaacctttggctggtggagacgagctgattatctaaaagttcactttgcgcagagcttgaacgagtttcatcatctcttgatcatggaagtacgcatctttccagtaaaatccatgtgtgccagatcttcctttcagtgctattatgtcaaagttatatcacggcttaattttattccgttctgttggtttgactaattaattttccatattaattatcagttcatttctttacatgaattcatcctacttatggattgagcccttggctcatatcaggaattgggtggcaacgctatatggattgattgtttccttgctcgatttatggcgtttttttactacttcatgactgttgcgatgtacatgttgagcccacgaatggcatatcacttctctgaatgtgtggagagacatgcgtactccacctatgataagttcctcaagctccatgaagaggaattgaaaacactaccagctccagaggcagcattgaactattacctgaatgaggacctttacttatttgatgagtttcagacaacaagaattccatgttctaggaggcctaaaatagataacttgtatgatgtattcgtcaatatacgagatgacgaggcagagcactgcaagacaatgaaggcatgtcaaacacatggaactcttcgttctcctcactcaatgccgaactgcttagaagctgctacagaatgtgtaatacctgaaaacgattgtgaaggtattgtggactgtgtcaaaaagtcccttacaaagtaaatagtatgtagaatcctctttcgtgtgttttcaggcatcatagtatacaaaagtacaaattctggatgatatcctctcttttttcctgtgtatctttgttaaagcaaaatccgggtcatatatcacacagaagtcagtgtagatacaattatgcaacagaatcaaatatctaacattgaagatatgagaatattcaggctgtgaagcattgcctcgtcgcttgc

SEQ ID NO: 101673 - DNA, 378 bp, Zea Mays
gcattcacgccggaggtctgcgtcagccaccccagcgcctcgatggcggcgtcccgctccgcgagctgcttgttccgcttcggcttccccacgaactgcatccccttgaactccaccacggccctgaactcgttcgtcttgaggtgcttcgtcttgtacctgggcggggtgtggccggcccgcatcagcagcgtatgcagcaggctcttggggttcatcccgtcctttatgaggttgctcttgccgtcgtcctcggggctccggagcctggcccggctcgtctcgcggccgaacacgaacctcccttcgcacaggtcgccggcggcgagctcttgtacggcgaataggatgtacttgccttccttgtggatgtcgaag

SEQ ID NO: 101674 - DNA, 707 bp, Zea Mays
ccatatccgtccgttgccctttaaagtgtcccatgggcacatctaggacccggcccaaatcccccgactcctcgcttcctcccgttccgtcgccgccgcgcgcctcggagaagagatagaggcggccgctgcatcgaccccgcgccacccccgcctgcctcccccggcaccgatcggtacggccacctccctcgattcgattggctctaactacggaaccctaccctaggttcgatttgatctgtggattttgggggattttgtttagggtttgatcgatggcgtcgaagaggatcctgaaggagttgaaggacctgcagaaggacccgcccacctcctgcagcgcaggtcctgttggtgaggacatgttccattggcaagcgaccatcatggggccttcggacagcccatttgcaggtggggtattcttggtgaacattcacttcccaccggattaccctttcaagccaccaaaggttttccacccgaacatcaacagcaacggcagcatttgccttgacattcttaaggaacagtggagtcctgctttaactatctcaaaggttctcctgtcaatctgctcactgctcacggacccaaaccctgatgatcctcttgtccctgagattgctcacatgtacaagaccgacagggccaagtatgagtccaccgcacgctcctggacacagaagtatgccatgggctag

SEQ ID NO: 101675 - DNA, 724 bp, Zea Mays
ccatatccgtccgttgccctttaaagtgtcccatgggcacatctaggacccggcccaaatcccccgactcctcgcttcctcccgttccgtcgccgccgcgcgcctcggagaagagatagaggcggccgctgcatcgaccccgcgccacccccgcctgcctcccccggcaccgatcgggtttgatcgatggcgtcgaagaggatcctgaaggagttgaaggacctgcagaaggacccgcccacctcctgcagcgcaggtcctgttggtgaggacatgttccattggcaagcgaccatcatggggccttcggacagcccatttgcaggtggggtattcttggtgaacattcacttcccaccggattaccctttcaagccaccaaaggtgtctttccgcaccaaggttttccacccgaacatcaacagcaacggcagcatttgccttgacattcttaaggaacagtggagtcctgctttaactatctcactgctcacggacccaaaccctgatgatcctcttgtccctgagattgctcacatgtacaagaccgacagggccaagtatgagtccaccgcacgctcctggacacagaagtatgccatgggctagaagcaaggctaaaagctggccaaactggtgaatgtgccggaccccaaatcgttatcacctaaataaccagtcaagtcgcaagtatgaatggacttttgaggaccattgtgccctg

SEQ ID NO: 101676 - DNA, 1077 bp, Zea Mays
ccatatccgtccgttgccctttaaagtgtcccatgggcacatctaggacccggcccaaatcccccgactcctcgcttcctcccgttccgtcgccgccgcgcgcctcggagaagagatagaggcggccgctgcatcgaccccgcgccacccccgcctgcctcccccggcaccgatcggtacggccacctccctcgattcgattggctctaactacggaaccctaccctaggttcgatttgatctgtggattttgggggattttgtttagggtttgatcgatggcgtcgaagaggatcctgaaggagttgaaggacctgcagaaggacccgcccacctcctgcagcgcaggtcctgttggtgaggacatgttccattggcaagcgaccatcatggggccttcggacagcccatttgcaggtggggtattcttggtgaacattcacttcccaccggattaccctttcaagccaccaaaggtgtctttccgcaccaaggttttccacccgaacatcaacagcaacggcagcatttgccttgacattcttaaggaacagtggagtcctgctttaactatctcaaaggttctcctgtcaatctgctcactgctcacggacccaaaccctgatgatcctcttgtccctgagattgctcacatgtacaagaccgacagggccaagtatgagtccaccgcacgctcctggacacagaagtatgccatgggctagaagcaaggctaaaagctggccaaactggtgaatgtgccggaccccaaatcgttatcacctaaataaccagtcaagtcgcaagtatgaatggacttttgaggaccattgtgccctgttgaactcatgtattaccttgtgaagtccgttgtgtctggtttctacctgaccgtttcgttatctgatgctgtttctttaatatctgatgctgcttcattaaccatacttctatatggtttgtggtgttgctgtttgtttaatctgtcagctgcttgacgtttcactgaaagaaagacgttccagtgagcgcagaaaaagttggtgattcggtgagaaacgttacaaccttatcaca

SEQ ID NO: 101677 - DNA, 967 bp, Zea Mays
ccatatccgtccgttgccctttaaagtgtcccatgggcacatctaggacccggcccaaatcccccgactcctcgcttcctcccgttccgtcgccgccgcgcgcctcggagaagagatagaggcggccgctgcatcgaccccgcgccacccccgcctgcctcccccggcaccgatcgggtttgatcgatggcgtcgaagaggatcctgaaggagttgaaggacctgcagaaggacccgcccacctcctgcagcgcaggtcctgttggtgaggacatgttccattggcaagcgaccatcatggggccttcggacagcccatttgcaggtggggtattcttggtgaacattcacttcccaccggattaccctttcaagccaccaaaggttttccacccgaacatcaacagcaacggcagcatttgccttgacattcttaaggaacagtggagtcctgctttaactatctcaaaggttctcctgtcaatctgctcactgctcacggacccaaaccctgatgatcctcttgtccctgagattgctcacatgtacaagaccgacagggccaagtatgagtccaccgcacgctcctggacacagaagtatgccatgggctagaagcaaggctaaaagctggccaaactggtgaatgtgccggaccccaaatcgttatcacctaaataaccagtcaagtcgcaagtatgaatggacttttgaggaccattgtgccctgttgaactcatgtattaccttgtgaagtccgttgtgtctggtttctacctgaccgtttcgttatctgatgctgtttctttaatatctgatgctgcttcattaaccatacttctatatggtttgtggtgttgctgtttgtttaatctgtcagctgcttgacgtttcactgaaagaaagacgttccagtgagcgcagaaaaagttggtgattcggtgagaaacgttacaaccttatcaca

SEQ ID NO: 101678 - DNA, 1065 bp, Zea Mays
ccatatccgtccgttgccctttaaagtgtcccatgggcacatctaggacccggcccaaatcccccgactcctcgcttcctcccgttccgtcgccgccgcgcgcctcggagaagagatagaggcggccgctgcatcgaccccgcgccacccccgcctgcctcccccggcaccgatcgggtttgatcgatggcgtcgaagaggatcctgaaggagttgaaggacctgcagaaggacccgcccacctcctgcagcgcaggtcctgttggtgaggacatgttccattggcaagcgaccatcatggggccttcggacagcccatttgcaggtggggtattcttggtgaacattcacttcccaccggattaccctttcaagccaccaaaggtgtctttccgcaccaaggttttccacccgaacatcaacagcaacggcagcatttgccttgacattcttaaggaacagtggagtcctgctttaactatctcaaaggttctcctgtcaatctgctcactgctcacggacccaaaccctgatgatcctcttgtccctgagattgctcacatgtacaagaccgacagggccaagtatgagtccaccgcacgctcctggacacagaagtatgccatgggctagaagcaaggctaaaagctggccaaactggtgaatgtgccggaccccaaatcgttatcacctaaataaccagtcaagtcgcaagtatgaatggacttttgaggaccattgtgccctgttgaactcatgtattaccttgtgaagtccgttgtgtctggtttctacctgaccgtttcgttatctgatgctgtttctttaatatctgatgctgcttcattaaccatacttctatatggtttgtggtgttgctgtttgtttaatctgtcagctgcttgacgtttcactgaaagaaagacgttccagtgagcgcagaaaaagttggtgattcggtgagaaacgttacaaccttatcacatgctctgaatttcgccaaagtgggtagatgcttgtgattatataactacagatttgcgaggcaaagctggagttctgagt

SEQ ID NO: 101679 - DNA, 1291 bp, Zea Mays
ccatatccgtccgttgccctttaaagtgtcccatgggcacatctaggacccggcccaaatcccccgactcctcgcttcctcccgttccgtcgccgccgcgcgcctcggagaagagatagaggcggccgctgcatcgaccccgcgccacccccgcctgcctcccccggcaccgatcggtacggccacctccctcgattcgattggctctaactacggaaccctaccctaggttcgatttgatctgtggattttgggggattttgtttagggtttgatcgatggcgtcgaagaggatcctgaaggagttgaaggacctgcagaaggacccgcccacctcctgcagcgcaggtcctgttggtgaggacatgttccattggcaagcgaccatcatggggccttcggacagcccatttgcaggtggggtattcttggtgaacattcacttcccaccggattaccctttcaagccaccaaaggtattttctctaatttttgatttctaatgccacctctacctgtatatttagattcctagagttacaattgtgcatatggtaacttttgaaacagttacaatgttttaatgtgaagatgatatgcttatctgcaggtgtctttccgcaccaaggttttccacccgaacatcaacagcaacggcagcatttgccttgacattcttaaggaacagtggagtcctgctttaactatctcaaaggttctcctgtcaatctgctcactgctcacggacccaaaccctgatgatcctcttgtccctgagattgctcacatgtacaagaccgacagggccaagtatgagtccaccgcacgctcctggacacagaagtatgccatgggctagaagcaaggctaaaagctggccaaactggtgaatgtgccggaccccaaatcgttatcacctaaataaccagtcaagtcgcaagtatgaatggacttttgaggaccattgtgccctgttgaactcatgtattaccttgtgaagtccgttgtgtctggtttctacctgaccgtttcgttatctgatgctgtttctttaatatctgatgctgcttcattaaccatacttctatatggtttgtggtgttgctgtttgtttaatctgtcagctgcttgacgtttcactgaaagaaagacgttccagtgagcgcagaaaaagttggtgattcggtgagaaacgttacaaccttatcacatgctctgaatttcgccaaagtgggtagatgcttgtgattatataactacagatttgcgaggcaaagctggagttctgagt

SEQ ID NO: 101680 - DNA, 1493 bp, Zea Mays
tctgcacaccgccactcgcccacacgttgaaggcacctagcagccgccactcgccgaactgaggaacacgccgggcgacgggatacagcagcagcgcgcccctctctatcctcgacgcgacggcgccctgcagctgcagataaacctgttccaatggccaaacaaaaagagggtgtggacaaaagaactgctaggaagatgatccgatctacggaaggctgtgcaaagagcattactttcgagaggaacaacaaatcagacgctgtgcagcttcacgatctgccgaatgacatcctaggtagcatactatcacggttgacattcagagcatcctcacagatgggccttgtttctcatacctggcggcggctgtggagaagctgttgccggaaactggtcttcaccggtgccaccatgttccaacccggaaataggagcatcaaacatacaaggaccaactttgccatgagagtcaacagtttcttgcgtcagctacgcactcatcctactcttaataagtttgttattaagtttgggctgcgcaggaagcacactcgccatgtcaacagatggattcgcttctgctccgtgtcgcgagcaaggcacatcactattaatttcactcctggagtgaaagattttgtcatgggtccagccaacagcaagtacatcttccccctgaacgttttcagtggtccagaaggctcctctacacatgtcagaactcttcatctgggctatgtctgtctggacacaacctcgtctgatttcatgatctttgcaaatcttaagaagctcactctgcacaaaatttcctttttgggagacctccagtgcctgatgctgccagaatgcaattctcttgagtgtctgagcatcagcttctgttccttgcctggtttaagcacatgccacccactgcaacgtctgcgatgtgttcgtttgcactactgctatctaaaaaagattgagctggaagctccaaatctaacatcgtttgacttgaccaaccaaccaattccatttgtgcttggtggacctctgaagttaatggaagccaacattaaactgttagctaaggactcaccttatggtgataatctggactacatctacactgagcttcctgctgcgctgtctcatgtgcataaactctcgataacctcggatctcttcatttatgatcagctgcaagggttttccaaaacctcagccagatttatcaatctgaggcatctgaccatgtatttgcctctttatggggaacctaagtcaattagtgggattcttcgcttggcctacctactggaattggccccagctctagaagaattggaattgcatgtgagtggcttactaactctataatctgttatagattttctcaaggtatgccttatctgtagaagtttttgtagagcaattgcagcactagtgtaccaggcaaattgtttatcatctttgctaattttgaattgcctgaatatttatta

SEQ ID NO: 101681 - DNA, 693 bp, Zea Mays
ttgcatgcaggtgaatggcggtggcgtggatgttgggtgggcactcagacggaatatgttaccgtactcacacaataggctcaagagggtccttatttcaggagccactgtatgggaggggctaatggagctggcatactacattcttcggagtgccaatagactcgaaagtatggtcttagatccaaagataaggattgggggtcctcagctggatggttggatgattgatattggtagggagacgatcaaaaatatttttgagggagaggagtttcagagcattattactattctgtaagaatggtaagataggccacaggattttggtggtcacaccaagtggccatgtttgattatgccataggtttgaccagtatggtcataaatgtttgttgttttcatttccgacctcaggaaatgtaaattaatactccctccatccatttttcattcgcgtatacttctcggcagtgaccaaattaagtttgaaaaaaaaaccgtttcatttttgctgttgcatgtgacgtggcccacgcctgcatgcatgcgaataaaagataggacacatgaagtttagttagtaagggtaagaataccaaaatacttttgagcattcttctgtcattaatgtaactgaaataaaggagggactgtcagtggaattaatatgatttaatctgggtgttttgt

SEQ ID NO: 101682 - DNA, 1482 bp, Zea Mays
atggccaaacaaaaagagggtgtggacaaaagaactgctaggaagatgatccgatctacggaaggctgtgcaaagagcattactttggagaggaacaacaaatcagacgatgtgcagcttcacgatctgccgaatgacatcctaggtagcatactatcacggttgacattcagagaatcctcacagatgggccttgtttctcatacctggcggcggctgtggagaagctgttgccggaaactggtcttcaccagtgccaccatgttccaacccggaaataggagcatcaaacatacaaggaccaactttgccatgagagtcaacagtttcttgcgtcagctacgcactcatcctactcttaataagtttgttattaagttcgggctgcgcaggaagcacactcgccatgtcaacagatggattcgcttctgctccgtgtcgcgagcaagacacatcactattaatttcactcctggagtgaaagattttttcatgggtccagccaacagcaagtacatcttccccctgaacgttttcagtggtccagaaggctcctctacacatgtcagaactcttcatctgggctatgtctgtctggacacaacctcgtctgatttcatgatctttgcaaatcttaagaagctcactctgcacaaaatttcctttttgggagacctccagtgcctgatgctgccagaatgcaattctcttgagtgtctgagcatcagcttctgttccttgcctggtttaagcacatgccaaccgctgcaacgtctgcgatgtgttcgtttgcactactgctatctaaaaaagattgagctggaagctccaaatctaacatcgtttgacttgaccaaccaaccaattccatttgtgcttggtggatctctgaatgtaatggaagccaacattaaactgttagctaaggactcaccttatggtgataatctggactacatctacactgagcttcctgctgcgctgtctcatgtgcataaactctcgataacctcgggtctcttcgtttatgatcagctgcaagggttttccaaaacctcagccagattcatcaatctgaggcatctgaccatgtatttgcctctttatggggaacctaagtcaattagtgggattcttcgcttggcctacctactggaattggccccagctctagaagaattggaattgcatgtgaatggcggtggcgtggatgttgggtgggcactcagacggaatatgttaccgtactcacacaataggctcaagagggtccttatttcaggagccactgtatgggaggggctaatggagctggcatactacattcttcggagtgccaatagactcgaaagtatggtcttagatccaaagataaggattgggggtcctcagctggatggttggatgattgatattggtagggagacgatcaaaaatatttttgagggagaggagtttcagagcattattactattctgtaa

SEQ ID NO: 101683 - DNA, 1482 bp, Zea Mays
atggccaaacaaaaagagggtgtggacaaaagaactgctaggaagatgatccgatctacggaaggctgtgcaaagagcattactttcgagaggaacaacaaatcagacgctgtgcagcttcacgatctgccgaatgacatcctaggtagcatactatcacggttgacattcagagaatcctcacagatgggccttgtttctcatacctggcggcggctgtggagaagctgttgccggaaactggtcttcaccagtgccaccatgttccaacccggaaataggagcatcaaacatacaaggaccaactttgccatgagagtcaacagtttcttgcgtcagctacacactcatcctactcttaataagtttgttattaagttcgggctgcgcaggaagcacactcgccatgtcaacagatggattcgcttctgctccgtgtcgcgagcaagacacatcactattaatttcactcctggagtgaaagattttttcatgggtccagccaacagcaagtacatcttccccctgaacgttttcagtggtccagaaggctcctctacacatgtcagaactcttcatctgggctatgtctgtctggacacaacctcgtctgatttcatgatctttgcaaatctgaagaagctcactctgcacaaaatttcctttttgggagacctccagtgcctgatgctgccagaatgcaattctcttgagtgtctgagcatcagcttctgttccttgcctggtttaagcacatgccaaccgctgcaacgtctgcgatgtgttcgtttgcactactgctatctaaaaaagattgagctggaagctccaaatctaacatcgtttgacttgaccaaccaaccaattccatttgtgcttggtggatctctgaatgtaatggaagccaacattaaactgttagctaaggactcaccttatggtgataatctggactacatctacactgagcttcctgctgcgctgtctcatgtgcataaactctcgataacctcgggtctcttcgtttttgatcagctgcaagggttttccaaaacctcagccagattcatcaatctgaggcatctgaccatgtatttgcctctttatggggaacctaagtcaattagtgggattcttcgcttggcctacctactggaattggccccagctctagaagaattggaattgcatgtgaatggcggtgacgtggatgttgggtgggcactcagagggaatatgttaccgtactcacacaataggctcaagagggtccttatttcaggagccagtgtatgggaggggctaatggagctggcatactacatttttcggagtgccaatagactcgaaagtatggtcttagatccaaagataaggattggggctcctcagctggatggttggatgattgatattggtagggagacgatcaaaaagctttttgagggagaggagtttcagagcattattactattctgtaa

SEQ ID NO: 101684 - DNA, 2272 bp, Zea Mays
gcccagatgcgggcgcgttcagccgtcagccacacacgcagagacacgcacggcgcaagcgcaacttggcgcgagaataacagaaaaatatgcccactccacagctggtgaccactgccaagcgaaaggaaccggggcgatctgcctcctgggggaaagatcttgttcacctggacgcacgcgcgcgcccgcgcccgcacggacgggggccccgcggcctgctcctggaccgaaatcttcccttcccagcgcttttgcatcatcctcgtcgtcgtcgtcgtggtggtggcacctaaaagtctacgtacaaggtatttgcccagggtcagcttgcagagacaagaagaaaaaaaagggggggagggggtgtccactccactgtggccagtgggcactggcagtccccatcggctgctgccttttcgctgcacattcagcaaagcagagcctataaataggtacgtccgtcgcctggtggcatgcacaccactgcaccgagcttctccatctccagagctacactgactagggaactgctttgctggcttggaggttcacgacgaggcatgccggtctgcttcttaccagcatccatggcgggccaggtgcagcggacggcgccgtcctcgtcctcgccctcgccgcggcagctgccggtcatcaaccttggcaggctcgggaaggacccggccacgcgggcgctcgccatccaggacattaccagagcgtgccgcgagcagggctgcttccaggtggtgaaccacggcgtcagcaactccgtcatggcaggcgcattcgaggccgcctcggagttcttccagctctcgccagagcacaaggagctgtttgcatcgaccgacatcggaaggcctgtcaggtatgacacgagctcaagggacgggatcagcagggccaggtcgttcctgaagcactacgcgaaccctctggaagactgggtccagtactggccactgcaccctccatcatacaggaagaaaatgggggagtatgcagttgaaatacagagggtgtcaatgcagctcatggacgctatcctgcaaggtttagggttaaagccgctgtacatgcaagagaaacttgacaagggagtgcagttcctggccctgaacagctacccacagttctcacatcgaggtgacaaggtcggactggctcctcattccgactatggcttcctcacaatcctgatgcagagctccccggggctggaagtgatgccccatgaccgtgacacctggacgcccgtccccgcgatccccggggccctccatgtccatgttggggaccacctagaagtcttgagcaacggtcgtctcaagtcccttgtccaccgagccattctcaaccctgatgaagcaagaatttccattgccagcatccatggtctctccaaggatgagaaggtctgctgcgccgaggagctggtcgacgaggtgaacccagcaatgtacagggagagcagcttccaggacttcctcgacttcctaccgtcaaatatcaacaactacaagaggtttgttgagagcctcaagatcgacagagcttgagaagaaaagcattggttcggttccgctgcaccagaacatagctaaatggcattcttcagatacgaatggaaagccagatgataccaaaaataataataaaagattggatgtctttcaattaatagggtattgtgatgagaagacgggtctatatggcttgcagcattgctacattgaagatacagattcatatagacatagcaagcacattggcgctgctatgtgtattctgcagagcaggtctgtccaagtgatatcgatgtctctctgcaaattaaagagtctagttctacatccttagtactaaaatgctcatttaactatgtccaaatggaggagagccggccggctatgtactgttgcgttgtaccatatgtgtagcgtgtatctcttgttactactactagtctactactgtatctgcagtgtatatgcagtcaataatcgctgcaggtaaggtaaggtaaggtaatgtatcagtagagctgcacccgcactcagcctggctgcatcaagctggactgaggtcccttttttttctccttttctttctttggggaaatgcattgtggctgcatgtctctttcactaaaaggaggacctggggaaccttgctaggtttttcaggttgtttggtcctacactatgtgtataccaatcttgtatcagctacccaataaataaagtctaataactattgcatg

SEQ ID NO: 101685 - DNA, 3872 bp, Zea Mays
atggaaagtaagaacaatcagcaccacattcaaggtcgagggttttctcaaagcaatgcaaaagcagattcattcagctggaaaacgtggatttttttctaaaaagtctgttgggccacaaactcgcgagaagttcactttggaagatatgctgtgctttcaaaaggattctattccaacttcattactaaagataagcaatgaccttgtaagccgctcgattaagttgttccatgtcatactaaagtacatgggcatcgattcaccagcaataattagtttggaggagagaatagaatttgttgagaagctctacaagcatacgttaaagcgttctgaacttcgagatgaactctttgcacagatttcaaaacaaacacgtaacaatcctgataggggttggtcaataagagcttgggagcttatgtacctgtgtgcatcatccatgccaccaagcaaagatattggggcatacttgtctgagtatattcactttgttgcccatggagccacaactgatgctgatgttcgagttctagcactgaacacactaaatgcattaaaacgatcagtcaaggcgggtcctaggattacaattcctgcatgggaggaaatagaagctctcttaacaagccggaagcttacaacaattgtatttttcttggatgaaacatttgaagagatcacctatgacatggcaacaactgttgctgatgctgttgaggaacttgctggcattatcaaactttcagtgtattctagcttcagcctatttgaatgtcggaaggttgttaatggatcgaagtcttcagagattggcaatgaggaatacattggattagatgataacaaatatattggtgacttgctatctgaattcaaatcagctaaggatcgcaacaaaggagaaattcttcattgcaaactcgtattcaagaaacgtctcttccgtgagtcggatgaggctgtgactgatccaatgtttgttcagctatcatatgtccagttgcaacatgattacattttgggaaactatcctgtcggcagggatgatgcttcacaactctctgctcttcagatcttggttgagattggattcattgataatcctgagtcctgtgttgaatggatatcacttttagagagatttcttcctagacaagtggcgattaccagagcaaagcgagactgggagcttgacatcatttcacgctttcagttaatggaacacttatcaaaggacgatgcacggcaacaatttctcagaatcttaaggactcttccatatgggaactctgttttcttcagtgttcggaagattgatgatccaataggattgctacctggaaaaattattttggggatcaacaaacgaggggttcactttttccgcccggttcccaaggaatatcttcattctgcagaactaagagacatcatgcaatttggtagcagcaatactgctgtcttctttaaaatgcgggttgctggtgttcttcatatctttcaatttgaaacaaagcagggcgaggaaatatgtgtagcacttcaaacacatataaatgatgtcatgctccgcagatattcaaaagcacgctctggtaatagtgttacatcacaaaatgatgttaaccaagcatataagccaccaaatatcgaaatgtttgaaaaacgtgtccaagaactgacaaaaacagccgaggattctcagaagaaagcagatcagttgcgagaagatttacagttgaagacaaaacaagaaacagagatgcaagaagagttggaagggctaagagataccttgcaatctgaacgacaaagttccaaagacataaaaaatgagcttgataagctaaaatctctatgtgatgagaaagaatctgctttgcaggctgccctgatggaaaaaagtagacttgaaaccagattaactagtggccagggccgtgagagagatacattgacaactgtaggcagcatcaataatgacattgaggatgcttgcaagcttgaggaggagttgaaatcataccaaaaagagcttgatgcatcaaaagaggtctcaaagaagctaatgttggaaaagaatattcttgaccagaaagttcaaaggcttgaaagaatgaaaaatgaagagaaaagcgcaatggaaaaggtttatgcggatgaatgctgtaaactgaaatctcagattgctgaattggagcagaaattggaagttgctacacgatccttaaatgtggctgaatcaaatcttgctgtaagaaatgctgaggttgatagcttgcaaaatagtctgaaagaacttgatgagctaagagagttcaaagcggatgttgacagaaagaatcaacagactgttgagattcttaaaaggcaaggagcacaattggtggaacttgagaatctttataagcaagaacaggttctacgaaagcgttactataatacaattgaagatatgaaaggaaaaataagagttttttgtcgcttgcgccctctaagcgacaaggaactttcttttgaggagaaaaatatagtttgcagtcctgatgaatttacaatttcacatccatggaaagatgaaaagtcaaagcaacatatatatgatcgtgtttttgatgcaaacacaagtcaagaagaagtctttgaggatactaagtatctggtacaatcagctgttgatggatataatgtctgtatatttgcgtatggccaaactggttctggaaagactttcactatttatggttcagaaaacaatcctggtcttactccaagggccacatctgaactttttagggtgataaagcgcgatggaaacaaatattcattttctttgaaggcatatatggtggagctttatcaagataatcttgtggacctgttattgcccagaaatgcaaagcagctgaagttagagataaaaaaagattccaagggtgttgttaccgttgaaaatgtaacagttgtgagcatttcaagtattgaggaactgagggctataatctcaagaggttctgagaggaggcacactgctggaacgaatatgaatgatgagagttcaaggtctcatttaattctttcaatcattattgaaagtacaaatctccaaactcaatcatatgcaagaggcaagctaagttttgtggaccttgctggttctgagagggtgaaaaaatcaggttcagcaggaaagcaattgaaagaagcgcaaagtataaataaatctctttctgctttggctgatgttattggtgctttatcttctgatggacaacatataccttaccggaaccataagttaacaatgcttatgagtgattctctcggaggcaatgcgaagaccttgatgtttgtgaatgtttcaccagctgagtctaacttggaggagacttacaactcgctaatgtatgcttcacgggttcgttgcattgttaatgatacgagcaagcatgttgccccaaaagaaatcatgaggttgaagaagttgatcgcctactggaaggagcaagcaggcaagcggagtgatgaggacgaactagaggagatacaggaagagaggatctcaaaagagagatcagacaatcgcatgactagctgacgatgctcctggtttcattcttccattacctggtgaagaggtgattgatgccgatgagcatttgtgactgccacgagttctgcgatcgctctctaacagaatgttcctatatcatctgacggccctgtaagtgtacactaattgtatagtagctacgtattatttctatggcggcggcgatgcccagcctgcttgtacaaagaggaatgtagcacatacattgatagaaggggaaaaagttgattatcgcttctttgctgacgagaga

SEQ ID NO: 101686 - DNA, 711 bp, Zea Mays
catcacagagggcaagccggcgaagtttgaagagcgacggccgacgactgaagcaataatggccgctcctctatgctcttccgtttccgtgtctctcatgctgctactgctagtgctctcggcctcggcctcggcggcgtccgccgcggacgggaagctgatccacctccacttctacttccacgaggtcgacgccggcacgcccaacgccaccgtggtcaacgtcgccagcctgcacaagaacgcctcgacgttcggtgacctgaacgtgttcgacaacgcgctgcgggagggggcggacccggcgtcgcggctcatcggcagggcgcaggggatcggggtgcacgcgtcgctggacgaatccggcggcctcaccgccatcgactttgccttctccgactacggcgagtacagcggcagcacgctggcgacgacgggacacttcaccgtgtcagccccatcggagcgcagcatcgtcggcggcaccggcaagctccggttcgcgcgcgggtacctcaccagcaggctcctcagctccacggacacctccatcgtcgtcgtcttcgacatgtacttcaccctggcccactggcactgatagtcgtccagtgcacggacttacttttttgttgttgttgttgttgttgaaattgtgcaagacgtaaactgttccaataacagggctttgctggctgcactgccctatccaaa

SEQ ID NO: 101687 - DNA, 1372 bp, Zea Mays
atggatggtaggaaaaggaaggggaaattcagaaattctctcaggcgtatggctatggagtgcctgtgctctggtgagcagttgaaggcgtcagatgagaccatgcggtcatctgattctacgatcacaaaggatttctcggccagtgggtactcttcttggaatggagagattgagcagtaccttgataatggcaacatagaggaagccgagttgtcgctccgggagggcatttgcctaaattatgagacatctgcattagttcctaagatgaaaatctcaattgctagaaaaacaggccgtgggaagactcattcacagtgggattccccaccaatgcccttgcatgctgtcagccttctcatggaggccatatatcttaaagcaagagcacttcatgatcttgggaaagataaaggcctaatgaaaggcaaaacaattgtcgatgttgtgggaaagttcacctggacccaataaggcaagaaaacggcaaagagcacaatagttctcatatgcctaattattcccttgattcatgattataactttgcctcctgatttaatgaccctttcctatcatttgagatatacaggtcaccctaaggcataaaagaagaaaggccatttcttgtggagatttatgcagatgacataaatccaactacaactataaaagggaagcactacatcggctctggtgtgcttaactatatctttgattcgcgaatatagttttgttattaaattagtgaaaattcaagctatatccttttgtgctctctgacattatgacatttgtttagcaagtactttagtgaaaagatttcaccatatgcatgtccatgtttatgacaaatcatagttatccgttacattacatcgatgtaatcttcacacaaagtctcaacaatatttggttgctcacttacaccccaccctagattaacatgttctgaattttctttgttcactgctgcaattgacacatgctaaatggcaatttctttataatgatccaattgagtttgtaattgcacatgtttttgccaagtttcatcaagtactgctccaacagaacaagcaatcatggaatattgagctaaggcactggagtctcaagaaaaggtctaggaatcctaagaatggatggataacgatgcttaaatatggatgacatcatttatgtcttgataaccatctacatgccggtgataatgttttttgacattcattcatggggctcacctttctaatgtgtaagaaagaaaactacgttgatcttaatctgagttgtgtgttgatggttgatgtagtaaagaaggggcacttagacattgttgttcatggatttatgtactgccaacaaaccttc

SEQ ID NO: 101688 - DNA, 1786 bp, Zea Mays
ctactcggtactcgagagtcgagacctaataaccactacccagcgggcgtacccgttgccatctggctctcctccgtccatttactcacacggtcacaccgcctcaactcgcgctgcccgtcgcccccaagcctcggttccgccggcgcgcgaggggattcgagctgggtcttgggtagcctctcaccgtctcacgatgccgccagcacccaagtccggcgacgccctcttcgccagcgtggatcgcgtcaatgcggagctgttcacgctcacgtacggcgccatcgtgcggcagttgctcacggatctggaggaggtcgaggaggtcaacaagcagctcgatcagatgggttacaacattggaacacgattggttgatgagttcttagcaaagtcaaatgtatcaaggtgtgttgacttcaaggagactgccgatgttattgcgaaggtctttgctaaaacttcacggcaatatatagctgctgagcctactgtctttgttcctatatggcatagtatcagctagtatattctgcacacgcttcatattcacaagtattcatacagtgttggagcgaatgcgtatatgatccaatggttgtgcacaacattcgtgtctgtgctaaattagttcagtaacaatgctatcttctctacagatcatccccatagtgtccaaggttttcttacttttgccttttgcttggtttattcaagtccgatgaccatttatcacattcttattttggttcaattaatatttgttaactggtgcctataagatgctggatttatgggttatcaaatgttcagcattagcaatgctgcatctttctttctttttttcccatcctccatggattcaaggtctgacagcgctcgtttgtttctttgtgaaaacagcttggcttcaaaatgttcttgggcgtgactgcaaccgtgaccaattgggatgctgagggtacaagttgcagccttgtcctggaagacaaccctcttgttgatttcgttgagctccctgacacttgccaaggccttcagtattgcaatttgttaagtggagttattaggggggcattggaaatggttggtttggctcttctgttaactgctatccccatttaactttcttcatttgcccttcatttcagtcatatactattgaatgttgttctgatgttgtttcagaatgcatacagccagcttcctgaaactttgattgctggctgatatggtggcgtgtcttagaattatttagatttatcacaaataagtgataccaatatatttgtcctctgaagtacttaacatttgatatttctccccctatagcatcgctacatggtggtggcactacctgctgtaggctgtagcacggaacctaacacacctacttattatggtgttactgattgattgcaaatgccgtatgtaggtgtctatgaaggcggaggtgacatgggtgcgtgacatgcttcgcggggacgatgcctatgagatgcgggtgaagcttatcaagcaagtcccggaggaatacccctacaaggatgatgactagttctactttagtgcaagattgcttgtttggattttgacatcgttttcgtcgatggtccgtagttctgctataacctgatatcatacgaggaaagctgcgtctgttttgcttgtgtattgtagaaatcatacataatctttcctgagttgcggctttgaattagtctgctggattcagggcgttcgctatgcaaattggtgttatctagaaataaagtattttcgatct

SEQ ID NO: 101689 - DNA, 1003 bp, Zea Mays
ctactcggtactcgagagtcgagacctaataaccactacccagcgggcgtacccgttgccatctggctctcctccgtccatttactcacacggtcacaccgcctcaactcgcgctgcccgtcgcccccaagcctcggttccgccggcgcgcgaggggattcgagctgggtcttgggtagcctctcaccgtctcacgatgccgccagcacccaagtccggcgacgccctcttcgccagcgtggatcgcgtcaatgcggagctgttcacgctcacgtacggcgccatcgtgcggcagttgctcacggatctggaggaggtcgaggaggtcaacaagcagctcgatcagatgggttacaacattggaacacgattggttgatgagttcttagcaaagtcaaatgtatcaaggtgtgttgacttcaaggagactgccgatgttattgcgaagcttggcttcaaaatgttcttgggcgtgactgcaaccgtgaccaattgggatgctgagggtacaagttgcagccttgtcctggaagacaaccctcttgttgatttcgttgagctccctgacacttgccaaggccttcagtattgcaatttgttaagtggagttattaggggggcattggaaatggtgtctatgaaggcggaggtgacatgggtgcgtgacatgcttcgcggggacgatgcctatgagatgcgggtgaagcttatcaagcaagtcccggaggaatacccctacaaggatgatgactagttctactttagtgcaagattgcttgtttggattttgacatcgttttcgtcgatggtccgtagttctgctataacctgatatcatacgaggaaagctgcgtctgttttgcttgtgtattgtagaaatcatacataatctttcctgagttgcggctttgaattagtctgctggattcagggcgttcgctatgcaaattggtgttatctagaaataaagtattttcgatcttatcagtttgccctcatttca

SEQ ID NO: 101690 - DNA, 1458 bp, Zea Mays
ctactcggtactcgagagtcgagacctaataaccactacccagcgggcgtacccgttgccatctggctctcctccgtccatttactcacacggtcacaccgcctcaactcgcgctgcccgtcgcccccaagcctcggttccgccggcgcgcgaggggattcgagctgggtcttgggtagcctctcaccgtctcacgatgccgccagcacccaagtccggcgacgccctcttcgccagcgtggatcgcgtcaatgcggagctgttcacgctcacgtacggcgccatcgtgcggcagttgctcacggatctggaggaggtcgaggaggtcaacaagcagctcgatcagatgggttacaacattggaacacgattggttgatgagttcttagcaaagtcaaatgtatcaaggtgtgttgacttcaaggagactgccgatgttattgcgaaggtctttgctaaaacttcacggcaatatatagctgctgagcctactgtctttgttcctatatggcatagtatcagctagtatattctgcacacgcttcatattcacaagtattcatacagtgttggagcgaatgcgtatatgatccaatggttgtgcacaacattcgtgtctgtgctaaattagttcagtaacaatgctatcttctctacagatcatccccatagtgtccaaggttttcttacttttgccttttgcttggtttattcaagtccgatgaccatttatcacattcttattttggttcaattaatatttgttaactggtgcctataagatgctggatttatgggttatcaaatgttcagcattagcaatgctgcatctttctttctttttttcccatcctccatggattcaaggtctgacagcgctcgtttgtttctttgtgaaaacagcttggcttcaaaatgttcttgggcgtgactgcaaccgtgaccaattgggatgctgagggtacaagttgcagccttgtcctggaagacaaccctcttgttgatttcgttgagctccctgacacttgccaaggccttcagtattgcaatttgttaagtggagttattaggggggcattggaaatggtgtctatgaaggcggaggtgacatgggtgcgtgacatgcttcgcggggacgatgcctatgagatgcgggtgaagcttatcaagcaagtcccggaggaatacccctacaaggatgatgactagttctactttagtgcaagattgcttgtttggattttgacatcgttttcgtcgatggtccgtagttctgctataacctgatatcatacgaggaaagctgcgtctgttttgcttgtgtattgtagaaatcatacataatctttcctgagttgcggctttgaattagtctgctggattcagggcgttcgctatgcaaattggtgttatctagaaataaagtattttcgatcttatcagtttgccctcatttca

SEQ ID NO: 101691 - DNA, 1144 bp, Zea Mays
ctactcggtactcgagagtcgagacctaataaccactacccagcgggcgtacccgttgccatctggctctcctccgtccatttactcacacggtcacaccgcctcaactcgcgctgcccgtcgcccccaagcctcggttccgccggcgcgcgaggggattcgagctgggtcttgggtagcctctcaccgtctcacgatgccgccagcacccaagtccggcgacgccctcttcgccagcgtggatcgcgtcaatgcggagctgttcacgctcacgtacggcgccatcgtgcggcagttgctcacggatctggaggaggtcgaggaggtcaacaagcagctcgatcagatgaaaagttttactttcaggggttacaacattggaacacgattggttgatgagttcttagcaaagtcaaatgtatcaaggtgtgttgacttcaaggagactgccgatgttattgcgaagcttggcttcaaaatgttcttgggcgtgactgcaaccgtgaccaattgggatgctgagggtacaagttgcagccttgtcctggaagacaaccctcttgttgatttcgttgagctccctgacacttgccaaggccttcagtattgcaatttgttaagtggagttattaggggggcattggaaatggtgtctatgaaggcggaggtgacatgggtgcgtgacatgcttcgcggggacgatgcctatgagatgcgggtgaagcttatcaagcaagtcccggaggaatacccctacaaggatgatgactagttctactttagtgcaagattgcttgtttggattttgacatcgttttcgtcgatggtccgtagttctgctataacctgatatcatacgaggaaagctgcgtctgttttgcttgtgtattgtagaaatcatacataatctttcctgagttgcggctttgaattagtctgctggattcagggcgttcgctatgcaaattggtgttatctagaaataaagtattttcgatcttatcagtttgccctcatttcatgcaaagttatcgcctgctttgcctcccatttcctggagagctttagtttgttatttcccatgtttgtgaaataatacgtttctttgatgaaaacatttaaaatgaaacttgtttcagctaag

SEQ ID NO: 101692 - DNA, 1516 bp, Zea Mays
ttttaattcaataaaaaatattatgttgtgtgttttctgagcgttgaaataaatccgcgtgaattacttaattctgaaatagaaaagctgacgtggctatagcctgaggctgtagcctgctgcagcctgtgcactggagcagcaggggcgagagtggaggcgagagctgacgtggcaggggcgagagggagacggtgcactggactcagcctaataaccactacccagcgggcgtacccgttgccatctggctctcctccgtccatttactcacacggtcacaccgcctcaactcgcgctgcccgtcgcccccaagcctcggttccgccggcgcgcgaggggattcgagctgggtcttgggtagcctctcaccgtctcacgatgccgccagcacccaagtccggcgacgccctcttcgccagcgtggatcgcgtcaatgcggagctgttcacgctcacgtacggcgccatcgtgcggcagttgctcacggatctggaggaggtcgaggaggtcaacaagcagctcgatcagatgggttacaacattggaacacgattggttgatgagttcttagcaaagtcaaatgtatcaaggtgtgttgacttcaaggagactgccgatgttattgcgaagcttggcttcaaaatgttcttgggcgtgactgcaaccgtgaccaattgggatgctgagggtacaagttgcagccttgtcctggaagacaaccctcttgttgatttcgttgagctccctgacacttgccaaggccttcagtattgcaatttgttaagtggagttattaggggggcattggaaatggttggtttggctcttctgttaactgctatccccatttaactttcttcatttgcccttcatttcagtcatatactattgaatgttgttctgatgttgtttcagaatgcatacagccagcttcctgaaactttgattgctggctgatatggtggcgtgtcttagaattatttagatttatcacaaataagtgataccaatatatttgtcctctgaagtacttaacatttgatatttctccccctatagcatcgctacatggtggtggcactacctgctgtaggctgtagcacggaacctaacacacctacttattatggtgttactgattgattgcaaatgccgtatgtaggtgtctatgaaggcggaggtgacatgggtgcgtgacatgcttcgcggggacgatgcctatgagatgcgggtgaagcttatcaagcaagtcccggaggaatacccctacaaggatgatgactagttctactttagtgcaagattgcttgtttggattttgacatcgttttcgtcgatggtccgtagttctgctataacctgatatcatacgaggaaagctgcgtctgttttgcttgtgtattgtagaaatcatacataatctttcctgagttgcggctttgaattagtctgctggattcagggcgttcgctatgcaaattggtgttatctagaaataaagtattttcgatct

SEQ ID NO: 101693 - DNA, 1154 bp, Zea Mays
ttttaattcaataaaaaatattatgttgtgtgttttctgagcgttgaaataaatccgcgtgaattacttaattctgaaatagaaaagctgacgtggctatagcctgaggctgtagcctgctgcagcctgtgcactggagcagcaggggcgagagtggaggcgagagctgacgtggcaggggcgagagggagacggtgcactggactcagcctaataaccactacccagcgggcgtacccgttgccatctggctctcctccgtccatttactcacacggtcacaccgcctcaactcgcgctgcccgtcgcccccaagcctcggttccgccggcgcgcgaggggattcgagctgggtcttgggtagcctctcaccgtctcacgatgccgccagcacccaagtccggcgacgccctcttcgccagcgtggatcgcgtcaatgcggagctgttcacgctcacgtacggcgccatcgtgcggcagttgctcacggatctggaggaggtcgaggaggtcaacaagcagctcgatcagatgggttacaacattggaacacgattggttgatgagttcttagcaaagtcaaatgtatcaagcttggcttcaaaatgttcttgggcgtgactgcaaccgtgaccaattgggatgctgagggtacaagttgcagccttgtcctggaagacaaccctcttgttgatttcgttgagctccctgacacttgccaaggccttcagtattgcaatttgttaagtggagttattaggggggcattggaaatggtgtctatgaaggcggaggtgacatgggtgcgtgacatgcttcgcggggacgatgcctatgagatgcgggtgaagcttatcaagcaagtcccggaggaatacccctacaaggatgatgactagttctactttagtgcaagattgcttgtttggattttgacatcgttttcgtcgatggtccgtagttctgctataacctgatatcatacgaggaaagctgcgtctgttttgcttgtgtattgtagaaatcatacataatctttcctgagttgcggctttgaattagtctgctggattcagggcgttcgctatgcaaattggtgttatctagaaataaagtattttcgatcttatcagtttgccctcatttcatgcaaa

SEQ ID NO: 101694 - DNA, 420 bp, Zea Mays
atgaaacacgccgcgaagctcccgtcccgcggtgcatcgtcgtcacagcaccggctctcccacgctatcccgaagacgccgccgcgtaagatcaggatcgttcacgtcttggcgccggaggttatcaaaacagaggctcgggactttcgtaaggtcgtccagcggctcaccggaatgccatcgtcccaaaagggctcctgcgcggcgtcggcactcacggacgaggatgcttcgccatcatcgctatcgtcgtggcagccgactgcgatgtcgtcgccgatgaaagtggaggccgaaacatcgtctggagaagggggagggttactgtacgatctcgatccggatggctacaacgatggcttctatgattttctcctcagctcctgcgacacagacggggtggccggctttaagttatga

SEQ ID NO: 101695 - DNA, 243 bp, Zea Mays
atgggcgaagtggcaccggtcaccaaaagtacaggcacccttcaagaagttctcgcacagcttcgtcttgtagttgctgctcttgccccctggaccaccgcctcggcctcctcctgctggtgccgcggcagcagatggatttttcgctggcatgcttgcgctgatggttgcgatgagatcacgcaccaagtcgctggcttgcttgatctggtcaaaattgccttccagctcgatgttctttag

SEQ ID NO: 101696 - DNA, 3661 bp, Zea Mays
cggttatgtacgagcccgctttctgttcagttcagtattcttctcatttggtcgtgatgattgattgtggtcgaatttgcagcctcggagggcaagttcccgaaccggggaatcaaggacgtcgtcaggagcatctgctgcgggaacgtagggaaaatgtcaacgaatcctgatgaacctaagagtcgtgcccggacagactttttgctcaacaatgaactagaggtccagaagttttgggatgagaacaaggtttttcaggctgatcctggcaatgactctccaagccctggggaaaaattctttgggaactttccatacccttacatgaatggcttgctgcatctgggtcatgccttctcattgtccaagcttgagtttggtgctgcataccacaggcttcgtggctccaatgttcttttgccctttgctttccactgcactggaatgcccatcaaggcctccgctgataagctagctagggaaatccaacaatatggatatcctccggtgtttcctgtggcagagggttctagtgctgcagtagccgatgctacccaggctgaccaggttgatgttgttgccccagataagtttaaggggaagaagtccaaggctactgcaaaggctggtgcacaaaagtaccagtgggagatcatgaagagctttggtctagatgatgaagaaattgccagatttcaagatccttatcattggttgactcacttccctccgctggcaaaggaggttctcaagaaatttggcttgggttgtgactggaggagatcattcataactactgacatgaatccatactatgatgcttttgttaagtggcagatgaggaagctgaagaaattgggcaaagttgttaaagacatgaggtacacaatctactctccgttggatggccaaccttgtgctgatcatgatagggcaacaggtgaaggtgtgcagccacaagaatacgtcttgattaaaatggaggtgatatcaccttttcctcccaagctgaagtcattggaagggaggaaggtatacttggcagctgctacactaagacccgagacaatgtatggacagacaaattgctgggtccttcctgatggaatgtatggtgcttttgagattaatgacactgatgtcttcatccttacagcaaggtctgcttttaatcttgcataccaacacctatccagggtccctgaaaaaccaacctgcttatgtgagctatctggcagtgatttgattggtttgccactgaaatctcctcttgccttcaatgaaacaatatatgctcttccaatgctcactgtcttgactgacaaaggtactggcattgtgactagtgtccctagtgattcacctgatgatttcatggcactgcaagatttagtcacaaagccagcattgagagcaaagtatggagtgaaagatgagtgggttcttccttatgagattataccaataatccacattcctgaatttggagacaagtcagcagagaaggtttgccatgatcttaagattaaaagccagaacgacaaggagaagcttgctgaagcaaaaagaatgacatatctgaagggatttactgatggaacaatgattgtaggtgagttcagtggtagaaaggttcaggaagcgaaaccgctgattaaaagtaagcttttggaagaaggcacagctgtgttgtatagtgagccggagaagaaggtcatgtctagatctggtgatgaatgtgttgttgccctcactgatcagtggtatataacttatggcgaggctgaatggaagcagaaggcagtcaaatgtttggaccacatgaatacattctcaactgaaacccgcaatggttttgaacatacgctgggctggctgaaccagtgggcttgttcacgttcatttggactcggtactcgaattccatgggatgagcagttccttgtagaatctctttctgattctaccctatacatggcttattatacagttgcacaccttttgcaaaatggtaatatgtatgggaaagaaatatcttcagtaaggccagaagaaatgacagatgaagtctgggatttcgtgttttgtgatggcccggcaccaaaaagcgagatccctgccgctctgttgaacaagatgaaacatgaatttaagtattggtatccatttgatatccgtgtgtctggtaaagaccttattcaaaaccatttgacattctgcatatacaatcatacagcacttcttcctgagcaccactggcctattggtttccgctgcaatggacatctaatgcttaactctgagaaaatgtccaagtccacagggaatttcctaactctggaagatgccataaaaaagtactcttctgatgccactagatttgcccttgctgatgctggcgatggtatggatgatgcaaattttgtcactgaaactgcaaattctgctgttatgaggcttacaaaagaaatttcatggatggaggaggttacagctgctgaatcaaaattaagaactgggccgcccactacatatgctgaccgtgtgttttcaaacgagatgaacattgcaatcaaagaaactgagaagagctacaatgctttcatgttcagagacgccctgaagtctgggttctatgacctccaattggctagagatgagtacaggctctcttgtggtgcagcaggcatgaaccgtgatctgttgtggcgatttatggatgtccagaccaggcttatcacccccatttgcccacactatgctgagcacgtgtggcagaagatcatgaagaaagaaggctttgcaataaaagctggctggccagccgcggacaccccggatcccacactgagaattgcaaataaatacctgcaggattccatagttttgatgaggaaactgcttcagaagcaagagtctggttctaagaagcctaagaagggagctgcaccggcacctccgtccgaggaaaagaagatgagcattggcctcatatatgtgaacgagcactactctggatggaaagagcagtgcttgaaggtgctgcagtccaagttcgacagccaaagccgctccttctcacccgatcaggaaatcgcagaagctctgaaggagtgccccatcgggcaggaaatgaacctgaagcaggttcagaagctgtgcatgcccttcatcaagctgaagaaggacgaggcaagggaggttggtcctcaggcgctggacttgaagcttccgttcggtgagatggatgttctccgggagaacttggagctgatcaagaggcagctgggccttgagcaagtcgaggtgctctccgcgtcggacgaagctgctcgcgctaaggctggtgaacatgcttcgctgctggagaagaacccaccatcacccggcgaccccatcgccatcttcctcagcaaacagagctgaaaactgaccttgcatatggcccttttgttatttacttcgccgcacatttgcttcttttttgtttttgtttttgtgaaaccagtttcgtgtctgtaaacatagcatgttgtcctccggtttggtgaaaccagttttttctttttctttttctgtcaacagaatatgttatccattctctgggtaaccagttcggctattgtcgacaaagtatgttttgtgtcgctttacatca

SEQ ID NO: 101697 - DNA, 1819 bp, Zea Mays
caaaacctgcgtttgtcccctaccctcgtgtccgacatggaagcctgcactttatatgctatcaccaggtggatcatctttgcatctttttattccttgtcagttgcttcattgccttccacattccaatcggggtagatggtcctttctgctcccattcttcgttccccatcctcctgcagattccaatcccttcctccagatacatacagcatagggcgagagtggctgagtgagtgagggacacagtttcgttccaggaaagcctgctgcacacatgtgacgccttgaggcttcccgatacctggtctggtgatcgctggatgatggacgccaagaagattaagctgcacgactaccacctctacggatcgcagcagctgtttcccgcggccggggggctctccttccacccggctgcggggctcatgagctccctgccgcagccgccgcatgccgcctggctgcacgaggaccaccacacgacgaccccgaggtcggtgctcgcgacgcatggctcgctgcagggcagcaggtgcgtcggctccgacgccgccgcgttcttcgccgccgaggagctgatgatgggcatgccgcgcttcgacgactgccctctcggcgggacggagatgacagcgtttgccaagaggccgacgacggaggacgagcagctgcactaccgtcgtccaggtccagtcgacccgctgccgctccgtgacagcgcggcggtgaggacgtactacgtccggccgcagcagcgcgacggcgccacggaggcgcctccttcgctcgaactgccattccagcaagggcggcggcagcagcagcagttgttcggcaacgcttccaccggcaggctgctcggcggcgaacccaaagcccactcctttacagctcatgttgcgacgagcacgcttctcccggcgatggaggcgccggcgggcatgcagcagagcccgacggagaatccgctgtccaggagctgcagtaccatcggtgcgccggcgacccacgtcgggagcgggaacgtcgccgccgccgccgcgccggggcatggcgcgccgagcaagacgcggatccggtggacgcaggacctccacgagcgcttcgtcgactccgtgaaccaactcggcggtgccgacagtgagcgtcgtccttgatcccaagctctctgtttttttgtctgcactagctcttggttaacctgtttgcttttgcttgaatcgaaggctattcgattctctttctcgtagagtagtcatatactctcgtttttttttgcatgcgtgacacttgcagaggcgactcccaaggggatcctcaagctgatgaactccgatggcctcacaatctaccacatcaagagccaccttcagaaataccgcatagctaagtacatgcccgcatcatcgacgtctgaagggaaacaggagaaacgagccgtcggaaacgacgtgcagaatctcgaccccagcactgggatgaagatcaccgaagcactacgcgtgcagctcgacgtgcagaggcgcctccacgagcagctcgagatccagaggaacctccagctgaggatcgaggtgcaggggaagaagctgcagaagatgttcgaggagcagatgaaggcgagcaggaccgtgatggagccacggcaggaggaggaagatgacgacgacgacgcgttcaacgacgtgcacgtgcagctgctggcggccgcggcccgcagcgacgccgggttccagttgaatataagctagcctttggccgccgcgcgcctccagctggctcgatcggctttgtaatcgtagggtttgactacaaa

SEQ ID NO: 101698 - DNA, 1401 bp, Zea Mays
ggccctcacatgttgaattgctgatgctaaaattcccgatacctggtctggtgatcgctggatgatggacgccaagaagattaagctgcacgactaccacctctacggatcgcagcagctgtttcccgcggccggggggctctccttccacccggctgcggggctcatgagctccctgccgcagccgccgcatgccgcctggctgcacgaggaccaccacacgacgaccccgaggtcggtgctcgcgacgcatggctcgctgcagggcagcaggtgcgtcggctccgacgccgccgcgttcttcgccgccgaggagctgatgatgggcatgccgcgcttcgacgactgccctctcggcgggacggagatgacagcgtttgccaagaggccgacgacggaggacgagcagctgcactaccgtcgtccaggtccagtcgacccgctgccgctccgtgacagcgcggcggtgaggacgtactacgtccggccgcagcagcgcgacggcgccacggaggcgcctccttcgctcgaactgccattccagcaagggcggcggcagcagcagcagttgttcggcaacgcttccaccggcaggctgctcggcggcgaacccaaagcccactcctttacagctcatgttgcgacgagcacgcttctcccggcgatggaggcgccggcgggcatgcagcagagcccgacggagaatccgctgtccaggagctgcagtaccatcggtgcgccggcgacccacgtcgggagcgggaacgtcgccgccgccgccgcgccggggcatggcgcgccgagcaagacgcggatccggtggacgcaggacctccacgagcgcttcgtcgactccgtgaaccaactcggcggtgccgacaaggcgactcccaaggggatcctcaagctgatgaactccgatggcctcacaatctaccacatcaagagccaccttcagaaataccgcatagctaagtacatgcccgcatcatcgacgtctgaagggaaacaggagaaacgagccgtcggaaacgacgtgcagaatctcgaccccagcactgggatgaagatcaccgaagcactacgcgtgcagctcgacgtgcagaggcgcctccacgagcagctcgagatccagaggaacctccagctgaggatcgaggtgcaggggaagaagctgcagaagatgttcgaggagcagatgaaggcgagcaggaccgtgatggagccacggcaggaggaggaagatgacgacgacgacgcgttcaacgacgtgcacgtgcagctgctggcggccgcggcccgcagcgacgccgggttccagttgaatataagctagcctttggccgccgcgcgcctccagctggctcgatcggctttgtaatcgtagggtttgactacaaa

SEQ ID NO: 101699 - DNA, 3324 bp, Zea Mays
gcaaactatcaaaagccctagaccacatcagatcccttctcttcaccgtgtcgctgtctcaccaatcaccacgcacctcccgtcccacatttcgccaacgacgggagagagtggccatggcgtcatccgccgccgccgcctcctcggcttccgcgctcttccgcctcccggggtcgggccacctgcgtgcaccgccacgaagcgggtggcgagaccacaggcggtcccgtcgcgcgaccgtgcggtgctcgttcgcgccggtggagacggcccggataaaggtggtgggcgttggcggaggcggcaacaacgccgtcaaccgcatgatcggcagcggcctccagggcatcgaattttatgctataaacaccgattcccaagcccttattaattcacaagcgcaatatcctctgcaaattggagagcagttgacccgcggcttaggtgccggtggaaatccgaatttgggagagcaggctgctgaggaatcaagagaaaccatagccactgccctgagggattcagatcttgtcttcataacagctgggatgggagggggtactggatctggtgctgctccagttgttgcccagatatcaaaggaagctggttatcttactgttggtgttgtcacctatccattcagtttcgagggccgtaagcgctctgtacaggcattggaagcactagagaagctggaaaagagtgtagacacacttattgtgattccaaatgataagttattagatgttgcggatgaaaacatgcccttgcaagatgcatttctccttgcagatgatgtccttcgtcagggtgttcaaggaatatcagacatcatcacaataccgggacttgtcaatgttgattttgctgatgtaaaagctgtcatgaaaaactctggaactgccatgctcggtgttggtgtttcttccagcaaaaatcgggcccaagaagctgctgaacaggcaacacttgctcctttgattggatcatccatcgaggcagctactggcgttgtgtataatattactggtgggaaggacatcactttgcaagaagtgaacaaggtgtcccagattgtgacaagcctagctgacccatctgcgaacataattttcggtgccgttgttgatgaccgttacactggtgagatacatgtgacaatcattgcgacaggatttccacagtccttccagaaatcccttttggcggatccaaagggagcacggatagtggaatccaaagagaaagcagcaaccctcgcccataaagcagcagctgctgcagttcaaccggtccctgcttctgcttggtctcgaagactcttctcctgagaagctcatttggtgaaccgtgactcgtagtgcattagatttggcatttagcgtgttgagggcagtccctaaggtgatcttcggatatctggagatttatagcttgggctagtgttcggtagtggtagaataagtttcagtgtatgtatcgttgctttgctttatgtttttgaggatcaggcggtgaggctgagagaagtgctcagcaactcaacattgaactgttgtagaagatctttgattgcttttattgctgcaacatgccaacaaccctctgttggattcgacagaatgtgggtgcctatttctccaaccgtttgtttttcctcgattgcatgtcagggaattgttcttgctgcaatcacgctctcgattgcatgtcagggaattgttcttgatgcagttatgagtacagaagaaagtccagacctcagaatagataacctctggtttattgccttattgacttctaccctttctctcgtgttttcaacgaagtcttgctggtcctcctgccttgcagcagggcccagggcaaaaggttacaacttgcaagagatgaggttccagatacatatgaacatcagacactaattccagagacaaactctggccgccaccatcaggacttctaattccagagacaaactctggccgccaccatcaggacttctagatcaacacagggttcgtttcatgagcctccctagggatcaatggtgtggacctgttagggcttgttcggttattttcaatccatatggattggaggggattaatacggattggaagggattttgacttactggggattaaaatcctctcaatccctctcaatccgacttagggcttgttcggttattttcaatccatatggatcggaggggattgatacggattggaggggattttaactggctagggattgaaaccctctcaatccccctcaatccatatggattggggggagaaccgaacaagcccttactggggattaaaaccctctcaatctctctcaatccaaccgaacacgcccttagaggggtttgacgccacgacggaataagctcgaagagttggcgctgctaggtgtcggcacgtgcagtaaggtggctagcgcgatgacgaggggctgcgcgagcggagatgccgatgcagtgtaaccacgccatggaagaagggtcggcgaccgttggggaagggagtgcccgcgaggccacggcggctgctggccgggtagggaggccgattgccgacgagcgggacgccatcgggaaaggcccttgccgggtcaggccgaggcggatttaagccgccggggaagggagggggtcgcgaccgcgcctccggagccagaggggaggggcatgcagatccactgccgcagggggaggggtggcggcggatggccgcgccatggtgaggcagacgacgacaagggagctggggaagagagagggcgcgagggagggagagccgacggcctggctgctgggggaagtacaggcggggctcgccggcgagcggggagaagcgccgcgccgctgctggtggcaggcgcgcggccatggggccgcgccgacatggggagcggcgacgtcgcgagcttggtggccacgagcgggtcagcggccaaacgaagagagagccgatgccccgacggctaggaggagctccggttgggctcgtcggcgggtgcaccgtcgtgtgagcgtagacccaggtggcacgcgggcgcggagctccagcgttgcgtgccaggcgacgacggcgtggatcccgccgcgaccggcagcggggagcgtggcccacgggtcgcgctaggagcagcggcgcgccatgggcgcttggaggagggtagcaggggcggttgagcgtgtgcgctagcagcagggaggtaggccgcctgagagaaggggtagaggtgggaggtcccagcggctaggagaggttgccgcccctaagaggggaggacgagcctctcggggac

SEQ ID NO: 101700 - DNA, 1612 bp, Zea Mays
cttctcttcaccgtgtcgctgtctcaccaatcaccacgcacctcccgtcccacatttcgccaacgacgggagagagtggccatggcgtcatccgccgccgccgcctcctcggcttccgcgctcttccgcctcccggggtcgggccacctgcgtgcaccgccacgaagcgggtggcgagaccacaggcggtcccgtcgcgcgaccgtgcggtgctcgttcgcgccggtggagacggcccggataaaggtggtgggcgttggcggaggcggcaacaacgccgtcaaccgcatgatcggcagcggcctccagggcatcgaattttatgctataaacaccgattcccaagcccttattaattcacaagcgcaatatcctctgcaaattggagagcagttgacccgcggcttaggtgccggtggaaatccgaatttgggagagcaggctgctgaggaatcaagagaaaccatagccactgccctgagggattcagatcttgtcttcataacagctgggatgggagggggtactggatctggtgctgctccagttgttgcccagatatcaaaggaagctggttatcttactgttggtgttgtcacctatccattcagtttcgagggccgtaagcgctctgtacaggcattggaagcactagagaagctggaaaagagtgtagacacacttattgtgattccaaatgataagttattagatgttgcggatgaaaacatgcccttgcaagatgcatttctccttgcagatgatgtccttcgtcagggtgttcaaggaatatcagacatcatcacaataccgggacttgtcaatgttgattttgctgatgtaaaagctgtcatgaaaaactctggaactgccatgctcggtgttggtgtttcttccagcaaaaatcgggcccaagaagctgctgaacaggcaacacttgctcctttgattggatcatccatcgaggcagctactggcgttgtgtataatattactggtgggaaggacatcactttgcaagaagtgaacaaggtgtcccagattgtgacaagcctagctgacccatctgcgaacataattttcggtgccgttgttgatgaccgttacactggtgagatacatgtgacaatcattgcgacaggatttccacagtccttccagaaatcccttttggcggatccaaagggagcacggatagtggaatccaaagagaaagcagcaaccctcgcccataaagcagcagctgctgcagttcaaccggtccctgcttctgcttggtctcgaagactcttctcctgagaagctcatttggtgaaccgtgactcgtagtgcattagatttggcatttagcgtgttgagggcagtccctaaggtgatcttcggatatctggagatttatagcttgggctagtgttcggtagtggtagaataagtttcagtgtatgtatcgttgctttgctttatgtttttgaggatcaggcggtgaggctgagagaagtgctcagcaactcaacattgaactgttgtagaagatctttgattgcttttattgctgcaacatgccaacaaccctctgttggattcgacagaatgtgggtgcctatttctccaa

SEQ ID NO: 101701 - DNA, 1524 bp, Zea Mays
ttgacttctaccctttctctcgtgttttcaacgaagtcttgctggtcctcctgccttgcagcagggcccagggcaaaaggttacaacttgcaagagatgaggttccagatacatatgaacatcagacactaattccagagacaaactctggccgccaccatcaggacttctaattccagagacaaactctggccgccaccatcaggacttctagatcaacacagggttcgtttcatgagcctccctagggatcaatggtgtggacctgttagggcttgttcggttattttcaatccatatggattggaggggattaatacggattggaagggattttgacttactggggattaaaatcctctcaatccctctcaatccgacttagggcttgttcggttattttcaatccatatggatcggaggggattgatacggattggaggggattttaactggctagggattgaaaccctctcaatccccctcaatccatatggattggggggagaaccgaacaagcccttactggggattaaaaccctctcaatctctctcaatccaaccgaacacgcccttagaggggtttgacgccacgacggaataagctcgaagagttggcgctgctaggtgtcggcacgtgcagtaaggtggctagcgcgatgacgaggggctgcgcgagcggagatgccgatgcagtgtaaccacgccatggaagaagggtcggcgaccgttggggaagggagtgcccgcgaggccacggcggctgctggccgggtagggaggccgattgccgacgagcgggacgccatcgggaaaggcccttgccgggtcaggccgaggcggatttaagccgccggggaagggagggggtcgcgaccgcgcctccggagccagaggggaggggcatgcagatccactgccgcagggggaggggtggcggcggatggccgcgccatggtgaggcagacgacgacaagggagctggggaagagagagggcgcgagggagggagagccgacggcctggctgctgggggaagtacaggcggggctcgccggcgagcggggagaagcgccgcgccgctgctggtggcaggcgcgcggccatggggccgcgccgacatggggagcggcgacgtcgcgagcttggtggccacgagcgggtcagcggccaaacgaagagagagccgatgccccgacggctaggaggagctccggttgggctcgtcggcgggtgcaccgtcgtgtgagcgtagacccaggtggcacgcgggcgcggagctccagcgttgcgtgccaggcgacgacggcgtggatcccgccgcgaccggcagcggggagcgtggcccacgggtcgcgctaggagcagcggcgcgccatgggcgcttggaggagggtagcaggggcggttgagcgtgtgcgctagcagcagggaggtaggccgcctgagagaaggggtagaggtgggaggtcccagcggctaggagaggttgccgcccctaagaggggaggacgagcctctcgg

SEQ ID NO: 101702 - DNA, 1815 bp, Zea Mays
atggcgaggctcccgctggccgcctgcgccgtcgccgccgccttctacctgtgcctccaccttgcgtcgtcgtcctcttccgctcctcgtcttgcgcctgccccgagcgacggcggccgccgtgcaggcaggaccgcctaccacttccagccggccaagaactggcagaatgggccgatgtactacaacggcatgtaccatctcttctaccagtacaacccgcacggcgcgctctggggcgttggcaacctctcctggggccactccgtttccggcgacctcgtgaactgggccgccctggacacggcgctggacccgacgtcgcccttcgacgccaacggctgctggtcgggctccgccaccatcctccccggcggcaccccggccatcctctacacgggcatcgacgccaacggggagcaggtgcagaacgtggcgttccccagggacccggcggacccgctccttcgccggtgggacaagcccggctacaaccccgtcatcccgctccccgccgacgtcccgggcgacaagttccgggacccttcgacggcgtggctcggccgcgacgggctgtggcgcgtcgcggtgtccgccgaggtccgcggcgtggcgtccacgctcgtgtaccggagcgcggacttcctccgctgggagcgcgcccccgccgccgcgccgctgcacgcctcgcgcgccgcgggtatggtggagtgcccggacctgttcccggtgaaggaggagggtgacgacggcgacggccaagggctcgacgcgtcggcgagcggcgccgggctgcggcacgtgctgaagctcagcgtgatggacacgctccaggactactacatggtggggcggtacgacgacgcggcggacgcgttcgtgccggcggagcccgagcgcggggacgacgtgcgcggctggcggcggctggactacggccacgtgtacgcgtccaagaccttcttcgacgcgcgcgggagccggcgcgtgctgtgggcgtgggccaacgagtccgacagccaggccgacgacgtcgccaagtatagatgcccaaacggcccggcccgaccggcccgcacgttcccgcggaagctgtggctggacgaggacgggaagcagctgcggcagtggccggtggaggagatcgaaacgctgcggaggaagcgcgtcgtcctgcgccgcggcacggcgctggccaccggaggcatgaacgagatcgtcggcgtcgcgggctcgcaggcggacgtggaggtcgcgttcaaggtctcgagcctagcgggggccgaggcactggaccccaactggctgctggacccgcagaagctgtgcggggagaagggcgcctcggtgcccggcggcgtcgggccgttcgggctcatcgtgatggcctccagcgacctgcgcgagcacaccgctgtcttcttccgcgcgttcaggtaccatggcaggtacaagcttctcatgtgcactgacctgacaaggtcgtccacgagggcaggcgtgtacaagccgccatacggaggattcgtggacgtcgacgttgaggagcacgagaccatcaatttgagaaccctgattgatcactcggtggtggagagcttcggagctgacgggcggatgtgcatcacggctagagtgtaccctgagcacgcggagacgagcaacaaccacatgttcgtgttcaacaatggcacaggcacggtggaggtgtacaagctcgaggcatgggagctcgcggcggcgaccgtaaattccgttgggggcaacgacagcttggttatttctaaatctaatgaccaaagtgaatcctattaa

SEQ ID NO: 101703 - DNA, 2182 bp, Zea Mays
tactcagcacctcatcctcgattaccgctgctttgctagtggctaagcatgcttatcttaggcacgaatcctagagagtcacagtcaagtgcccaggtctaaaacaagtgttaaactcggagactgatgcggctcaagtcttctgcaatctgcaaggcgtcttcattttctgtccgctataaaaacaaaccctggtcagggcatggcaatggcgtgagatctcaccttcgcctatctgttcatcgtccccccttcgtcctcctccccgaccccgacgtgcgacatgaacgggaagcagagcccgcggaatggccgaactgcgtaccacttccagcctgccaagaactggatgaacgacccaaatgggcctctgtaccacaagggcatgtaccacatgttcttccagtacaacccgcacggcccgacgttcggcaccgggaagctctcctggggccactccgtctccggcgacctggtgaactgggcgttcctgggcaccgcgctggacccgacgtcgccgttcgacgccgagggctgctggtcgggctccgccaccacgctggcggacggccgccccgccatcctctacaccgggcgcgacgcaagcggcgtgcaggtgcagaacgtggcgttccccaagaacccgtcggacccgctgctccgggagtggcgcaagccgcccggctgcaacccggtggtcccgcagccgggcgacgtgacgggcaacaacttccgggaccccaccacggcgtggctggggcgcgacgggctgtggcggttcgccgtcgcggccgaggtcggcggcgtgggctccaccctggtgtaccgcagcaaggacttcgtgcgctgggagcggggctccgcgccgctgcacgcgtcccccgacgtgcccgtctgggagtgcccggacctgttcccggtggcggagcgcggcgcggaggggctcgacacgtcggcccgcggcggggccggggtgaggcacgtgctcaagctcagcaaggccgccgacgaggactactacgtggtcggccggtacgacgacgaggcggacacgttcgcgccggtggagggcgtttttgactggcgccggatcgaccacggccacctgttcggcgccaagacgttcttcgacgcgcgcaggaggcggcgcgtgctgtgggcgtgggtggacgagacggacgacggcgttgacaagggctggaggggcatccagacgttcccgcgggcgctgtggctggacgccgacgggaggcagctggtgcagtggccggtggaggagatcgagacgctgcggaagggccgagccgcgctggcgggcgcggtggtcggcgccggcggcctgcgcgagatcgccggcgtcgacgccctgcaggcggacgtggaggtcgttttcgaggtccccgagagcctggacgacgccgaggagctggaccccgagtggctgcagcacgatccccacaagctgcgcgcgtgcgcggagaagaaagcctcctcgccgggcccgcgcggcggcgtcgggccgttcgggctggtggtgatggcgtccggcgacatgcgggagcagaccaccgtcttcttccaggtgttgaggcacggtggcacgtacaaggtgctcatgtgtgccgacctgacgaggtcgtctacgaaagagggggtgcacaagccattctacgcaggattcgttgacgtggacgtcgagaaggacaggggcatatcgctgagaacactgatcgaccactctgtcgtcgagagcttcggaggcgggggccggacgtgcatcacggcgcgagtgtaccctgagcacgtggcggcaggcggcagtagccacctgtacctgttcaacaacggagctcacccagtgaccgtgtccaagatcgaggcctgggagctcgggacggccagcgtcaacgttgaacaagacgaccgtgcggatccactgtgatcgcccgcccgccctgcgtgttacagacttccagtcctgtcggatggcgctggaggcttaatagataaccatcacgcgtggagtgaagcatgtgttaaaaaaaaaacaagaccattgttgccttattggtggtctcgtgttctgaataatgtagctttgctaaagtgtattgcgtctccattgtaacaccaaatgcctgtttttgctaaaatgtacgttgcatagatgtttgttgtttgg

SEQ ID NO: 101704 - DNA, 1938 bp, Zea Mays
caacaaattgaagccaaccatcatcagctctcgtgatgtgtcactcacattcgctggtgaccgggccaatggcagcaaatccccttgccacgctcgccatcgcggtgttcttgatctgccttcttctccccacttcgtcttcttcgtcatcgatttgtgtcgcgaggacgcaggaccacgtgagaacggcgttccacttccagcccgccaagaactggcagaacgggcccgtgtactacaacggcatgtaccacctgttctaccagtacaacccgcacggcgcgctctgggacgtgggcaacctctcatggggcgactccgtctccggcgacctcgtgaactgggcggcactcggcaacgcgctcgacccgacggcgccattcgacgccaacggctgcgcgtcagggtctgtcaccatccttcccgacggcacgccggcgatcctctactccggcatcgacgcggaccgccggcaggtccagaacgtcgcgttccccaagaacccgcgcgacccgctcctccgcgagtgggccaagcccgcctacaaccccgtcgtcccgctccccgccgacgtgtcggcgaacgacttccgggaccccaccacggcgtgggtcggccgggacgggctgtggcggttcgccatctccgcggtggccgacggcgtgggcgccacgctcgtgtaccgcagcgcggacttcctgcgatgggagaggcgcgctgcgccgctccatgcgtctcaggacgccgtgatggccgagtgcccggacctgttccccgtggcggcgcgcggcgcggaggggctggacgcgtcggcgcgcggcgctggtgtgcggcacgtcctcaaggtgagcatgccggacacgctggaggactactacgcggtcgggacgtacgacgacgcggcggacacgttcacgccggacgaggactgcggcggcggcgactaccgcaggtggcggaggatcgaccgcggacacctgtacgcgtccaagacattcttggacgcgcgcaggatgcggcgggtgctgtgggcgtgggtgaacgagtccgacagcgaggccgacgacgtcgcccggggctggtccggcctgcagtcgttcccgcgggcgctgtggctggacggcggcgggaagcagctggtgcagtggcccgtggaggagatcgagacgctgaggacgaggcgcgcggcgccgctgcaggaggtggagcccggcggcggggtgcgcgaggtcaccggcatcgtgagctcgcaggcggacgtggacgtggtgttcgagatcccgagcctccggcgggccgagggactggaccccggccggctgcatgaccccgacgcgctgtgccgggagaagggcggctccctgacaggcggagtcggcccgttcgggctgctggtgatggcctccggagacatgcgcgagcacaccgccgtgttcttcagggttttcaggatcctgcacgagtacgctgttctcatgtgcacggacctcagcaggtcctccacgaaggcaggcgtgtacaagccaacgcatggagggttcgtcgacgtggacatcgagaaagacatgagcatatcgttaagaacattgatcgatcactcgatcgtggagagcttcggcggcggcgggaggacgtgcatgacggctagagtgtaccccgagcacgttgcagcaggcagcagcagccacctatacgtgttcaacaatgggtcagctgcagtgaaggtgtccaagctcgaggcatgggagcttgccagtgcgagtgtcaatgttgacgacgatggcggtctgatggctggtggatcgttcgcgaacatgtgccgcgctgaggagtacaattctagctaggttaaaaaactgaacgggcatggatttgtgctatttatgatccatgacccaagataagtcgagcgtggcttgtggtagtgtttggatgaag

SEQ ID NO: 101705 - DNA, 3233 bp, Zea Mays
cacagttcgctccgtcctgctacccagctacaacgcgccactcttcctcacactacgacgacgccttgccacggattcgatcgtcgccgcttgtctgccctatcatctcactccccccgcccgcttgcttttatatctggagcttcccaccagcaaagccttggcattgtgcttccttgctttgtgtgtggcgcgctccaggtgccagccccaggagagaagacaagccgagtggcatgcaggcgcggtagggtagagttcctcacttctcgcccatcaacgatgacgaagtgcgcgtaagctgctgctgggaaacggagattggatagattcgccgggggtcttgttggcttcaagagagcccgagttctcctttttccagcttgggtctggtacgccatctctgggtctggggactgtagatgatgacgtcctcgtacgagaaggccacgtcgggtgtcctgaggaacgcggcggcgctgctcgacgaaatgcagctcatgggagaaacgcagggtgccaagaaggtgatcaactccgagctgtggcacgcgtgcgcggggccgctggtctgcttgccgcagcgggggagcctcgtctactacttcccccaggggcacagcgagcaggttgctgctaccactaaaaagatacccaactctcgcatcccaaactacccgagtctcccgtcgcagctgctatgtcaagtccacaacatcactttgcatgctgacaaagaaactgatgagatttatgcccagatgaccctgcaaccagtacactcggaaactgatgtgttcccaatcccaacgctcggtgcttataccaaaagcaagcaccccagtgaatatttctgcaagaatttgactgcaagtgatacaagtacgcatggtggtttctcggtgccacggagagctgcagagaagctgtttccgcagttggattattcaatgcagcctcctaatcaggagcttatcgttcgagatctgcatgataacatgtggacattccgtcacatttatcgtggccagccaaagcgacatcttctaacaactggatggagtctttttgttggtgcgaaacggcttaaagctggtgactctgtcttatttatcagggatgagaagtcacagctccttgtgggtgttaggcgggccaccagacaacaaccggctttgtcatcatccgtcctgtctactgacagtatgcacattggtgttcttgctgctgcagctcatgcagcatcaagtggtggctcgtttactgtttactacaatcctcggacaagcccgtcgccatttgtgattcctctcgcaaggtacaatatggccacatatctgcaaccatcagttggaatgagattcgcgatgatgtttgagacggaggagtcaagcaagcgcagatgcacaggtacaattgtgggaattagcgactatgaaccgatgcgatggccaaactcaaaatggcgcaacttgcaggtagaatgggatgaacatgggtatggagaaagacctgaaagagttagtctatgggatatcgaaactccagagaacatggttttctcttccccattgaattcgaaaaggcaatgtcttcctagttatggagtttctggcctacatgtgtcatcaatttcaaagccacaaggaagtccttttggtaacttgcagcacatgccagggatcagttcagacattgctttgctgcttctcaatcaatctgcccagaacctcgggagttcaattgcttgtcaacaatcatcattttccagcattattcaaaatgctaagcaaagctatttccctccaacgacattaggtgcttccactggttggaatgaatctcagcagcagttaaacgcccttggtattcaaaaaggtgatcaagtaagctgtgatgttcagccaggtattgattcaatcactgcaccggagatgaatgttaaaccaagagtcccaagaagcacggattcatactcaagtcagagcatttcggatccaaacagcaagagtgaccctaaaacaaaaacgcgaaggagcaagaagagctcgtctcacaaaaccatttcggataaatctgagatttcttcagtaccttctcagatctgtgacaagcaaaggcatggttcagaaccaacatcggcagactttgaagcagaacaagctacctgtgggaacaatgaggattcatctggtgcactcacacgtggtgattttgctggagagctacaagttcagcaggttgaacaagatggtctacttccaccaccgaagttagagtcatcaaagtcacctgatggagggaagtccgtcagctcgttcccaaaccaagggtgtttctcacagttctttgagggtctggattggatgatcccgccttcctgctaccaagactccaatggcatccattcagttaccacatcggatagcatctttaatccgtctgaaggtataccaccttccacaatgaacgcggacggcatggacgcgttccaaacctcttgcctttccgagtgctttcctaattccatccaagaattcatcagcagtccagatataaacacactgacatttatgtcgcctgagatgcaacatctggatgcccaacacgacggcagcaacttgcagagcacgtccaactcctatgtgcagatgagcttctcggaggagagccagagtgcatccttaagtggcctacacatggaagctgtccatatcaacagctcctgccttcaaccactggcgacagggagctttgatgcagggacgttctcaaaactatcaaacataaaagaatgccaggccttgcctctgcaggagattcacaacagctccatgggaacaccttcgtgcagtatggatgcggcggcggtcgagtactgtatggatcgaagtgtgaagccactgaaaccaccggtccggacatatacaaaggttcaaaagttaggatcagttggaagatctatcgacgttacacggtttagagactaccatgagttgaggtcagccattgcctgcatgtttggactacaggggaaactggaacaccctggcagttcagactggaagcttgtttatgtcgactacgagaacgatgttctcctcgttggagacgacccgtgggaggagttcatcaactgtgtgagatgcattcggatcctggcgccttcggaagtacagcagatgagcgagaatggcgtgcatgtcttgaacgactgcatgcaaatggcttag

SEQ ID NO: 101706 - DNA, 3543 bp, Zea Mays
cacagttcgctccgtcctgctacccagctacaacgcgccactcttcctcacactacgacgacgccttgccacggattcgatcgtcgccgcttgtctgccctatcatctcactccccccgcccgcttgcttttatatctggagcttcccaccagcaaagccttggcattgtgcttccttgctttgtgtgtggcgcgctccaggtgccagccccaggagagaagacaagccgagtggcatgcaggcgcggtagggtagagttcctcacttctcgcccatcaacgatgacgaagtgcgcgtaagctgctgctgggaaacggagattggatagattcgccgggggtcttgttggcttcaagagagcccgagttctcctttttccagcttgggtctggtacgccatctctgggtctggggactgtagatgatgacgtcctcgtacgagaaggccacgtcgggtgtcctgaggaacgcggcggcgctgctcgacgaaatgcagctcatgggagaaacgcagggtgccaagaaggtgatcaactccgagctgtggcacgcgtgcgcggggccgctggtctgcttgccgcagcgggggagcctcgtctactacttcccccaggggcacagcgagcaggttgctgctaccactaaaaagatacccaactctcgcatcccaaactacccgagtctcccgtcgcagctgctatgtcaagtccacaacatcactttgcatgctgacaaagaaactgatgagatttatgcccagatgaccctgcaaccagtacactcggaaactgatgtgttcccaatcccaacgctcggtgcttataccaaaagcaagcaccccagtgaatatttctgcaagaatttgactgcaagtgatacaagtacgcatggtggtttctcggtgccacggagagctgcagagaagctgtttccgcagttggattattcaatgcagcctcctaatcaggagcttatcgttcgagatctgcatgataacatgtggacattccgtcacatttatcgccagccaaagcgacatcttctaacaactggatggagtctttttgttggtgcgaaacggcttaaagctggtgactctgtcttatttatcagggatgagaagtcacagctccttgtgggtgttaggcgggccaccagacaacaaccggctttgtcatcatccgtcctgtctactgacagtatgcacattggtgttcttgctgctgcagctcatgcagcatcaagtggtggctcgtttactgtttactacaatcctcggacaagcccgtcgccatttgtgattcctctcgcaaggtacaatatggccacatatctgcaaccatcagttggaatgagattcgcgatgatgtttgagacggaggagtcaagcaagcgcagatgcacaggtacaattgtgggaattagcgactatgaaccgatgcgatggccaaactcaaaatggcgcaacttgcaggtagaatgggatgaacatgggtatggagaaagacctgaaagagttagtctatgggatatcgaaactccagagaacatggttttctcttccccattgaattcgaaaaggcaatgtcttcctagttatggagtttctggcctacatgtgtcatcaatttcaaagccacaaggaagtccttttggtaacttgcagcacatgccagggatcagttcagacattgctttgctgcttctcaatcaatctgcccagaacctcgggagttcaattgcttgtcaacaatcatcattttccagcattattcaaaatgctaagcaaagctatttccctccaacgacattaggtgcttccactggttggaatgaatctcagcagcagttaaacgcccttggtattcaaaaaggtgatcaagtaagctgtgatgttcagccaggtattgattcaatcactgcaccggagatgaatgttaaaccaagagtcccaagaagcacggattcatactcaagtcagagcatttcggatccaaacagcaagagtgaccctaaaacaaaaacgcgaaggagcaagaagagctcgtctcacaaaaccatttcggataaatctgagatttcttcagtaccttctcagatctgtgacaagcaaaggcatggttcagaaccaacatcggcagactttgaagcagaacaagctacctgtgggaacaatgaggattcatctggtgcactcacacgtggtgattttgctggagagctacaagttcagcaggttgaacaagatggtctacttccaccaccgaagttagagtcatcaaagtcacctgatggagggaagtccgtcagctcgttcccaaaccaagggtgtttctcacagttctttgagggtctggattggatgatcccgccttcctgctaccaagactccaatggcatccattcagttaccacatcggatagcatctttaatccgtctgaaggtataccaccttccacaatgaacgcggacggcatggacgcgttccaaacctcttgcctttccgagtgctttcctaattccatccaagaattcatcagcagtccagatataaacacactgacatttatgtcgcctgagatgcaacatctggatgcccaacacgacggcagcaacttgcagagcacgtccaactcctatgtgcagatgagcttctcggaggagagccagagtgcatccttaagtggcctacacatggaagctgtccatatcaacagctcctgccttcaaccactggcgacagggagctttgatgcagggacgttctcaaaactatcaaacataaaagaatgccaggccttgcctctgcaggagattcacaacagctccatgggaacaccttcgtgcagtatggatgcggcggcggtcgagtactgtatggatcgaagtgtgaagccactgaaaccaccggtccggacatatacaaaggttcaaaagttaggatcagttggaagatctatcgacgttacacggtttagagactaccatgagttgaggtcagccattgcctgcatgtttggactacaggggaaactggaacaccctggcagttcagactggaagcttgtttatgtcgactacgagaacgatgttctcctcgttggagacgacccgtgggaggagttcatcaactgtgtgagatgcattcggatcctggcgccttcggaagtacagcagatgagcgagaatggcgtgcatgtcttgaacgactgcatgcaaatggcttagaaagtcagggctatatgtcctgcgcagcctgcacagtgtaacgtcgcaaatacgagaaatgagtgttcttcgtagccacgcagcggctcttcttgtaaataaaagatacatcacgtgcatccaattctctgaatgctttgattcttttctagcacgagaagagaccattattatatggcggtgcattacaggtctattttctattttttcatgcaatgacttaaattatgagcttacgaggaagggggtgataatgtatcaaattatcccatctatttatttattatattaatacaagaaatttaaaaaaaaa

SEQ ID NO: 101707 - DNA, 1011 bp, Zea Mays
atggagaagctacatgccccatgtaagggtatgctcaggaagaacacccatgggtctggacccccaccatcactccacttgtcttccttttatcccactcatcaggcgcagtctgaatccaatccagtccgggccgatcgccatggcaaccgccaccgctcctgcatatatacctaccactgcacatgctgccaggcccagcttcacaagctaggtgtgtcagcccaaaaccaccaaccagcccgagcttttctttgctgcctgccgcggcgcgtcgcgacccgggccgacaagatagggtcggaaagccccgccgccgacggcgtcggcgacgccgcgcgcaagcggcccagcggcgatgttggccccaccccggggccagccgacaagcgccgccgcccggagcacccttcttcctcctccgcgggctcccgcgaccgccaccaccaccaccacggccgccgcccgccgtcctcggccgacgagaaggtgcgcgcctctcacatcctgatcaagcacgagggctcccgccgcaaggcctcgtggcgggatcccgaaggcgtcgccatctccgccacgacacgcgacgacgcggccgacctcgcgcgcgcgctccgcgaccagatcgtctccggtgaccgcgagttcgaggacgtcgctgccgagaactccgactgcagctcggccaagcgcggcggtgacctcggtcagtgctccgtgctaaatcctactgttcaaatcctgctggccaactatataccctctctgtagggtttgctttttggtgagcggttgaatggttgcgtggatgggataggagctcttgttttggatcctgcttagacttacaaatactaacttctatagtacatgcaggacaaggaaatatctgtctctggtggattatcttccagtctgatctagaattctagatgcagtaggtgtggctgccttgtatgttaggattgctattttgatatataatacatccgttctcgaatatttgtcgcc

SEQ ID NO: 101708 - DNA, 1201 bp, Zea Mays
atggagaagctacatgccccatgtaagggtatgctcaggaagaacacccatgggtctggacccccaccatcactccacttgtcttccttttatcccactcatcaggcgcagtctgaatccaatccagtccgggccgatcgccatggcaaccgccaccgctcctgcatatatacctaccactgcacatgctgccaggcccagcttcacaagctaggtgtgtcagcccaaaaccaccaaccagcccgagcttttctttgctgcctgccgcggcgcgtcgcgacccgggccgacaagatagggtcggaaagccccgccgccgacggcgtcggcgacgccgcgcgcaagcggcccagcggcgatgttggccccaccccggggccagccgacaagcgccgccgcccggagcacccttcttcctcctccgcgggctcccgcgaccgccaccaccaccaccacggccgccgcccgccgtcctcggccgacgagaaggtgcgcgcctctcacatcctgatcaagcacgagggctcccgccgcaaggcctcgtggcgggatcccgaaggcgtcgccatctccgccacgacacgcgacgacgcggccgacctcgcgcgcgcgctccgcgaccagatcgtctccggtgaccgcgagttcgaggacgtcgctgccgagaactccgactgcagctcggccaagcgcggcggtgacctcggttcatttgggaggggtaagatgcagaagccttttgagaaggccgcgtttgctctgaaggtcggggagatcagcgacgtggttgatacagagagcggggtgcacatcatcaagaggactggctgactgcacctgctgcagtatccatacacggtggatgccttggagaggctgtatggtttcttgcttcattggtgaatttgtgcgtgttttttcttcttctcttagacggttgtttggatgctcatctcttcacctcaacgcacatggttgagtggtttgaatccaaaccaaactactccaacctatatggattgaattgaaatatatacacgcgcatccaaacaatccctatgcccttaggaaatgggatgtttgacttccttttgtaaacttcgctggagacctgtggtttggaactatgctcacggctacgatgggatcagattattttgggtatttatgacacgagtatatgtcgattgtttttatgtca

SEQ ID NO: 101709 - DNA, 713 bp, Zea Mays
tctagtgcaagagatttgttgggaatttggcatgcaagaaattttttgaattggatttagaaggcatggaatatagcctcattatggatgtaatgtgaaaatcactctcatccaaccctgttcagattcatatatcattttctaaacatttaaaatccacggccgatgacgattaagtttatggttatttgttgcaggttcatttgggaggggtaagatgcagaagccttttgagaaggccgcgtttgctctgaaggtcggggagatcagcgacgtggttgatacagagagcggggtgcacatcatcaagaggactggctgactgcacctgctgcagtatccatacacggtggatgccttggagaggctgtatggtttcttgcttcattggtgaatttgtgcgtgttttttcttcttctcttagacggttgtttggatgctcatctcttcacctcaacgcacatggttgagtggtttgaatccaaaccaaactactccaacctatatggattgaattgaaatatatacacgcgcatccaaacaatccctatgcccttaggaaatgggatgtttgacttccttttgtaaacttcgctggagacctgtggtttggaactatgctcacggctacgatgggatcagattattttgggtatttatgacacgagtatatgtcgattgtttttatgtcatctttgcctccgtgaattttg

SEQ ID NO: 101710 - DNA, 2199 bp, Zea Mays
gagtggcgaatcaactagggacgcgcgttgccgccacgcacctcccttccttcacttgcctgccccccacttctccgatctccgccccatcggacttcccaagggtcggctaggtctaggtggtctccaagctttccgcctttccacgccaccattctccccacccgcgcgcctcagcaatccccatccagcatcgccgtttcgccgcggcaccgacacctcgccggccatgggcgcgtcctcctcgactggcaacccgtccccagaggcgcacgagcagcgggagcaggagactctcgcctccgccgccctctccctcccgctcctccgcgccgccttctcccgctccgccgccaacgcgctgccggatgccctcgcgccgccgcccgcctcctttcgtctgcccggatccccggcgccgccgccgccgcacttccacggcatcctcggggggctcggccccgccatcgcctcccaattcttcggccacggagctgccgcggtgacggacgggggcgccgggtgggtccagttcctcagggggttcaaccgctgctgcgcgcgcgtgacggcctcccgctcgctcgcactgctcctccgcgtgtacgctgccgcctgcgccggcgcgggggcaccctgcggcgtccagctccagccggacgagggcggtggtgacgaggatgggaaggtcgtgggggagctcgcgccggaggagatcgcagtgttcctctgggtgtgctgggtcatggcgtggagcgcttcggcctcgagggtggtcagtgacggaggagataaatcggagcccgtcacggtgctcctcccggacgtgacgcacctggtgctgtcggcgctcgtctcggcgggcgtcgtcacggatgatgcaggcgtttggggctgggacgtctccagcggtgggaagggggtgaaggtccaggagttcatgtcgtgggtgctgtccacgcctttcggccttgggaactgcctctcgcggtatgtgcgggacaaattccggtccctggctgctgactctgtggaggagagctctgtttcaactgttagcacaacctttgacacttctgatgtttatctgctaacacgggggagagcatgggcaattgccctcagcctaagaaacaagttgagtgaaaagctgctgtcagcttctgttattggaatggacacagaagacctcctttataggtcatctgttcatggaaaaggactgagccggttctggtcttgtgttgaggggtacaaagggccaatgctgattctactttcagcattctcaaaaggtggtggtgagaatgttgattctgatcgaagatgggtgattggtgtattgaccgaggagggatttgagaacaaagataccttttatggtagctctgggttcctttgtgccgcacatccaatattccgcatgctaccaccatctggcaaggaaaagaacttcatgtactgccacctacatcctcagataagagcttatgaagcgaatccaaagcccgttggcttagcatttggtggaacaattggaaatgagaggatctttcttgatgaagacttctcgggagttttagtacgacaccatgctgttgataaaacttatcaacatggctctctcatccccaatcagggttatttgcctgttgaggcttcagtgcttgatgttgaggtatgggggctgggtggagaagcaacgaaacgacagcagaatatgtacaagaagagggaggacatcttctcagagcagcgaagaaaggttgatctcaaaacttttgctagctgggaagactctccagagaagatgatgatggacatgatgtcggacccaaacacggttcgacgggaagaccggtgattttggtttgcagcctccggggatgtacagacgacagcgtttgttgcacataggagtattttgcttgcgcatttggctgggtcacacgctttatttaggttgaagtactaaaagaagatttgtacagaacgtaattcccaataaatgaaatggagattctggacaggtctatggtgtccaagcttgctgacatgtcttacggtaccccttttgctggggaggttcatgttgatgttggtgttgtgtggcacaatggctgccagatactgtaattgttatggctgaacgaactgatgaaacaatgctggatttttcatgagcggagcttaattata

SEQ ID NO: 101711 - DNA, 121 bp, Zea Mays
gcttttcaggttgtctgacaagctaataaacttccttcaaaaacgaacatactcatacaaggaaacgatattactcatatatacttattttctatttcatctatcccaaattaaaaaaaaa

SEQ ID NO: 101712 - DNA, 1230 bp, Zea Mays
atggcggccaacgtgggcgcgggcaggagtgctggcggcggcggagccggcactggcactggcactgctgctggcagcggcggcgtgtcgacggccgtgtgccgccctagcggctcgcggtggacgccgacgccggagcagatcaggatcctcaaggagctctactacggctgcggcatccggtcgcccaactcggagcagatccagcgcatcaccgccatgctgcggcagcacggcaagatcgagggcaagaacgtcttctactggttccagaaccacaaggcccgcgagcgccagaagcgccgcctcaccaacctcgacgtcaacgtgcccgtcgccgccgacgacagcgcccaccgccttggcgtcctctcgttgtcgccttcttcaggttgttcaggcgcggcgcctccgtcgcccaccctcggcttctacgccggcggcaatggctccgctgtgatgctggacacgagttccgattggggcagcgctgctgccatggccactgaggcatgcttcatgcaggactacatgggcgtgatgggcggcgcgtcaccgtgggcatgctcctcctcgtcgtcggaggacccgatggcggcgctggcgctggcgccgaaggtgacccgggcgcccgagacgctccctctcttcccgaccggcggcggcggagacgataggcagcccccgcggccgcggcagtctgtcccagcaggcgaggccatccgcggcggcagcagcagcagcagctaccttccgttctggggtgccgcgcccaccccaactggcagtgccacttccgttgcgatccagcagcaacaccagctgatgcagatgcaagagcagtacagcttttacagcaacgcccagctgctgcccggcaccggcagccaggatgcagcagcaacatccctggagctgagcctcagctcctggtgctccccttaccctgcagggaccatgtgagagcagcgcgacgcaagctgccactgctctgaattctcgtcatggaactatggaaggagtagtggctagtgaccaactgaccatagtgttgctgtcattgtcctagctaggttcaatagctaccagttactactacgtactctagaagcatgtgtgagtgaaggcaatagtgtttggagatctctagtactattagatagcgaatttgcaggcagctgcacaggcattaacatgcatgcatgttgccggctgggcttttagactcta

SEQ ID NO: 101713 - DNA, 831 bp, Zea Mays
cgcgtagttgacagccgtccgattggaatgagtcccggttttggacggagtgggcgagtggcatctttcttctataagcttctagcagcatccgccaccgccgcggaggcccaaatatatctccccgcgtccgctagccctagccgccgtccgccgacttcatcgtcgccgtcgtctagacctcttcacgcactggaaaggttaaagtccgacatcaatggcgaagcatcatcctgatctcatcatgtgccggaagcagcctggcatcgcgattggccgcctttgcgagaaatgtgatggcaagtgtgttgtctgcgactcgtacgtgcgcccatgtacgcttgtccgggtctgcgacgagtgcaattatggttcgttccagggaaggtgtgtgatctgtggaggagtcggcatctcagacgcttactactgcaaggagtgcacccagcaggagaaggaccgggacggttgccccaagatcgtgaatctcggaagcgccaagacggatctcttctatgagcgcaagaagtatggttttaagaagagatgaccgagaagatggagctgtgtgtggttcactttggctgtgtggtctgttctatggcactgaatactgagagtaggcagctgagacagcagctttgtattcctgttatggtttgataattgatactcgcatggaaatacagctgtgatatgcgttgtaataactaagtccaactgtatgatgcaagagactgcttatgtaatctgtgcttgatggtaatggttatgaatggacttgaaatattggcacgatagctgtcatcatatatgttactgctctaagaa

SEQ ID NO: 101714 - DNA, 678 bp, Zea Mays
caccttctgcgaagaaaagtccggcagtctgtgattgttatctatattccattttactttggtctcgcaggttaaagtccgacatcaatggcgaagcatcatcctgatctcatcatgtgccggaagcagcctggcatcgcgattggccgcctttgcgagaaatgtgatggcaagtgtgttgtctgcgactcgtacgtgcgcccatgtacgcttgtccgggtctgcgacgagtgcaattatggttcgttccagggaaggtgtgtgatctgtggaggagtcggcatctcagacgcttactactgcaaggagtgcacccagcaggagaaggaccgggacggttgccccaagatcgtgaatctcggaagcgccaagacggatctcttctatgagcgcaagaagtatggttttaagaagagatgaccgagaagatggagctgtgtgtggttcactttggctgtgtggtctgttctatggcactgaatactgagagtaggcagctgagacagcagctttgtattcctgttatggtttgataattgatactcgcatggaaatacagctgtgatatgcgttgtaataactaagtccaactgtatgatgcaagagactgcttatgtaatctgtgcttgatggtaatggttatgaatggacttgaaatattggcacgatagctgtcat

SEQ ID NO: 101715 - DNA, 942 bp, Zea Mays
gtcgagaacccaacaaaaacaaacaaaggcgggcgggggcaggcagagccgcagccgccgacgccagcacatcctcccatcccgcctcctccccaccttcccatcccttctcctcgcctccttccaaatccacacacttccgccgccgctgctatcgtcaccggtcaccatccgtccgacgaggagggatagggaccggcgggagcgaaccctagatgaccgatcccgggtcgggcccagagagccttccggattgcgccttcggtcgctgcgccgcctccgccgcctagggttcccgcgcctgtaggtcgattttggggacgaggaaggggagtgccaagtaatgatggggtcgaggcgctacaagcgcgtttcgtgggccaacggggccaatctgtgcaagttacattcatgacatcaattcagaatgagatgttaaaacatcgtgattgaatgccaaatccttcattgtgtggaacaaagcaagcagtacatatgtgtcttcttgtcagaaattatcttcacactacagctgaatgtaaggctctttctttcagaggattccccttctcaagctggattaagaccacaggacaatctccaagcaaaaggctcatggttaatgcatgcagctggcccaagctcagatgattctctgccacctggcttcgaatcattgcagccaaccagcgatctcaaaattgacatgtcccaaatcgctcttattaggtggagatgcccaccacaggtaattagggcctgtaatcttgaacattgcattctactactggcaagttgccaaggtgacatcagatcattcgcgcaaccccccaagtcaagtttttttttttacaattgttgcattctttggttgcagatattgtataatcctgattggtgtgtcgctgctggagaagaaagtgaggaggttgccttgcagaa

SEQ ID NO: 101716 - DNA, 2115 bp, Zea Mays
gtcgagaacccaacaaaaacaaacaaaggcgggcgggggcaggcagagccgcagccgccgacgccagcacatcctcccatcccgcctcctccccaccttcccatcccttctcctcgcctccttccaaatccacacacttccgccgccgctgctatcgtcaccggtcaccatccgtccgacgaggagggatagggaccggcgggagcgaaccctagatgaccgatcccgggtcgggcccagagagccttccggattgcgccttcggtcgctgcgccgcctccgccgcctagggttcccgcgcctgtaggtcgattttggggacgaggaaggggagtgccaagtaatgatggggtcgaggcgctacaagcgcgtttcgtgggccaacggggccaatctgtgcaaggtaaggctctttctttcagaggattccccttctcaagctggattaagaccacaggacaatctccaagcaaaaggctcatggttaatgcatgcagctggcccaagctcagatgattctctgccacctggcttcgaatcattgcagccaaccagcgatctcaaaattgacatgtcccaaatcgctcttattaggtggagatgcccaccacagatattgtataatcctgattggtgtgtcgctgctggagaagaaagtgaggaggttgccttgcagaatgagaggatgtttggagcactggaggctatatatccacgaccatcgaacattcctccaaacccattggttactcctgatgtgaaagactcccagtatgatgattcccgaacccaattggttcctttgctcccagttgaagaggatgatgcctctgaccagttcgaagaaccacctgttggtctaccaagtagttaccaccagtcagataagtatgatgatgcaatatccagggtcccacaagcctcagatgctctctttaccactgcacaacagcagccgaatggttccatcaacacaacaaggtctggtgtccccgccgaagcagacgtagtggctgctgcatctgctgcttacactgcaataatgcaaagcaaccaaatgggaaacatgattgaccaagatctgctcatcaaaatactaagtgatcctgcccaaattcagaggctaatgaaagaatatggtgcgcttaaacatgaacagtcaaccaacagttctgtggcgtcaatggtgcaaggtccaccaccccagatgacagctagtgtccccgtctctatcccagaccgttccaatgcatttcacaacataaaccctaagctgccgcctccacctgttccgaatcgtctacctccagcttcagttaccatgaatgcaccagcgagttcaagtcaagcaattagctttccaagtggcccaaccaggggtttgaactattaccagaacctgatccatcagcatggaggggagaggcaggagccacttcagcagcatggaatgcagtttgcaatgcatcaccagcctcttgcctcgcaggccagtgccgctgatgttgtcagcagtggtgctatgccagctagggataccaagcaaaggcctacgaagccttgtgcttacttcaacagcgcgagaggatgccggaacggtgcgaactgcacgtttctgcacgatgtgtctgccgcgaggaaagaacagtcaaagggttccaaaaggattaagcttgacagcagaatagccgggcggtattgaggggctgctgccgccggttgatttttgactgttcatttcgccttttttccccttcaaaaacgtttcagtaaatattgcgccccagctccttgtttctttcacttagccaatttctctttgttgactaaatgaggtgttttagaagaaagaaaaatatcccacgatttattggagctatgtcgtggtagctacgccgtggtcatttgtgttggttctgctttttttttttgtcaagaccgagaaatgcatagttgcatactttaacatatagaccttaaataaaaagaacataaaacgcgaaaacagagtcgtttgtcttgtgtcttggtccatgggagccgataagctgttggaaacttggaatatcgttttgcttggtgcatctctattttgcccgacttggtgcttgtaag

SEQ ID NO: 101717 - DNA, 1961 bp, Zea Mays
gccgccgacgccagcacatcctcccatcccgcctcctccccaccttcccatcccttctcctcgcctccttccaaatccacacacttccgccgccgctgctatcgtcaccggtcaccatccgtccgacgaggagggatagggaccggcgggagcgaaccctagatgaccgatcccgggtcgggcccagagagccttccggattgcgccttcggtcgctgcgccgcctccgccgcctagggttcccgcgcctgtaggtcgattttggggacgaggaaggggagtgccaagtaatgatggggtcgaggcgctacaagcgcgtttcgtgggccaacggggccaatctgtgcaagttacattcatgacatcaattcagaatgagatgttaaaacatcgtgattgaatgccaaatccttcattgtgtggaacaaagcaagcagtacatatgtgtcttcttgtcagaaattatcttcacactacagctgaatgtaaggctctttctttcagaggattccccttctcaagctggattaagaccacaggacaatctccaagcaaaaggctcatggttaatgcatgcagctggcccaagctcagatgattctctgccacctggcttcgaatcattgcagccaaccagcgatctcaaaattgacatgtcccaaatcgctcttattaggtggagatgcccaccacagatattgtataatcctgattggtgtgtcgctgctggagaagaaagtgaggaggttgccttgcagaatgagaggatgtttggagcactggaggctatatatccacgaccatcgaacattcctccaaacccattggttactcctgatgtgaaagactcccagtatgatgattcccgaacccaattggttcctttgctcccagttgaagaggatgatgcctctgaccagttcgaagaaccacctgttggtctaccaagtagttaccaccagtcagataagtatgatgatgcaatatccagggtcccacaagcctcagatgctctctttaccactgcacaacagcagccgaatggttccatcaacacaacaaggtctggtgtccccgccgaagcagacgtagtggctgctgcatctgctgcttacactgcaataatgcaaagcaaccaaatgggaaacatgattgaccaagatctgctcatcaaaatactaagtgatcctgcccaaattcagaggctaatgaaagaatatggtgcgcttaaacatgaacagtcaaccaacagttctgtggcgtcaatggtgcaaggtccaccaccccagatgacagctagtgtccccgtctctatcccagaccgttccaatgcatttcacaacataaaccctaagctgccgcctccacctgttccgaatcgtctacctccagcttcagttaccatgaatgcaccagcgagttcaagtcaagcaattagctttccaagtggcccaaccaggggtttgaactattaccagaacctgatccatcagcatggaggggagaggcaggagccacttcagcagcatggaatgcagtttgcaatgcatcaccagcctcttgcctcgcaggccagtgccgctgatgttgtcagcagtggtgctatgccagctagggataccaagcaaaggcctacgaagccttgtgcttacttcaacagcgcgagaggatgccggaacggtgcgaactgcacgtttctgcacgatgtgtctgccgcgaggaaagaacagtcaaagggttccaaaaggattaagcttgacagcagaatagccgggcggtattgaggggctgctgccgccggttgatttttgactgttcatttcgccttttttccccttcaaaaacgtttcagtaaatattgcgccccagctccttgtttctttcacttagccaatttctctttgttgactaaatgaggtgttttagaagaaagaaaaatatcccacgatttattggagcta

SEQ ID NO: 101718 - DNA, 768 bp, Zea Mays
attatacaataccaaattgtggatttgatgaaagttattgatgtggtacatgtctgtgaatttcttttgaacgtggtcaaacatagaaaaaattaacttaggacagaactaaaacaccttacatttgggtctgagggagtatattttagttgttcatacatttaatgttcatttttgtatgatatatggttcaacaacaccttttactgacataaggtactacaaacagttacattcatgacatcaattcagaatgagatgttaaaacatcgtgattgaatgccaaatccttcattgtgtggaacaaagcaagcagtacatatgtgtcttcttgtcagaaattatcttcacactacagctgaatgtaaggctctttctttcagaggattccccttctcaagctggattaagaccacaggacaatctccaagcaaaaggctcatggttaatgcatgcagctggcccaagctcagatgattctctgccacctggcttcgaatcattgcagccaaccagcgatctcaaaattgacatgtcccaaatcgctcttattaggtggagatgcccaccacaggtaattagggcctgtaatcttgaacattgcattctactactggcaagttgccaaggtgacatcagatcattcgcgcaaccccccaagtcaagtttttttttttacaattgttgcattctttggttgcagatattgtataatcctgattggtgtgtcgctgctggagaagaaagtgaggaggttgccttgcagaa

SEQ ID NO: 101719 - DNA, 212 bp, Zea Mays
ggaaaatcaaggaaggtggagggcggcaggattttttttacgggagttgagcggttgaagataagaacaaaaagtttttctcccagtcggctgatgagattacgtgagaccttccagggagtcagcgtcttcatgatatgaaatatctaaaagcatttcagggaacgcctggaagctgaatgaggagaaaataacgatgggaagaaaaaaac

SEQ ID NO: 101720 - DNA, 2011 bp, Zea Mays
cataggccgaaaatccaaaagggcgctgaaagggaggcgtcggcggcacgaggcgatcctgatccaacacacatctcgaggcgggtcccggagatcgtccagcgtccacccgctcccgcaccgcaccccatcgcttcgtcgctacgcatggataccgacaccgccaccgccatgggagcgctcgaggaggcccacctcgcggccgccgcgtgcgcgtgcgaggaggaggaggaaagcgactacatcggcttcctcgcaggggaagcggcggcgggcgacgccgtggagccggccgtgcgcgccctgctgctggggctcggtgaggacgaccgccgcgagggcctgctccggacgcccaagcgcgtcgccaaggccttccgcgacggcacccgaggctacaggcaaaaagtaaaagacatagtgcaaggtgctctgtttccagaggttggtgtggataaaaggactggatctgctggtggaactggcgggcaagtagttgttcgagacattgaacttttctcctattgtgagtcatgcttgcttccattcagcatacagtgccatgtcgggtatgttccctcaggtggaagagtggttgggttaagcaagctttctagagtatctgatgtctttgccaagagattgcaaaaccctcaaagactagctaatgaaatctgtggtgcactgcatgctagcattcaacctgctggtgtggctgttgctctgcagtgctggcacattcctttaccagaaaacttggaatgcaagactttggaaggttggattagaacttcacattcatctcgctctggagtctttgaaggtgaaagcagcactttctggagtgacttcttggctcttgttaagcttaggggcatagacgtggaggctaaggaccgtactgtttctattccttggtgccctttaaggtctcatgaggttccactctctaacgggctctgcaagaaaaactcaactaatggcatggtttctgctgttacctcgatgctcttatcactcggagaggaccccctcaggaaagagcttttaggcactcctcagcgttatgtgcagtggctgatgaagttcaaagcatgtaatctactagacgtgaagctgaatggttttacacttagtaatgttagcttatatgagaggacaggtggaggcacaactgatcatggagcaatcagatcggagctgcacttgccattttgtgctcaatgtgaacaccatcttctgcccttctacggagtagttcacattgggtactttggcaatggaagcggagaaggcattgatcggtcgcattttcaggcgttggttcatttctacgggtgcaagcttcaggttcaagaaaggatgacaaggcagatagctgaagcggtttattcagtttcgcacaatggggccatggtcgttgttgaggccaaccacatttgcatgatctcaagggggatagagaaaataaggagcaacacggcaacaattgcagttttgggccagtttttggccgacccttctgccaaggcgtgcttcttacagaatgttttggattctgttggttctgcggtatgaatcgtatcgcaagcagcaaagaaaaaaatgtctagttggagtactatccagcaattgaaatttttagcaatctactggtctagcatgattcttctcgggtgcaaatttgtcacctgtgggactgtaccgaggatgtcacaagaaagcaccaaaagggttttggttctctcgtgttgtaccatgtcacttgtaaggcacttcaaataaaaaagaaatagtaatagttacaactgtgccaagaaggatatagtcattcgtacttttagatgttgtcaaaattgccatttgttcttgaaattttagtggagattactctggcttttgttgttgtaccgttgaatttgatgttacgccgatcgagatcagtaaaaaaaaaaaactcagatatctgttcgcttgaccatggtccaacgaaatgtaattcgttcttgca

SEQ ID NO: 101721 - DNA, 1757 bp, Zea Mays
actacactagcaaacattaataacgcaagcggcactgttgtcagtgtcagtgcacagtagatatactgctagctagcttacctggcagccagtgcaactgcactgcacgtctccaatgcgctgctattataacgacgcgaacgccgcgcaggccttccgtggtatacagcagcagaagcagcatcacgatcccggcccggcggcgcgtacgtcgacgaggaggaggaggacgtacgtacgcagagcagctgctggcaccatggctcccgtgagcatcagcgctgttccgttcctcccgacggcggcggagggggagacgaagctgcgcgcgtcgttcgtgcgcgaggaggacgagcgccccaaggtgccgcacgaccgcttcagcgacgaggtgccggtggtgtcgctcgagggcatcgacggcgcgcggcgggccgagatccgcgcgcgcgtggccgcggcctgcgaggactggggcatcttccaggtggtggaccacggcgtggacgccgcgctcgtggccgacatggcgcgcctcgcgcgcgacttcttcgcgctcccgcccgaggacaagctccgcttcgacatgtccggcgggaagaagggcggcttcatcgtctccagccacctccagggggaggcggtgcaggactggcgtgagatcgtgacctacttctcgtacccggtgaaggcccgcgactactcccggtggcctgacaagccggcggcgtggcgggcggtggtggagcggtacagcgagcagctgatggcgctggcgtgcaggctcctgggcgtgctctcggaggccatgggcctggacacggaggcgctggccagggcctgcgtggacatggaccagaaggtggtggtcaacttctacccgaggtgcccgcagccggacctcacgctggggctcaagcgccacaccgaccccggcaccatcacgctgctgctgcaggacctcgtcggcggcctccaggccacgcgcgacggcggccggacctggatcaccgtgcagcccgtggagggcgccttcgtcgtcaacctcggcgaccacggccacctcctgagcaacggcaggttcaagaacgcggaccaccaggcggtggtgaactcggagtgcagccgcctgtccatcgccacgttccagaacccggcgcccgacgcgacggtgtacccgctggccgtgcgcgacggggaggcgcccatactggaccatcccatcaccttcgccgagatgtaccgccgcaagatggcccgcgacatcgagctcgccaggctcaagaagcaggtcaaggccgacaagagtgccaacaaggagttcgccgactccaagcctctcgacgccattcttgcctgatatggtagggggggcgcgactaccgtaccgatccgttgctattgctgcgtgtgatttcatcatctataagaacatatatagctacgtgcgaccgtgtggtgattaattaaggtctgaataaaataatagccgcacaaaactaggaagcgatcgatcaccccagataaatgtatgtgcgttcccttttctttcaagatgtgtaattttttcaacgtgcggttccagatatgcatggactggaccggagtgcattgtaattcttttgtttcccctgttgaatatgcaagaggtgtgcatgtctttgtatgaacgaacgaactagacacacttgtatctgctcccttcgttcaataaatatacgacgccgccgttgatttttttttttcaaaaactctaa

SEQ ID NO: 101722 - DNA, 1913 bp, Zea Mays
accaaagcgaatgccatctttcctccgaagagcaaccgagagcaaaccactcgcccgtccgttcccgcgccccgatccagctccagctcgcgcacgacgtcggcaagtccgttcccgtgcctctactatccatctcgccgcacgacgccgccaagcatgtgcaaggtggcgatcacgatcccgtccctcgtgtggctgtgccgcgccgtgcggcggtggcggtggcggtcccgcggccgcgccgcggacgcctcccgctccaccaccacctccttctccttctcctccccccgcccctgcacctcggtgccggcggggcacgtggctgtgtgcgtggaggccgccgccgccgccgccgggtccggctccaccaggcggttcgtggtacgggtggcgcacctcagccacccgtcgttccgtgagctgctgcggcaggcggaggaagagtacggcttcccggcggcgcccgggcccatcgcgctcccctgcgacgaggaccacttccgcgacgtcctccaccgcgtgtccacgtcggccgccgcctcctcctcctcctcctcctgctgcggcctcgccacgcggcggtgcgcgcgcggcgagtcggggccgctgctgcagggacgaataatggccgtggatcagaagctgggctggtgattgattcattcgcccgttggcatccgcgcccgctgcctgaacggatcgagcctgcgtgcatatgagtgacatacccgatcggtgagggcgacgggtttctgcaagacttgcaagttgcaggtacgagctcgatcgcgtgcaagtgctcagctgcggccattgcacagcgcgagccgcgagcggaagggacaaaagcgtcttgcccgactggcgcggccgagaggaccgttcacgcaagcacagggaggaagagcagcaaagcaagcgccacactcgccgcgcgcatcccgtgcagcgtgcgcagcagaagcacagcagcacgaccccggctaggcggctaccacgatgggtgggcaaactttactaggaaagacgccacgggcattgacgcattgttaacggcagatagctacatggatttagttaagaaagcctataaattttagtgcgagttgaaaggcggttcctcgtgattttgccccatgattttcgatacgcattactagtatttctcatgtatacattcagtagctcgatcaactgtgcacatgcgcatttacagctttgctaggatagataagactgattgcaacggtgtcctttaaaccgtcctggattggtataatacgggtttagcggtacaagtaaggccgcaacggtatcctgtaacacctcctgtacattttcaggctagagacctctcctccaaatgtgcaggcgttgtctcgtcctccaaatcatctcaaggtggccgcatccatatcccgagcgacgacggccgatcttcctcgtgcatgtgttcccaagcgacgacggacgatgtacttgccgcagcagccatggttcgtcgaccgttgaagccggtggtctagtctgttcgcaggagcgcaaccgcacagtccaacctggagagcgtcagatctatccactcggaggcagtaccactgaagtcaccgatagaacctggcgtggatcttggaggagaggagagaaggcgtggagggtgcagcaagggtgtgcagcgagctcgacgtggccggcggcgtggggctcggacgcgtggtgctggcgcacggcgtggtgcagacggcgcggacgcagcgtctatggcgcaacacaggacgagtctaggaggccggaaggatggtttacaggttactgttgtaagagtttagtgtttagaggttggaatctttttagagggacactaaatattcctatagaggatataatttacagtccaccgttgcaaacag

SEQ ID NO: 101723 - DNA, 674 bp, Zea Mays
cgatcacctcccccaccattcctctttcctgccctcgtccgtttccgcatcggtgtatcttcgcccccggcgaaggcgctatcctcccgaccacccggcggtgccggtacgccggtaaggcaggttgccagaccccgcgaccccgatcccgatcggtcgctggcgaggcggcgtgacctaccccggctcatcctctcaagccagacggtctggctgctgtgcatccccgttttggcggctaccttacctctggcaaggcaatcccccctcacccctggcaagcacgggagaacatggagagtgcttcagatgtacaaatgcaacatcgtgctgaagattccgagactacaattgagatcaaaatcaagacattggattcccagacatacaatttgcgtgtgaataaatgtgtgccagttcctctgttgaaagagaaaattgctactgtaactggaatattgtctgaacagcaacgcttgatttgtcgtgggagagtcttgaaggatgatgaactcttgtctgcttatcatgtcgaagatggtcatacattacatcttgttgttagacatccaggccagtcagctacatttggaaatgcagcaaccgaaggtttgtaaacttaagaattgtaaatttatggagttttgttaaccagttttttctctcgaaaagcg

SEQ ID NO: 101724 - DNA, 2848 bp, Zea Mays
cgatcacctcccccaccattcctctttcctgccctcgtccgtttccgcatcggtgtatcttcgcccccggcgaaggcgctatcctcccgaccacccggcggtgccggtacgccggtaaggcaggttgccagaccccgcgaccccgatcccgatcggtcgctggcgaggcggcgtgacctaccccggctcatcctctcaagccagacggtctggctgctgtgcatccccgttttggcggctaccttacctctggcaaggcaatcccccctcacccctggcaagcacgggagaacatggagagtgcttcagatgtacaaatgcaacatcgtgctgaagattccgagactacaattgagatcaaaatcaagacattggattcccagacatacaatttgcgtgtgaataaatgtgtgccagttcctctgttgaaagagaaaattgctactgtaactggaatattgtctgaacagcaacgcttgatttgtcgtgggagagtcttgaaggatgatgaactcttgtctgcttatcatgtcgaagatggtcatacattacatcttgttgttagacatccaggccagtcagctacatttggaaatgcagcaaccgaagctaacacatcaaattctggccgtcgtcatgggcccacagtggcaagaagtgtagtacttgaggctgttaatgtggatcctgggagcagtgaactcccagcttttgttgcgcagattctccaaagtgtgcttggaacaatcaatgcacaatctacgggtacaccaacatcttctgacaccggatctttagatccttcacaatcttccatcccaaatactataagagttgaactcgaccagcaacaagctcctctgctttttcagtctgaacccgcacatgagtcatctcaaccaaatgtcatccctgatgctttgacaactatgtctcagtacattaactttatgagggactcatttaggagggagggctttagtcttaatggacaaacagagggtaatgtggaaaacagaactgcagagcctgaatcagcttctgtgcttgggcttcataatgcatcattgctagctgaaaatatgcactctactaggcaaattattgttgaacaggctggtgcattgctgtctcaactctcaactcagctgggagatctagagaatgtaactgattctgcaatacgaagggacattcaaagtagtgcagttcgcacgggttctctatttcagaaccttggttctttgcttctggaacttgggcgcaccacaatgctcctgcgtataaatccgtcatcttcagaagcggttgtaaactctggaccagctctttatatatctccatcagggccaaatcctcttatggttcaacctgttccatttccaggaaggtctgtccaaatgggtactttgttttctagtctgggttcacaaggatctgttctacatccgagagatgttgatatccatgtccgcacaagtgggtccgtgcctggagccagtactaacccaagtgattcagctggtgcgcaagcgcatcaaaatgtgaataggccaggagatgcttcgcatgcaaatattggtgaagcgttttcaggggttgcaggtggcactcctttttcagttgagtccggagttagactattgccacttagaacagtggttgccatgcctgctggcatcagtcgtgctccatcagggtcgtctagtggtgggcttggtattatctatccatttctcactagggttcgacaaagggcaaacactaatggtaatgatgaaaggaatggtcaatctccaaatgaatcggctcgtagtagcacccatcttaatcagcaatcaattccgcagtcatctcaaactcatgaagcaggtaatctgagatctccagttgatgtcaatgttggagatggctctgagacctcacctgggcagcagaatggtctggtcactctctctcagataatggacttttttggatcaatgctcccaggcgaaaatgttcgaggaaatacttcaagccagcaaccaccaatggcttccaccgagcagggagagggtagaaatcttgcaacaccagaagtgtcaggagccagtgaggaggccctacgctttgctggcatggtcagacaaattatgccatttatctcccaagttgaaacacagaatcaaagtgccccaccagacagcagcagcacacctgcacaggctgcatctgggagtgcagacagagctagggatgtcccaaatgattctacgagttcccgtcaacataaccgcgaccaaattgatgagcctaattctaaaaggcaaagaactagtgactgattggaatctacttgtgagctgagaatcttgccagttcttgatttaccccagcggatgatcaaaataaggacttgagacaaatggtggcagtattgagacaaaaatggattagctgtggtatatacttggcactgagggcactagacgaggcacctatgccttttttttttgagggggcgcatcttataagctgttatttttttagtgcaacgagcatacatgctgctggcatccaatccccaatatgtacaagttttaattcaggttgtgatcatttacgcaacgaatcaaagcctccgctctggtcattgccgtagcatacggaggactgacgcaatcaatcatattgttacgagaatgtatagcttaagattgtatgtttttttttaccatcgcttaagacaatcagagcatatagttcatgcttattatagtatgatccaaataggactagtagtattgttcatgcttatcattagcattgcttaagagcttgtttgggagtaagagaattaaaaaga

SEQ ID NO: 101725 - DNA, 1232 bp, Zea Mays
gtatcttcgcccccggcgaaggcgctatcctcccgaccacccggcggtgccggtacgccggtaaggcaggttgccagaccccgcgaccccgatcccgatcggtcgctggcgaggcggcgtgacctaccccggctcatcctctcaagccagacggtctggctgctgtgcatccccgttttggcggctaccttacctctggcaaggcaatcccccctcacccctggcaagcacgggagaacatggagagtgcttcagatgtacaaatgcaacatcgtgctgaagattccgagactacaattgagatcaaaatcaagacattggattcccagacatacaatttgcgtgtgaataaatgtgtgccagttcctctgttgaaagagaaaattgctactgtaactggaatattgtctgaacagcaacgcttgatttgtcgtgggagagtcttgaaggatgatgaactcttgtctgcttatcatgtcgaagatggtcatacattacatcttgttgttagacatccaggccagtcagctacatttggaaatgcagcaaccgaagctaacacatcaaattctggccgtcgtcatgggcccacagtggcaagaagtgtagtacttgaggctgttaatgtggatcctgggagcagtgaactcccagcttttgttgcgcagattctccaaagtgtgcttggaacaatcaatgcacaatctacgatccttcacaatcttccatcccaaatactataagagttgaactcgaccagcaacaagctcctctgctttttcagtctgaacccgcacatgagtcatctcaaccaaatgtcatccctgatgctttgacaactatgtctcagtacattaactttatgagggactcatttaggagggagggctttagtcttaatggacaaacagagggtaatgtggaaaacagaactgcagagcctgaatcagcttctgtgcttgggcttcataatgcatcattgctagctgaaaatatgcactctactaggcaaattattgttgaacaggctggtgcattgctgtctgtaagtctcatatttcaaaatcttgctggttccaattagctaatcttagtttatcttcttaccactttatttaacgtattctgttcattgctattgacttgatgatgtttgtgtgttacttgatctttgctgataggaaacctcatatatttctgacagtaaacatgtaaatttgcatttgctgcta

SEQ ID NO: 101726 - DNA, 665 bp, Zea Mays
caacccggccgctcgagcagctccagctccaagcctccaagcatcatgtgcagggtggcgttgacgatcccgtcgctcgtctggctacggcgcgcgctgcggcggtggcggtcccgcgccgcggaggcggcatcgtcctcctctgacgccgcggtgccggcggggcacgtcgccgtgtccgtgcaaggcacggcggcggcgccgaggcggttcgtggtgcggctggcgcacctcagccacccggcgttcctggagctgctgcggcaggcggaggaggagtacggcttcccggccgccccgggccccgtggcgctcccctgcgacgaggaccgcttcctcgacgtcctccgccgcgtcacctcctcggcctcgttttcctcccattcctgtggtccggtggtggccgaccggcgcgcgcgcggcgacgcgcggccgctgctgcgcggcatggccgtcgagaggaacctcgtctggtgaccgcgacgcgtgcgagcgagacaagccggcagcgggaaaattgaacgactcgcatggtgggcatgcagttcgtgcccctcatacgatcgagtgggggggggtggcgggcgtcctcctcccgtgccctacgtgaagacgaaggccgcgagcgtcgagcgaggctgcgagggcaacaactgcaaccgggg

SEQ ID NO: 101727 - DNA, 1218 bp, Zea Mays
cccctcctccctataaagcctagctaccttcccctccgcaagtctgcctccaagtccaagccacctctcagctctcaccagctagctctactctcgcggcgcttccccacgccgttcgtcgccatcgattgacattggtccaacccaaccgcgcagctagatagatctacgtcgaccggcggccgtgagggacgaggcgcgcgctcgctcgctcgctcgtgcgtcgacatggcgaaatgcagcagcaagatccggtacatcgtgtggctgcggcagacgctgcggcggtggcggtcccgcgcggcggctcgcgcggcggtcccggcggggcacgtggcggtgtgcgtgggcggcgcggcgcggcggttcgtggtgcgggcggcgcacctgaaccaccccgtgttccgggagctgctccggcaggcggaggaggagtacgggttcccgtcgggggcctgcgcgggccccatcgcgctcccctgcgacgagggcctcttcgagcacgtcctccgccacctctcctccccgtccaagtccgcccgcttcgtcaccctcgaggacctcgagagcggcgcactgtcctgctgctgcgtcgccgccgccggagactcgctcccgctcctccgcggcatctccgccgacaaggccgtctggtgagcgcgccgccctgcccattgcgggcgcgggcgcgacggccgtttcgccggagactcgctcccgctcctgtacggcgacggccatttcgtcgtctcgtctcttttttcttcttttaaccactttttcgcgctcgctcccttcgttccaatcccacccgagtggagtggagctggacgcggcggggacagacacctcgacgacgagcaagaggagtgcggccggccggaggcggtgaagtgagatggctgagaaagtcctaggattttttagacgactgtcaagtctagtcatccattcattccccccctgttgtaagatcaattcgggaatttagtggctaagttttatttctttttttctttgcctttttttaataatcattcagtactgctgcggttcggccagcattgttgcaagtgaaaaacattcgtttattttcccgctacagcggagtaaaaccgtgatcgtgtggactgcttggccgacgcgcgggtatttttcttttgggtcttgcctctctgcgtagtattttccaaatgttctcacttcccgagtgcttta

SEQ ID NO: 101728 - DNA, 269 bp, Zea Mays
atcaagatggcagagcgcctcaaagaggccgtgccatacattgaacagggccatgtgcgtgttggccctgaggtcgtcaccggtgcagcatttcctgtgaccaggaacatggaggacaccatcacctgggtggattcctcaaagatcgaggagaaagtaatgggggtacaatgatgcattggatgattatgatgtcatggtttgaggttactgctcacagaacttgtgtgtggttaaatgggaattgctgtgaatgggggagggaaata

SEQ ID NO: 101729 - DNA, 90 bp, Zea Mays
gaccacgaaccaaacagcccatgtttacctatcaacaggatcggtccagatggttgatacttaagacttgctacaaatcattcatggaca

SEQ ID NO: 101730 - DNA, 1368 bp, Zea Mays
gactgcggaagtggaaggtcaggatcgctttttgaataacctattgggggaggggcgaaggcgtaaaaggactcggccttctgctttgaccgcggcccgattagaaacggacgaccgagaccgcctgggcggatccgagttcggacggcccatcagagcatcagacgaccaccttcctgcccccattcgttttcgcatcggcgtatctcccggcggccggcaaaggcgctctcgacctccctgcggtgccggtacgacagtcgacaggatggcaatggccacatcagcatcgtaccctccacctcctccattttaccgattgtacaaaaattttgagcaagatccctcatctgcaccagaacctccaccaccaattgacgaaccattcaaagccttgggtgttgattacacagtatgttttatcgtaccgcctttgctaatctgctattgattgcgctaaagtgattctggtttgcctctttggtatccagggagatgttgtgattccaagcttggagagtcataatgtccgtcagctttatccaaagggtcccaatattggtgtgttgattcttgaaaaatagatatgtttatctgcgtatgcatacatgctcaattctttgtgattgataaacgttaaaactgtttagacactagctgaaagttttatatgccaaataagttgttgtactgttacttttgaggactcaataaattatttaatttaatgagctgactctttggaaaatttgttaaattttagacttcaagaaggagcttaggaccctcaacagagagcttcaattgcatattttggagctggcagatatattagttgagagaccatctcaatatgctcgtagggtagaagatattacgctcatattcaagaacttacatcatcttctcaattccttacgacctcatcaggcaagggccacattgattcacatgcttgagagccaaattcggcaccgcaaggaagcaattgaagatataaagcagaggagggaggaagcgcaaaaggtgcttggggaatcactgcttatcttggatggaagtcaaactaactaggctgacgccgtcaaggtagttggttcaagaccgattcttctatgagttagtgtgttagtagaatagaagacaagatgtgtctggattgttgtggtatcatctgttgtggcttgtggtatttccagctttgataactgaattttcttacttctatggtctatgttagcaaagttggattactttcttacttccattggtactcaactgcatcatgggttactttcttgtggaagtgtatattgtgagattgatgcctcgtggccagcttaattgaaaggttgttatatgctaata

SEQ ID NO: 101731 - DNA, 1087 bp, Zea Mays
gactgcggaagtggaaggtcaggatcgctttttgaataacctattgggggaggggcgaaggcgtaaaaggactcggccttctgctttgaccgcggcccgattagaaacggacgaccgagaccgcctgggcggatccgagttcggacggcccatcagagcatcagacgaccaccttcctgcccccattcgttttcgcatcggcgtatctcccggcggccggcaaaggcgctctcgacctccctgcggtgccggtacgacagtcgacaggatggcaatggccacatcagcatcgtaccctccacctcctccattttaccgattgtacaaaaattttgagcaagatccctcatctgcaccagaacctccaccaccaattgacgaaccattcaaagccttgggtgttgattacacaggagatgttgtgattccaagcttggagagtcataatgtccgtcagctttatccaaagggtcccaatattgacttcaagaaggagcttaggaccctcaacagagagcttcaattgcatattttggagctggcagatatattagttgagagaccatctcaatatgctcgtagggtagaagatattacgctcatattcaagaacttacatcatcttctcaattccttacgacctcatcaggcaagggccacattgattcacatgcttgagagccaaattcggcaccgcaaggaagcaattgaagatataaagcagaggagggaggaagcgcaaaaggtgcttggggaatcactgcttatcttggatggaagtcaaactaactaggctgacgccgtcaaggtagttggttcaagaccgattcttctatgagttagtgtgttagtagaatagaagacaagatgtgtctggattgttgtggtatcatctgttgtggcttgtggtatttccagctttgataactgaattttcttacttctatggtctatgttagcaaagttggattactttcttacttccattggtactcaactgcatcatgggttactttcttgtggaagtgtatattgtgagattgatgcctcgtggccagcttaattgaaaggttgttatatgctaata

SEQ ID NO: 101732 - DNA, 4200 bp, Zea Mays
atggcgatgcagcaacagccgcccccgcctcctgggaacccctggccccctcaccacggcgccgggcagcacccgccgcctacctaccctcctcctccgccggggcaggcttggaccaatcactcatgggctcagaatcatggatatcaaggtcatgacaatgaggaagattgggctacaaaggctaaggcatgggttgctgctaaatctgttatgggaaaccaccagattcaacagcatgccatatccacaagtagaactgaaggtcatcataatggttaccatgatcagtatcagcaaccagctggtctgccaacagaagttacagaagctttgcacccaccagtacctcaatcaagtattgatcatgtgccatttccaatgacaggtcaacagagagaaacaaaccatttattagatagaggtccaatggtgtctccagcaaagaattttggttcattttcgtccacctatgagcaggaggtatcttataattattcttctgctccaggtactgggaataatatgcttcaatatccaaactctcaagcacagccatttccaaccacggcagctgttcaaggtggattctcacagggttgccttagtatgcctgttcccttgacagaacagcctctttttgggcatgaaagacagccaattgatccaagtgaccaacctttggaatttaacagtaggaaagctcctgatttggcagtacatataaatgtcaattccaatatcccagctcctcaaacactagcacctaatcatgatgtagctgcaacctctacacattcatggacgccatctgctacagtagggtacctgcctcgagctcctgtgccaccacaaacagcacagatggatccttctgtgcatgctgcaccactttttggagcagcatctagttctagttatgtttcacctgcagcatttggtgttggtaatgtaacagaagtgttccctacagatccaaacactccttttagtgttgcagataaatcaaagaaacctccagtacctaactggcttcgggaagaacttttaaagaaaaaatcggaaccactgagtgcttcagcgcaaaactcagaaaacttaaatcccatggaagctaatgaggcagtacagacaataggaagacctgaccaaagtgacagcagaagcaatgattccgctaaatccactgaagacgatgacgatgatgaggatgaaattgaagcagctcgaatggcagcaatcaacaaggaaattaagcgtgtgttgactgaggtccttttgaaggttactgatgagctttttgatgagatagcaacaaaagttctaaatgaagacgactcagctgaatccaatgaagccactggtgttttcggatcaaaggagactggtctgggaagatcaagagccaaggcctcggctaaagttgttctccctgctaagtcaacaaatagttctgatcataaagatagtactgggttaagttcccctaaaggtgctcttctcggcctggctagttatgattcagatgatgacgacgatgctgacactgacagcaaggataagatgccaatatcaaatttatcttctaaagataatgctggtgctgtaaatactgaaggtgataaaagcactcttggtaaaagaaatgggaatcacaatgaacagaattcttcacttggaagttctccatcaggggaagatcttaaatctaataatcaaaactttcaaaggaatgcgaatgcagaacctgaacaaatgcatattcgtgatacagagaatggggagttccgtttcaaggccaagactcgtactgagccaaagggtgcatttgacagaatggatgagaaggcacatacgtatgcagaggtagatatccagaacagaaaaacctcttttggcaataatgctgaaaagcacaatgatttggaaagcagtcacagacattcagaaaagagcagcaaagaggactttgttaatgagttgaaggctgatcatacaaaagaactcgaatattctagagcagaaaaatataataacgatgacaaatacagcatgtatggaaatattgacaaaaggggtagctgcaaggagggaaaaggttctgatagtgctgcaaagcatgaatccgatacaagggagccacattacagaggtaactctaagcttgatggtgcaaagggagattggaaggatttgccgaaggatagagagagaaatagagatgatagaagggggaaaggaaaggatgaaaaggacgacaggttaaggcagatgacaagtcataacagcagaagttcacggtcacgatcaccaagggggagaagtcgtactagaaaggagaactcacatgttcgagggagtgtttcaagtgatgagccttctgatagtgtgaaaaagagaaagcattattcccataaaaccagcatgtcaccttcacccccaaaatctagaaacaggtacactgttcatgttgtctctctataatactagtgttggggtgtgtgtgctgtaatggggttctctccccctttcttattcttctattaatacaaagatgcgcagctctcctgtgtattccagaaaaaaaatactatgctaggaattattcttggattgagagaattttgaatgtggacagccccagtattcatacctattaatatgttttatggttggcattaagttctagtcacctagatttaaagaacacatcagctttttatgttttattatgaatgaagctgtccatgctagatgttcttgtcttcagttctactcattaaagaatgggatttatgtttatcataaggtggtacctggtaacactaaatgcgggtttctgctatatgctaatttgaaccatgctgctgttctttattggatatgtgatggcaagttgttgaatcacatagaaatggtttgttgtagatattttggatgtgatatgagcatgcaggtatcttctgcgtgaagaaacatcaggttcatatacctcttatccttacacttacccatttagtattatgtttcatctctagacgaatttcgcggtctccacatagcaagcattctcaccgcaggcattcgccttattcatcggctggcaggtaagagattaatcagttcttcctttgccattatactattactcgtgctgatggttcatcatgaaatttctatttgctttcagatttaggatgcaaactagattagctatcaatctttctgtggctgattatggaaattagattagctgcaaacaaaaataagtaataaggaatttaagaataaaatcgaaccttaggtatttttacagcacattcttataaaaaatattgtttcgatcttactaggaaccttgtttatgaaatgtgatattttatagttctcccagaaaagttgtgttatcttgagaaataaagagattttctgcacaatttctcctgggtaagctgaaaactgcgcatcgtaaatttgtagcctgcagaaaagttttcagtttagttgttttagatttaactgtacttgtcttgaactcttgggtattctggacgggaactgctgattctttcaaatccgggatcttcaattgtctgcaccagctgattcctttaaatctggaatcctctatctgttggcccacttgtacagtaactcgtgatttatacttccttaactgtgtctaatcattgcaggaagaggcggtcgagatcgagaactccggtcaaaaggagatagaaggcatggacagtttatccgacgagatctttgcctaaacattcctctgaaacaaccaaagacatttttgcggttctgctgttgtctatctagtgcgtcttttgctccgacaacataatggtagaacagcattcctacagtgacaaacatgaaggcgaggactggatgtaccttgatataagatgcacattgaactgtatcttgtttgatagatgagctatataactagctcacgcagctggctgtatgatctgtagttcccccgttatctgaattgttcatgtattaggccatgtactgctcagcagagctatgtagttagttgcacttgtatgacttcagcatgcctgttgccagttgtttgtttgtctatgcaggatttttttcccgtttcctacttttttgataaaaataaactgattcctgtgaaatctatatatgatttctctcaaattcctgcca

SEQ ID NO: 101733 - DNA, 3030 bp, Zea Mays
atggcgatgcagcaacagccgcccccgcctcctgggaacccctggccccctcaccacggcgccgggcagcacccgccgcctacctaccctcctcctccgccggggcaggcttggaccaatcactcatgggctcagaatcatggatatcaaggtcatgacaatgaggaagattgggctacaaaggctaaggcatgggttgctgctaaatctgttatgggaaaccaccagattcaacagcatgccatatccacaagtagaactgaaggtcatcataatggttaccatgatcagtatcagcaaccagctggtctgccaacagaagttacagaagctttgcacccaccagtacctcaatcaagtattgatcatgtgccatttccaatgacaggtcaacagagagaaacaaaccatttattagatagaggtccaatggtgtctccagcaaagaattttggttcattttcgtccacctatgagcaggaggtatcttataattattcttctgctccaggtactgggaataatatgcttcaatatccaaactctcaagcacagccatttccaaccacggcagctgttcaaggtggattctcacagggttgccttagtatgcctgttcccttgacagaacagcctctttttgggcatgaaagacagccaattgatccaagtgaccaacctttggaatttaacagtaggaaagctcctgatttggcagtacatataaatgtcaattccaatatcccagctcctcaaacactagcacctaatcatgatgtagctgcaacctctacacattcatggacgccatctgctacagtagggtacctgcctcgagctcctgtgccaccacaaacagcacagatggatccttctgtgcatgctgcaccactttttggagcagcatctagttctagttatgtttcacctgcagcatttggtgttggtaatgtaacagaagtgttccctacagatccaaacactccttttagtgttgcagataaatcaaagaaacctccagtacctaactggcttcgggaagaacttttaaagaaaaaatcggaaccactgagtgcttcagcgcaaaactcagaaaacttaaatcccatggaagctaatgaggcagtacagacaataggaagacctgaccaaagtgacagcagaagcaatgattccgctaaatccactgaagacgatgacgatgatgaggatgaaattgaagcagctcgaatggcagcaatcaacaaggaaattaagcgtgtgttgactgaggtccttttgaaggttactgatgagctttttgatgagatagcaacaaaagttctaaatgaagacgactcagctgaatccaatgaagccactggtgttttcggatcaaaggagactggtctgggaagatcaagagccaaggcctcggctaaagttgttctccctgctaagtcaacaaatagttctgatcataaagatagtactgggttaagttcccctaaaggtgctcttctcggcctggctagttatgattcagatgatgacgacgatgctgacactgacagcaaggataagatgccaatatcaaatttatcttctaaagataatgctggtgctgtaaatactgaaggtgataaaagcactcttggtaaaagaaatgggaatcacaatgaacagaattcttcacttggaagttctccatcaggggaagatcttaaatctaataatcaaaactttcaaaggaatgcgaatgcagaacctgaacaaatgcatattcgtgatacagagaatggggagttccgtttcaaggccaagactcgtactgagccaaagggtgcatttgacagaatggatgagaaggcacatacgtatgcagaggtagatatccagaacagaaaaacctcttttggcaataatgctgaaaagcacaatgatttggaaagcagtcacagacattcagaaaagagcagcaaagaggactttgttaatgagttgaaggctgatcatacaaaagaactcgaatattctagagcagaaaaatataataacgatgacaaatacagcatgtatggaaatattgacaaaaggggtagctgcaaggagggaaaaggttctgatagtgctgcaaagcatgaatccgatacaagggagccacattacagaggtaactctaagcttgatggtgcaaagggagattggaaggatttgccgaaggatagagagagaaatagagatgatagaagggggaaaggaaaggatgaaaaggacgacaggttaaggcagatgacaagtcataacagcagaagttcacggtcacgatcaccaagggggagaagtcgtactagaaaggagaactcacatgttcgagggagtgtttcaagtgatgagccttctgatagtgtgaaaaagagaaagcattattcccataaaaccagcatgtcaccttcacccccaaaatctagaaacagacgaatttcgcggtctccacatagcaagcattctcaccgcaggcattcgccttattcatcggctggcaggaagaggcggtcgagatcgagaactccggtcaaaaggagatagaaggcatggacagtttatccgacgagatctttgcctaaacattcctctgaaacaaccaaagacatttttgcggttctgctgttgtctatctagtgcgtcttttgctccgacaacataatggtagaacagcattcctacagtgacaaacatgaaggcgaggactggatgtaccttgatataagatgcacattgaactgtatcttgtttgatagatgagctatataactagctcacgcagctggctgtatgatctgtagttcccccgttatctgaattgttcatgtattaggccatgtactgctcagcagagctatgtagttagttgcacttgtatgacttcagcatgcctgttgccagttgtttgtttgtctatgcaggatttttttcccgtttcctacttttttgataaaaataaactgattcctgtgaaatctatatatgatttctctcaaattcctgcca

SEQ ID NO: 101734 - DNA, 1275 bp, Zea Mays
atgtggagcggggctcctcgcatggcagaacggctggagctggagcgccaagcaactctcgatgggcacgtgcctcaagatctcgaagccggagtgaacagcggcggcgcacaaggtctgcatcctgtgcgagttcgtcgtcttcctccgactacaggacgatttggtgggatggacaacatttggcagcaatacggagacaccaaccaagcttatggtaatgtcacctacaccccaggaattgacttgactctctccccgggaaatgacttgactcggttccaagattcagctgttgtgcatggcccaggtccaattattcaggaaaaccagtcgttcagctctacctcacaagtgcctcaacctgtcaatgatcgaagaaagaagggggttgccaagcgtgagaagaactactccaatttggaggatgaaacattatgctcggcgtacctaaatgtgtcgaaggatccagtggtaggtgtgaaccagccaatgaaatcatactgggcaagaatcactgactacttcaacgagatgaggactactgacgtggagcgcagcagctcctctctccaacatagatggggcgatatctcaagggacaccgcattgttctgcagttactatgctgagattgaacggaagcatcaaagcggtaaaagtgaggacgacaagataaaggatgcactgaaaatgtatgaagggcttcgaagcagcaaattcaaatttttgcattgttggttgatccttagaaaagagcagaagtggtctgaatttctcgccaccacaacatcaagcacctcccaagctcgatcaaaggctgatcccgtgcagcaaggcgacccaacagcaacatccacacctgaggtgaatgtctcagagaaaattgcaaggccaattggtagggacagagcaaagaaacaaaggagcaacaactcatccagctcctctgcttgctttgaaatgcttcaaaagatacaattggaccgctccaggttcgaggaagacatgaaggctgcaagcaaatatgagtcagaagaaatggctgtccggtatgataggaaactggccattcaagaacaacaccttaaacttgtagcagagtcgacgatgatacagaaggagatgttaaggttccaacaaaaagaacgtgaggatcgcgtaatgaccatggacttggacaaggtggctccttgggtacgcgagtactacatcaacgagcagaaggctatagcggcaaaatcacgtcatgaagtgtcaagttctgatgtgtag

SEQ ID NO: 101735 - DNA, 267 bp, Zea Mays
atgggcccgatacagatgcaccccccagctcaaatggcgcaaaactctccacttcctgttctactcttcgtctttcaggactcgctcgctggggggcgacgtggccgtggcggtagcggcggcttcctcttcttcccgaaggatcttctgcacatcgtttacccgcatccggacgataccgccgaccacaactgcaacggtgcccagggtccagatccacaggatcttgaggcccgggctcttctggctccacctcgtcaccattag

SEQ ID NO: 101736 - DNA, 923 bp, Zea Mays
acgattttcaatacggtaaggaaatgtttgctacttattccctgttgtccattatccaaagtatggtttttaggccaaatttaaggattactgtttatattacagaaaaggacataggaaagaaacgagtaaaaaagaaggaaacaaattctttcagctacttgctgttcgatttacttccacatctaggattagttgttctttttttccacagcaccccccccggggcatgtctcactggaacttttacaaatttgggtttagggtacataaaaggtatgttttttacaccatcaagttgttgattctttatcactttaaattgctattgatgtgtaaaaagagttgattatgtgttccacataaattgctagaatcctttgtggctacaaaagaattgaatcaattgattatagttttaagctgcttccattcgcactggttgtctgctacatggcgcgtagtgattttacagttacttttcttgaactaagtttaaatgctccgcgtcttatatgtactgtttgtttctgctcttttatcgaagcacgtggagtgatacctctgcacctcagtggctttatcggcgaggcttggttgctgagtcatctacaaagacatggatcagctgaccaagctcgagctaccatcgcctccaaaaaaatgaagcatacccaacttaacaaagagctaccatattctatgggttcaaaaaatgaagacgactagcccaccacgaagcactcgaaggtattggttttttgcaagcattagaagagctccatcactttttaatataaaagccttttgtgtacatatgaaccaactgttggagcatttctaaaactgtattgacttatgcaacctctagaaacacactgttactgcatattggagtacactgcttaaatgctacttgatat

SEQ ID NO: 101737 - DNA, 2139 bp, Zea Mays
gccgggtcgggttttgctagggtttactgcttgtcttcctttctcggcagtcggcacattcgcggcttcgcctgatcgcgtacgccgcttcgtcctgattctcaatctctggtgctcccatgaagaaagacagggaatgaaggaccgccacctcgcgctgaaccagacccagagggtccgcctcgaggccgcgcttcaagagctccagtccgttgcgcccgccgctgccgtcaccgtcgcggacaccattcccgtcaatcaagaggacaacatcctcaaggggcatgggacgtcggaccaggacggggaggtggttgcgacgctctgcggggtggtggagcgggtcaacaagctggtctacgtccgcactcttcgcgcgagctgcagattctcgatggagatgaatggggttctgcaagccgcggatgccaagtactgggtttacaagggtgagggcgccgcgaatctcatcctcagctacaccggctcatcccctactatgcttggcaaggtattgcgggtcaagaagcttctaaatgacaagtcacagctgccaccaagttgtatggtcttctcaagtcatgagcaactcctgtggggccatattccagaactggttgagtctgtcaaacaagattgcttggctcaagcctatgctgtacatgttatgagccaacatctgggtgccaatcatgtcgatggtggggttcatgtacgtgtttctagggattttctagagcttgttgaaaagaatgttcttagcagccgtcctccttggagagtaaatgcaagttcaattgatatcactgctgatgccgctcttctaatagcagaccactctttattctctggtactccaaagggtagcagctgcatagctgtagagataaaggccaaatgtgggtttgtgccatcatcagaatatatatcaaaagataattctatcaagaaacaagtaacgagatataaaatgcatcagcacctcaaatttcatcagggtgagatatcgaagactagtgaatacaatcctcttgatctattttctgagtcgaaagaaagaataagcatggccatcaagtcatttttctcaactcctcagaacaacttcaggatttttgtcaatggatctttagcttttggtggcatgggaggtggtgcagatagtgttcatcctgctgacactgataagtgcattaaagatctcagcaaggtcagtggcctggaactccctgacttcactgagctcctgtcagagacaattttcaaatctggggtattgggcaaactgttgaccactcaaaagctggatgatcatgacattgaaggggcaattcatctgtactacaacataatttctcagccttgtttagtctgcaaaaacctaactgatgtagagctattgcggaagtacacactcttgcattctcttccgttggacaagagcttgaagattgtcagaaacttcctcatttctgctactgcaaaggactgtagcctgatgatcagctttcggccaagagagaatggaagtacagattctgagtatgattcagtgtttcttgaatcagcgaagcgaacctatgagtacaagacatatttcgttgatctggatgtgaaacctctggacaagatggtacattattttaaactggatcagaggatagtcaattcctacacaagatatggggaggtcttgccacctccaaagggcaagtaataccaaagacacttcggcgattcagctccaacaatgaggagcctctcttcttactatatacgtctggactatggagaagggtgcatcagagagctccagcccactacgcccttaggttctgtgcatatattgttgtatctcttaactgtttgatgatatggaatattcttttcccaatatggtaccgagcctttcttgagcctcctcctcgctgccgctcttcttcggaatgccgcggcatttgccctcccctcatgtttggcgagccggctgcacgtacagcacgacagtgagtgccagggacatgcacatcatggcgacggtttaagcttgtggacactcagcagatagggtgatgaccgccattccctgtatgacagacacgatgtgcatgcaacatgatcagccattcgatgcatttg

SEQ ID NO: 101738 - DNA, 1995 bp, Zea Mays
gcaacagaagcacagcacacaacacctgcctgctcgtgctcgaccaggcggcgatcgatcgatttccctcatctctggcgtggcactgggttccgggtaaacatgtgcgagggtggaaggccggaagcagcatccatggcctcgcatcgccggccacagtcggcggggctaagcagcggcctcccggtcccggagcaagaggctgcgggcggtggcggaggaggagcggcggaggcgacacggaggcccagagggtggcgagccgtcgccttcatcatcgggttctacgcggcagcatctatagcgggcaatgccttctccttctccctcaccagctacctcatcggccgctacaacatgaagcagaacgccgctaccaacgtcaacaacatcttctccggcacgtacaacttctcgcccgtcatcggagccttcgtcgccgacgccttctggggaaggttcaggaccctgctagttgggaccgtgttcggagttgctgcaatggcagttatcaccctgtcggcgactgtccatcagcttaaaccgccgccgtgcagcccactggcacagcaggccggcacgtgtgccgccccgtcggcgctccagcgagccgtgctctacctcggcatggggctgctcgtggtgtccgccggcggcacgagcccgactggcctgcccttcggcgcggaccagttcgacgagaggaaagagcagcacagtaagcagggaggcctcgcgcgcttctacaactggtactacgccgtcgccatggtggccacgttcctggcgctcaccgtcgtgctctacgtccaggtcaaggtgagctggggcctcggcttcgccatccccaccgcgctcatgctcatcgccttcctcgtgttcctcgtcggcaccaagctgtacgtctacgtgccgcccgagggcagcatcttctcgagtgtcgctcgggtcttcgtcgcgtcgtgccgcaagtggaggctccggctgccgcaccctgacgatgcacggcgccaggaggagctcctgtacgaccctcccgccgttggcatcggcggcgggcgccgcgtgttcaagctccccctcaccctgcagctcagctttctaaacaaggcggccatcgtgaccgacgccgccgccgagatacggcccgacggcgccccggccaggccgtggagcctgtgcagcgtgcagcaggtggaggaggccaagtgcctcctgaagatcatccccgtgtggatctccggcaccgtgtggttcaccatggtgacggagcttacaaactacacgttcctccaggcgtcgaccatggacctccacatggggaagcacttcaccgtcccgccggcgtcgatcgtcgccgtgttctacctcgccgtcgcgctattcgtgcccgtctacgacctgctcgtctctcgcgccacgctgcgtcgcggcatcaccctgctccagaggcagggcgccgggctggtggtcgccgcgctggcgttcgtggtcgcggccgccgtggagccgaggcggaggcgctccgcgcttgcgcacggcgacggcatgtccccgctgtccgtgttcctcctagcgccgcagctcgccgtgatgggcgtgtcgggtgggttcaccctggtgggacaggtcgagttctacaacacgcagttcccagagcagatgcgcactctcgccaacgcggtcttctactgcgcgcagggcatcagcagctaccttgccacactcgtggtcaacatcgtcaacgccaggacgaggcgacacggtgggtctgcgggctgggtcaccgacgacatcaacgctgggaggatcgactacttctactatgccatggcggtgctctctggagccaacttcgtctactttctcgtgtgctcgtacttctaccagtacaagggcgagcaggccgctgatactcctcctgctagatgtgaacctgcaacggacagtgatagtagaacaagcgagagtgccgccgctctcctaaggacgtag

SEQ ID NO: 101739 - DNA, 1251 bp, Zea Mays
atgcatgcgaggcacgtgctcgtctcctccgtcttcctgttcttcgtcgtcgcgctatgtaccgtcgtcctacccccgccccggtggccaaggtcgacgtcgttcttccagccgtcgtggctgcctccgctcaacagaagagagcgcgacgacagcgccgacgcccacccgccgtgcgactactcggacggacgatgggtgagggacgatgctgccgacgtgacgacgtacacggaggactgcccgttcctcgacccgggattccggtgcacgcggaacggccgcacggactcgtccttccgacactggcgctggcgacctcgtcgctgcgacctccctaaattcaacgcgacggacatgctggagcggagccgggacggcaggatcgtctttgccggggactcgatcgggcgcaaccagtgggagtccatggtgtgcatgctcgccgccgccgtgccggccgcgtcgtcgtccagggtgtacgagcggtccgggaagccgatcagccggcacaagggctacctcgccatggttttcgccgactacaacctctccgtcgagtactaccgcgcgcccatgatcgtgatggtccaccgcttcccggcggcaaacaacgcgacggcaggcagcgtgagggggggcgtccgccttgacgcgctgccacggcacgccgaccggtgggccgccgccgacgtgctcgtgctcaactccggccactggtggaaccagcacaaaaccgtcaaggcaggaaactatttcatggtcggcgaccgcttgaacaaaaccatggacatcaaggaagcttttcaacggtccctgcagacggtgaaagattgggaattgagtagtgctcagctttcggaaagctatttcttcttcaggagtttttctccctcgcattacagcaacggcacctggaacactggcggttcgtgcgccggccagcgagagccaccgaccacaaacaatggccgctccgaggaagagtactcatggatgaacgcgatgattgcgaagatgacggaggatatcaagagccacgggaggaaggcgaggtttctgaacatcactcacatgacggagctcaggcctgatggccacccggcagggcacagggagcccggaacgccgccggacgcgccggaggactgcagccactggtgcctccccggcgtgccggacgtttggaatcagatcctctacgcacacctcttgtccgcagggtatggcacgcgcaggaaccagagataa

SEQ ID NO: 101740 - DNA, 2778 bp, Zea Mays
tcacagcgtcgtgacgtcgtcctctgcttcgcaagcgcccgagccgcgcgccgccgaacccgccgcctcctccagcctccgggcacatcggagcacgccagccaatcgcaccccgacacggcggcaccggaggaacccctccttcttggtcgtagcctccgtggcctccctcccctcaccccttccggtgttggattgagggtggagcggagatccgccacggcttgattgatccctggatcgatacaccatataatttgggattctaaggtcccggtgcagcttcttctcgcagaagtttacgccctatgcccctcgctaagcccacccctgtgattccgccgtgacgcgtcatccacgggagaaacgccatgatgtcgaggtttgcccacttggggaagagcagaaaacttgctgaaacccttttggttgcctcaaagcccaatactgctggtggccaaaacattgcttcaagctttgcattcggcttgggttattccagcagggcctttttgcacgggaaggttcataatggtccaaacacctcctacatgctgggaagagcaaatgatagcttacattggagcactggtgtgaggaaattctcaattctttcatcttgtagccagaatgcatttcagagtcagcttgcttggaagcgacttgtagcactgggttctcgtgcaccaaaagcatctccaatttttagtaaggttgcttgtgccattggcttggctgtgagtaggtctaatatagccccttaccttgtcgcttttattgcgggagaggtaatgctagctcagaagacatctgcagatggagaatactacccaatacgtgagagagctcaggatggccgtatttacgttacctctctaatatattcggcagtagaattggttattataatcttcagatcaatatatttggcattgctgttcactccaagtatactgatggccccatttgcagagactcttggcagtaagtataggaaaacatggcttcgacttgtccatcgtactttggagcttgcaggtcctgcgtttatcaaatggggccaatgggctgcaacacgccctgatctgtttccaagtgacctttgtactgaattgtcaaagctgcacacaaaagcaccagctcacagctttacctatactaagaaaactgttgagaaagcttttggtcgaaagctatcagacatttttgaaaattttgaagaggaccctgttgcatctggaagtgttgctcaagtgcatcgggctgttctacgattccggtatcctaatcggcagacaaagcgtgtaactgttgcagtaaaagtaaggcatcctggtgtaggggactcaataagaagagatttcaatatcatcaatgccgtagcaaaaatatctagatatatccccacgctgaattggttgcgcctagatgagagtgtacaacagtttgctgtcttcatgatgtctcaagttgaccttgcaagggaagctgctcatctgagccggtttatctacaacttccgaaggtggaaggatgtatctttcccaagacctctctatccacttgttcatcctgctgttttagttgagacttacgagcatggggagagtgtttcacactatgttgatgaccttgaaggacatgatcgaattaaaagtgctctggcccatattggtactcacgcgctcttgaaaatgctactggttgataatttcgtccatgcagatatgcacccaggaaatattttagttcgtgttgcacaaccaaagaactcaaataacacccttaaaaagtcaaggccacatgtagtcttcctggatgtaggaatgactgctgaactttcaagtaatgaccgtgtgaatttacttgagttcttcaaggctgttgctcgccgagatggtcgtacagctgcagaaagtactctaaagttgtcaaaacaacagaattgtccaaatccaaaagcttttattgaggaagttgaacgatcattctctttttggggcactgctgaaggtgatgctatccacccagctgagtgtatgcaccaactgcttgagcaagttcgatgtcataaagtgaatatcgatggcaatgtttgtactgtcatggtgactacattagttcttgagggctggcaacgtaagttggatccagattataatgttatgaagactctgcaaactttactttttaaggaagattgggcgaagtctcttcaatacactatccaagggctcatggcgccttagggtcgtccgcaatcctttctaaagttttgatctggtttgtgttcgactggaggatcctcttctctcaccatcacgtctggcttcttttctacgttatttcacgtttcgtttctctgtacctgtcctggcgttgtgctgctaaagcagccttgatgataaagtaataactgcagtaaaaattttcagaagctaccagagtactatgctgctcagctctgggctgtcttcttatatgttcttgatgaagggccaaagaattaggtccttttcccccccctcctaccaacacttttgacaatagctcttagatgatgtagcaaaaggcgttctgttctgatgatcttttttgtaactggagagattgtatccgtggactggagagttgcttatgtacagacagagatactgttaatctcgaaggaatccacttgtcaactgacaattattcccaggaaaaggctcccagttttttcttgttttacatgtattagcaatgctgaatgtctgaaatttgaatgattttgctggt

SEQ ID NO: 101741 - DNA, 627 bp, Zea Mays
atggccaggaagaggacggcggcgcgccatcagcaccaggaaccaccgccaaaccctaaccctaacctccgccgccgggccgcggccagcgacccggcctcggacgagccgccgccgtcgtcgaagcgcatgctggcctttcacttcctccgcgcgctggccaggatccacagcaccaccccggcgccgcgccgcccgcgcaccatccgccgcgcggcctactcgtccatggcgcgcgctgccagcccacgccgggcctggacgcaggcgctgctccgccaggctcgcgcgcgcagggcggctgccaggtcctccaggggagccgtcctgctgcggagacgcgtcgcctccgccgcggcgtctcctccgccgccgctgctccgcgccagcgccggggagtccacgtcggcgccgacgccgctggctccggcggccgtggcggcccggggcccgcctccgaggcaggccggggaaccggccagggccgacgcgctccgccggctcgtccccggcggcgcggagatggagtacggcagcctcctcgacgagaccgccgactacgtgcgctccctccgcgcgcaggtgcagctcatgcagagcctcgtcgacctcttctccgcccaatga

SEQ ID NO: 101742 - DNA, 89 bp, Zea Mays
atcttttcacacataaggtctgtttatctattggttccctttattactctatatataggataatcattgtgctgtcaatccgacatgca

SEQ ID NO: 101743 - DNA, 232 bp, Zea Mays
cgggcacatcctgtcctgccgagatctattcaatatgaatcatgtcctagcaagacactcgacctcgctgtggctaagggcatgtataaatgactcgtatctgaaaaggtatttaaagtaatggatgtaaaaaagtataaaggaatgtctctagcaagcttctctaagtttagatacagttaaactcatacaatctatataaatgagtcgtattttgaaaggttctatatat

SEQ ID NO: 101744 - DNA, 93 bp, Zea Mays
gcaaagaaattgctaatatggatttgtagagaagaaagaaaatgcagctcgtggtgtccgatacatatcgaaacgacttcgcgtacatatttt

SEQ ID NO: 101745 - DNA, 1251 bp, Zea Mays
aaacgacctttagtttcatttgtttttgaaaattttgaagttaagttcttccaaacatggtctaaactagtcctaatttctctcttaatccaccccaaccccctcataatacctggtcaccaaaacagttgggatccaagcgggatggggtacttgagctccgtgatcggccaccccaccgatggatcctccgtcagcggcggcggcctcagccagaatggtagatttagctatggctatgcaagctcccctggtaaaagggcatccatggaagacttctatgagacaaaaattgattgtgttgatggtcagatagttggtctttttggagtttttgatggtcatggtggtgctaaggtagcagagtatgttaaagaaaacctgttcaacaatcttgttagtcatccaaagttcatcagtgatactaaagtcgctatagatgatgcttataaaagcaccgacagtgaattcttagaatctgacagtagtcaaaatcaatgcgggtcaactgcatcaactgctgtacttgttggtgatcgtctcttcgtcgcaaatgttggtgactctagggctatcatatgcagggaaggaaatgctattgctgtttcaaaggatcacaagcctgatcaaactgatgagcggcagcgtattgaagatgctggaggttttgtgatgtgggcaggaacatggcgcgttggtggtgtacttgctgtttcgcgtgcttttggtgacaaactcttaaagcaatatgtggttgtggatccggagatccgagaggaagttgttgatgacacactcgagtttcttatccttgcaagtgatgggctgtgggatgtggtctctaacgaggaagctgttgcgatgactagatccattaaggacccagaagaggctgcaaagatgctcttgcaagaggcgtacaagagggagagcagtgacaacataacttgcgtcgtcgtgcacttcttgcatgggcaaggtagcagcggatacgcttaaagcgtagcagtaaaattattttacgcagtggtgtgctctgatgtacatgcgtcgattgatttcccgatgttaaatggagaaacgtaactacgtaaggtaggaaacgtgtattatgatgggttgaactgggaaatgcgtgtaccctatactatatatatatactgtagtgtggtcgcggacgatgtttgggtctgaagatagtgttgtattgttgtgggaaaaaagataattgcgctttaggttttgtttgtt

SEQ ID NO: 101746 - DNA, 1044 bp, Zea Mays
tctagaaaatgtgccaaacccgtcgcttcgtcttcctctccttccggcttccggccccgctcctccccaaaatcccccaaaacctgacgagctggagggccgatccgcggctccccgccgcctgatccgagcagtctactcggcccagccggggatccaagcgggatggggtacttgagctccgtgatcggccaccccaccgatggatcctccgtcagcggcggcggcctcagccagaatggtagatttagctatggctatgcaagctcccctggtaaaagggcatccatggaagacttctatgagacaaaaattgattgtgttgatggtcagatagttggtctttttggagtttttgatggtcatggtggtgctaaggtagcagagtatgttaaagaaaacctgttcaacaatcttgttagtcatccaaagttcatcagtgatactaaagtcgctatagatgatgcttataaaagcaccgacagtgaattcttagaatctgacagtagtcaaaatcaatgcgggtcaactgcatcaactgctgtacttgttggtgatcgtctcttcgtcgcaaatgttggtgactctagggctatcatatgcagggaaggaaatgctattgctgtttcaaaggatcacaagcctgatcaaactgatgagcggcagcgtattgaagatgctggaggttttgtgatgtgggcaggaacatggcgcgttggtggtgtacttgctgtttcgcgtgcttttggtgacaaactcttaaagcaatatgtggttgtggatccggagatccgagtacgtaatctacgatatattttatactttctttacaaaatgcatattgttctgttcgggaacttccctgtaataggagaattatagtagtattaatgatcttactgggatggtttattgtttgcagacatctagttgcagtgtgccatctaggtgtttggttataaatgttagcttcaatgctttccacaattccaccagttttgtcttttgaggtcacacaaacctgcattagaagtcatgatctat

SEQ ID NO: 101747 - DNA, 1276 bp, Zea Mays
tctagaaaatgtgccaaacccgtcgcttcgtcttcctctccttccggcttccggccccgctcctccccaaaatcccccaaaacctgacgagctggagggccgatccgcggctccccgccgcctgatccgagcagtctactcggcccagccggggatccaagcgggatggggtacttgagctccgtgatcggccaccccaccgatggatcctccgtcagcggcggcggcctcagccagaatggtagatttagctatggctatgcaagctcccctggtaaaagggcatccatggaagacttctatgagacaaaaattgattgtgttgatggtcagatagttggtctttttggagtttttgatggtcatggtggtgctaaggtagcagagtatgttaaagaaaacctgttcaacaatcttgttagtcatccaaagttcatcagtgatactaaagtcgctatagatgatgcttataaaagcaccgacagtgaattcttagaatctgacagtagtcaaaatcaatgcgggtcaactgcatcaactgctgtacttgttggtgatcgtctcttcgtcgcaaatgttggtgactctagggctatcatatgcagggaaggaaatgctattgctgtttcaaaggatcacaagcctgatcaaactgatgagcggcagcgtattgaagatgctggaggttttgtgatgtgggcaggaacatggcgcgttggtggtgtacttgctgtttcgcgtgcttttggtgacaaactcttaaagcaatatgtggttgtggatccggagatccgagaagttgttgatgacacactcgagtttcttatccttgcaagtgatgggctgtgggatgtggtctctaacgaggaagctgttgcgatgactagatccattaaggacccagaagaggctgcaaagatgctcttgcaagaggcgtacaagagggagagcagtgacaacataacttgcgtcgtcgtgcacttcttgcatgggcaaggtagcagcggatacgcttaaagcgtagcagtaaaattattttacgcagtggtgtgctctgatgtacatgcgtcgattgatttcccgatgttaaatggagaaacgtaactacgtaaggtaggaaacgtgtattatgatgggttgaactgggaaatgcgtgtaccctatactatatatatatactgtagtgtggtcgcggacgatgtttgggtctgaagatagtgttgtattgttgtgggaaaaaagataattgcgctttaggttttgtttgtttcggatt

SEQ ID NO: 101748 - DNA, 1282 bp, Zea Mays
tctagaaaatgtgccaaacccgtcgcttcgtcttcctctccttccggcttccggccccgctcctccccaaaatcccccaaaacctgacgagctggagggccgatccgcggctccccgccgcctgatccgagcagtctactcggcccagccggggatccaagcgggatggggtacttgagctccgtgatcggccaccccaccgatggatcctccgtcagcggcggcggcctcagccagaatggtagatttagctatggctatgcaagctcccctggtaaaagggcatccatggaagacttctatgagacaaaaattgattgtgttgatggtcagatagttggtctttttggagtttttgatggtcatggtggtgctaaggtagcagagtatgttaaagaaaacctgttcaacaatcttgttagtcatccaaagttcatcagtgatactaaagtcgctatagatgatgcttataaaagcaccgacagtgaattcttagaatctgacagtagtcaaaatcaatgcgggtcaactgcatcaactgctgtacttgttggtgatcgtctcttcgtcgcaaatgttggtgactctagggctatcatatgcagggaaggaaatgctattgctgtttcaaaggatcacaagcctgatcaaactgatgagcggcagcgtattgaagatgctggaggttttgtgatgtgggcaggaacatggcgcgttggtggtgtacttgctgtttcgcgtgcttttggtgacaaactcttaaagcaatatgtggttgtggatccggagatccgagaggaagttgttgatgacacactcgagtttcttatccttgcaagtgatgggctgtgggatgtggtctctaacgaggaagctgttgcgatgactagatccattaaggacccagaagaggctgcaaagatgctcttgcaagaggcgtacaagagggagagcagtgacaacataacttgcgtcgtcgtgcacttcttgcatgggcaaggtagcagcggatacgcttaaagcgtagcagtaaaattattttacgcagtggtgtgctctgatgtacatgcgtcgattgatttcccgatgttaaatggagaaacgtaactacgtaaggtaggaaacgtgtattatgatgggttgaactgggaaatgcgtgtaccctatactatatatatatactgtagtgtggtcgcggacgatgtttgggtctgaagatagtgttgtattgttgtgggaaaaaagataattgcgctttaggttttgtttgtttcggattatt

SEQ ID NO: 101749 - DNA, 1479 bp, Zea Mays
tctagaaaatgtgccaaacccgtcgcttcgtcttcctctccttccggcttccggccccgctcctccccaaaatcccccaaaacctgacgagctggagggccgatccgcggctccccgccgcctgatccgagcagtctactcggcccagccggggatccaagcgggatggggtacttgagctccgtgatcggccaccccaccgatggatcctccgtcagcggcggcggcctcagaatggtagatttagctatggctatgcaagctcccctggtaaaagggcatccatggaagacttctatgagacaaaaattgattgtgttgatggtcagatagttggtctttttggagtttttgatggtcatggtggtgctaaggtagcagagtatgttaaagaaaacctgttcaacaatcttgttagtcatccaaagttcatcagtgatactaaagtcgctatagatgatgcttataaaagcaccgacagtgaattcttagaatctgacagtagtcaaaatcaatgcgggtcaactgcatcaactgctgtacttgttggtgatcgtctcttcgtcgcaaatgttggtgactctagggctatcatatgcagggaaggaaatgctattgctgtttcaaaggatcacaagcctgatcaaactgatgagcggcagcgtattgaagatgctggaggttttgtgatgtgggcaggaacatggcgcgttggtggtgtacttgctgtttcgcgtgcttttggtgacaaactcttaaagcaatatgtggttgtggatccggagatccgagaggaagttgttgatgacacactcgagtttcttatccttgcaagtgatgggctgtgggatgtggtctctaacgaggaagctgttgcgatgactagatccattaaggacccagaagaggctgcaaagatgctcttgcaagaggcgtacaagagggagagcagtgacaacataacttgcgtcgtcgtgcacttcttgcatgggcaaggtagcagcggatacgcttaaagcgtagcagtaaaattattttacgcagtggtgtgctctgatgtacatgcgtcgattgatttcccgatgttaaatggagaaacgtaactacgtaaggtaggaaacgtgtattatgatgggttgaactgggaaatgcgtgtaccctatactatatatatatactgtagtgtggtcgcggacgatgtttgggtctgaagatagtgttgtattgttgtgggaaaaaagataattgcgctttaggttttgtttgtttcggattattataatctgtctaaattatataatccagcataaacaatccaacaggtaaacaaacatatattatagattctgattatataatctaaagtctagataatcttataatctacttaagcctaccttatttgatattatttttagtaaaagacactatccatagttatgtttataaaattgcaatgtttgcatttttcttcttttc

SEQ ID NO: 101750 - DNA, 660 bp, Zea Mays
catgagaaggcggtggtcccgcgccgcggtgctcgcgtgcttactgctcctcgcgtgcgtcgccgagtcgcgcgcggtgcccgacgcctcggggggcggcggcggcccaggagagcagcggcggggcgcgttcgacgtcgtggtcgtcggcctcgtcagcatcggcctcggccgtcggtggcgcgccggcgagatggtcgacgaggacaagcgccgcgtgcccacggggcccaacccgctgcacaaccgatgagcgccagccaccgcgcgggcctagctacctgcctgcgttatcgatcgagcggcggcggtcatttgctctactgcccaggcgccgcgcccgccgttgccgggaggacgcgtgcatgatcgacgacgtacgtgccgagcgaggtggagaagaatgagaaggagaagagaggagcctacgtgtcagtatttctactaccactactcctactactactccctccctgcttccctttcttctctttctcctcgctagtaagaatttttcttcttctcttctcgcctgttctcgtggctgtgttttcccccgcttgtattgattgtattggcttgccaagcgaacagcaaaggctattctgttgattgatcggaagagaaagatactagtatatgagtatagtgtttcctgtt

SEQ ID NO: 101751 - DNA, 359 bp, Zea Mays
gagtattgttagtcttttctggtgttaaattaatatgaaattaactagcaattgattatatctatactatacttaaagcaccagtttcaacggtcgtcatgcgtcattttttacaaataacccctcacagctatttcaaattaatccgctgcgcgtctatagatgccaaacgacgctcgacacgggttaaatgcacgcgggccacaactatagcacaaacacgtcatgccagcctgctaactatgtcgggccagcccgttagcccgtcgatccatttaattaaatcagcgtaacgacgtccgatatgggctagatgcacgcgggccacaactatggcacatgcacgtcatgccggcctg

SEQ ID NO: 101752 - DNA, 1942 bp, Zea Mays
cctctccagtctccacggatcaaaatcgaatccaacgctactgcctagggtttcctctgcgtttcccctaccacaccccgcgccgcccacccatggccgccgcagacgcgtccgccgagaccgccgccatcgcgcggcgcctggcctcctgcaacaccggcacccgggagcgcgcgctccgctaccttctctccgactttctgccggcctccgcgccgcgcctctccgccaccgacctcctcaagctctggaagggcatcttcttctgcttctggcacgccgacaagccgctctaccagagctccgtcgccacgcgcctcgcctccgccgtctccgccccgccgtcccccaccgatggcaccgccttcctcgccgcctacctcaccacgctccgccgcgagtgggcccacatcgacgtccaccgcctcgacaagttctacctcctcaaccgccggttcctccaccacgccttcctgctcctccgtgctaactccttcgcccccgacgtcacctcccaggtcgtgtccgtcctgtcggacaaggccctgctaccggaagccgacaacgtcgccgctgccacctcccggggcctcgggtaccacgtcgccgaggcgttccttgacgagctcctgcctgtgctccccgtgagcctggagacgatggacaccctgcttgctccgttcttcactgtgttggagaagtcgaccgatcgggtgatggtgagtaaggtgaaggcaggtgtgtttgagaggttactagacagcggcagtcggttgctggagatggtgaaaaaaggggaggaggtggagaagggtgacgccgaggagaagctcggtaaagttggattgctgtttggattcagcaagaggttcctggatattggtgcaatggcagagacagtgcaatcgaaccggaaggtggtctttgggttgagggatgcgtttgtgaagatcgagaagggtttgcagttatctggtcttgagatccctgcaccaaagtttgaggctactgaggtgccagtgccgccaaatgtgggcaagggaaaggcacaaaagaagaaaaaggccaagaaggctgcattggctgaaggtgagatggaggaggacaatgatttgaaacgtgagaagaagataaagaaggaaaagaaggagaagaaaaggaggaaggtggaggttgttgatgaaggggatgtcactgagaagagtactaatgctccaggagctgaccaacagatgggtgatggtactgatggcattacattcgatgcagctttgaagtccaaccttcagaagcagtttgagatggtggcagcagaagctggtatggcagaagggggcagcagctcaagtgattcaccagtgacaccagttactgggaaagtggcaacaaagaggaagcgttcaaaatctgctgataagctgtctgaagcttctgctggggatggtggcagcgaaggtaatcttcttgcccaagatggagagaagagtggtaagaaggtgaggttctcgatgaagaataatttagtttggagacctcacaatcctttgccaccgcagtgtttgaggctgccaccttcagctactccaagaggaagcgcactaaaaaagggtgtccagccaggtcccataacaccgaccccattgaagaaggctaagccaaaggcaaaatccgcaaagaaggtcttgaagaagccgccttcatctgctgtgaagcgcttgcggaagttgcagagtttctcagcctgagttttgttggtgtatgacgccatgatggtcatgtcaatgtatcttttctgttttagtttatcattacttaattcttatcctttttgtaggttagtttatactgtgttgacttagctgtcagttcatatttgatggattgcttaatgatttgtgtggtcactatgctttataataattatgtggtgattgcaacagta

SEQ ID NO: 101753 - DNA, 1684 bp, Zea Mays
gggtagccaaccgcatgaagaaacgacagtttggcggtgcctaagtttttcaaatcctctcataatgttcaaattgcacagatccaagaaaaagcccctcataggcagctttagccaagtatttgccattacagacaaccgaaagatatggtcttctttgttcagctgaagctcaacctgtgcaacaatatcccaaagacaaaggaagtctgcaacagcaccaactgacagtcccccccccccccgcccccaagatatcattaatccatagcttatctctgaccgcctcctaaactgtcgtcctgttaatcattctgctaggaattgtctccataaggcgaggggcaatatcagctactcgctgctctccaatccaatgatcaccccaaaagagaatggaggccccatttccgaccttagattgcatggccatttttaagaaatctcgaatttgttttggaacatgaagaggtagagaagactaggggcggtttggctcaattttttgcagccaaccccaccgcatcttgagtgcccatcctagctctgaagatacccagtccttcgagctcaaggggtctacacactcttccctaggccacgagacaatgtcttcctctagcatcttttcgaccacgccaaagaaaaccttttctgattctgtcaattgctaataaaatgttgacatggtgaaagtgttcctgaaataccaaaatttggtgctgttgctagttcataattgttttgctccctggagatgtaccagactaaacatgctgtgaattttgttgatttacttttttcacaagaaaccacttgattttcataagattttgggtgatacaggggaaaatgagttgcttgatgatcaacgatctagatgctggtgttggaagatttggaaacacgcagatgacggtcaataatcaaatagctgttggaactttgatgaatttggcagataatcctactagggtgagcatcggccagaaatggagagaatctgatgttacacacagggtgccaataatagttactggaaatgatttttcaactctatatgcacccttaattcgtgatgggagaatggaaaaattctactggcagcccaaccgtgaagatataattagtattgttcatggcatgtatataaaggatggattatctgttgaagaagtatcaagaattgtagacgcatttccaaaccaagctctggacttctatggagctttgagatccaggacatatgatcaggctatcttggagtgggtcgaagaaatcggtgggcatgaacagctaaatgagaagcttcttaagcgaaagaaaggcgaggagcttccaacgtttatacccccaaagccaacactggaagcattgattgagtcagggtactcgctggtgaaggagcaggaactaataatgagctccaagctttcaaaagagtatatgaagaacttagaatagtttgatacacgagaaggggtaacttcttgttttcagtttatttggagcaataatacaccatccaatttgttccaacatccaaccaccggagtcgaatcgatgcttcgattgtcccagaaatcgtggtgggttcagatatgaactgctgaaaggaacgcatatcgtcattgtccttaattactctcatcgtgcattgccaaaaagtctttgggttgactcg

SEQ ID NO: 101754 - DNA, 655 bp, Zea Mays
atgtgattgattctctcctgctccttctttcttccatctctcctgtctctcttctctctctctctctgtctgtctgtctggcaaagggcactgacggccgcggcggtgtcgatggagtggtggcagaaggcggtggtggtgccggtgaagcgcgcgtggatcgccgccgccgcccggctgacgacgcgacataagaaagaagacggcggccacggcgtcctggtgaagctccacgacgacgtccagacgtgcgcgtacgaggacgtgcaggtgatgtgggagatgctgcagcgggccgagacggagaggctggcgcgcgagccctcgccaaagggcgcgcgcgcgctcgtctggctgcgccgccaccacaagatggacccgcgccggcgctgctgaggaggaggacgacgacgacaccctgatgcttttccttcctcctgctgccccttcggctttgcttgccagctgccgtgccaccctgtgcagccttgccctgtgatgcgagagccgctcatctgcggctgtgtgtacatattacatgctacatacagggtacagtacagccctgctgctgcgcctttcgtttccttcgcccggatgtaaatattcacagtttcatctttctaaggaagagaagagagatagagagaccaca

SEQ ID NO: 101755 - DNA, 1387 bp, Zea Mays
aatcgccgcagccgcgtgggatgcgatcgccttctttcgcccaatcctgcgtgcgtgccgccgccgccgtggacgggcagacggctggacgcattcgccaggcgccagctcgttcggtctttcctctctgcctgaatcgccagatcgctatctcactgatcgccacgacggcacacagttctgttcctgaatcgctgctactgctagcctgctgctggacgcctgaactggacaggctgtgttccaaattccaatactaacggttgatcttgatatattttaagtctgaattttcccaaactatcttactccgggaccaaataattatgaaattgactctactttgaaacaaatagaagatataatgcaatactttgagacatatagaactgaggggttttcgtctagcttgatcattgccaaaggtattggagataaaatgggtgtggaggcttcatttcctgtaaagcgtcgtgcaataagaaagaaagaatttgatgaaagtaattgtcaagaggaaattcttgaagctgagagggcttttgaagtgaaatattttttggttatggttgacatggcgatcacttctttgaagaccagatttgaagaactcatgatatttaaagatatatttggatttttactgagctcaaacaccctgaagttgttaaatgataatgaacttgaagagtgttgcattaaatttgctaagactttctcccatgatggttcatctaatgttgaggtacatgatcttatttctgaattgaagattatgaaattcactttgccagatggagtattgtctgctaaagagatttttgagcatgtcatagaggtgaattgctatcctaatgtctccattgcatatcgaatcttatttactgtgcatgtgactgttgcatctgccgaaagaagcttttcaaagctgaaattgttgaaaaactatttgagatcaacaatgactcaagaaaggttgaatcatttggcgactttatgcatcgagaagaaattattagatgagattgatatcaacactattattgatgactttgtatcgcaaaatgttagaagaaacttgtcaacttgatatcaagtacaacttcaagccatgccgtaatgccaaacaaattgcttctgtgataaagaacaaatggcaatgacgattggctgaagtattggtcccatcacaaaatactcgtggttgagaaaaaaatgacaaggtgggtaggatgttgaataggtatctttggctaccatgagaaaaaatgcctttaaatgcaaaccttctttccaagatactcttatctcaaagaatttggagaaggcgtatagactcgacgacgcttcgctaaggcgaacgtgatcatagtgagaagtacttgag

SEQ ID NO: 101756 - DNA, 2616 bp, Zea Mays
gcgacctgacctcgtgttacatgctactacggccgtgtatataacagcgatcaatctaccgtgaccacccccatcctctctaacccacggaagcaagacaaaagctcgtgctggacgacatctcccctgtcgatccacgaccatgatgcagcagctccgtcacagccagccgagcccgtgcctctgcggcctgcgggcggcacggcctatgctcgccctcggcgcagcagcatcccgttcgcggcccgccggaaaactgcaaccgagcgtctgcctcggcctcggccatgtagccccagccgcggcgagaggacagccccgtccccgtgccgttgccgactcggcgctgggagcatcgcctacgagcgtgcatgtcggaggcaagctgctgctgcagaacttcgccgccgacagccagcagcggctcaagctctccatccagcttgtcagcgccaccgtggccggcgtgtgtcaaggaagaaacgccgagcgccctgctcaagtaccgggaggacgagctcggcgcgctccggggagacggcgagacgacggagcgaccgttccagccgtgggaccgcgtgtacgactacgcgctgtacaacgacctggggaacccagacctgcgccaggacctggcgcgccccgtgctgggaggatcccaggagtacccgtaccctcggcgtaccaagaccggccgaccagccgccaaaacagatcctcggtcggagagcagagcgccgctggacgaagagatctacgtcccctgcgacgagcgcgtcggcttcgccagcatccccgcgccgacgcttccgccgctgggcgggcacttcaggtccctcgccgatgtctaccgcctcttcggcctcgacgacctcggccggctcccggaggccaaggcggtcatcaacagcggcgcgccgttccccgtcgtgcctcaggtcatttcagtgaacccgacacattggcggaaggacgaagagttcgcgcggcagatgatcgccggggcgaacccggtgtgcatcaagcgcgtcaccaagttcccgctggcgagcgagcttgaccgcggggtgttcggcgaccaggacagcaagataaccaaggaccatgtcgagaagaacatgggcggcatgacggtgcagcaggccgtagaggaggggaggctgtacgtcgtggaccaccacgactgggtgatgccatacctgaagcgcatcaacgagctccctgcgagcgaggagaaggcggaggtgtcgcagaggaaggtgtacgccgccagaacgctcctgttcctggacggcgaggactcgtcgatgctcagaccgctggcgatcgagctcagctcgccgcacccggagaaggagcagctcggcgcggtcagcacggtgtacactccaccggacagcggggacgacggcatcacggccgggaggttctcaacctgggaactggcaaaggtttacgcctctgccaacgacgcagccgagaacaacttcgtcactcactggctcaacacgcacgcatccatggagccgatcgtgatcgcggcgaaccggcagctgagcgtgctgcacccaatccacaggctcctcaagccgcacttccggaagacgctccacatcaacgccgtcgcacgccagatcatcgtcggctcgggtgaccagaggaaggacggcagcgtcttccgtggcatagacgaggtcacgtacttccccagcaagtacaacatggagatgtcctccaaggcgtacaaagcctggaacttcacggaccttgctcttcccaacgatctcatcaagagaggtctggcaaaaggagatccaaagaagccagagacggtggagctggcgataaaggactacccgtacgcggtggacgggctcgacatgtgggcggcgatcaagaagtgggtggctgactactgcgccatctactacgccgacgacggcgcggtggcgagggacagcgagctgcaggggtggtggagcgaggtcaggaacgtggggcacggcgacctggcggacgcgccgtggtggccggcgatggactgcgtcgccgacctcgtggagacctgcgccaccgtcgtctggctgagctcggcgtaccacgcgtccatcagcttcgggcagtacgactacctgggcttcgtcccgaacgggccctccatcaccacgcggccggtgccgggcccggacgccggggcggaggtcacggagtcggacttcctggcgagcgtcacgccggtcaccgaggcgctcggcttcatgtccatcgcctcggggccgatggggctcaagggcacggaggtgtacctggggcagcgcccggacacggagcagtggacgcgcgagcggagggcggccgaggcgctggcggagttccgggcgaggttggaggaggtcgcgggcaacatcgacaggcggaacgcggaccctgcgctgaagaaccggacggggcaggtggaggtgccctatacgctgctcaagccgacggcacagcccggactggtgctccgtggcatacccaacagcatcaccgtttgagcagcagagcgccgtcggcagctgtcagctgtgtacagtacagaataataaggtggtcgtgtttggcgctatctccacc

SEQ ID NO: 101757 - DNA, 3242 bp, Zea Mays
gcgacctgacctcgtgttacatgctactacggccgtgtatataacagcgatcaatctaccgtgaccacccccatcctctctaacccacggaagcaagacaaaagctcgtgctggacgacatctcccctgtcgatccacgaccatgatgcagcagctccgtcacagccagccgagcccgtgcctctgcggcctgcgggcggcacggcctatgctcgccctcggcgcagcagcatcccgttcgcggcccgccggaaaactgcaaccgagcgtctgcctcggcctcggccatgtagccccagccgcggcgagaggacagccccgtccccgtgccgttgccgactcggcgctgggagcatcgcctacgagcgtgcatgtcggaggcaagctgctgctgcagaacttcgccgccgacagccagcagcggctcaagctctccatccagcttgtcagcgccaccgtggccgatcccgacgggcgcggggtgaaggcggaggcgtcggtgctggacgccgtcgtgggcagcggggacagcgagctcgacgtggacctgatctgggacgaggcgctgggcgcgcccggcgcggtggtggtgaagaaccactccgacttccccgtgtacctgaggctgctgagcgtgccggccggcgtcggcggcgccgacgacgaggccgccgccgtccacttcgcctgcaacggatgggtgtaccccgtcgacaagcacccgtaccgcctcttcttcaccaacgacgcgtgtgtcaaggaagaaacgccgagcgccctgctcaagtaccgggaggacgagctcggcgcgctccggggagacggcgagacgacggagcgaccgttccagccgtgggaccgcgtgtacgactacgcgctgtacaacgacctggggaacccagacctgcgccaggacctggcgcgccccgtgctgggaggatcccaggagtacccgtaccctcggcgtaccaagaccggccgaccagccgccaaaacagatcctcggtcggagagcagagcgccgctggacgaagagatctacgtcccctgcgacgagcgcgtcggcttcgccagcatccccgcgccgacgcttccgccgctgggcgggcacttcaggtccctcgccgatgtctaccgcctcttcggcctcgacgacctcggccggctcccggaggccaaggcggtcatcaacagcggcgcgccgttccccgtcgtgcctcaggtcatttcagtgaacccgacacattggcggaaggacgaagagttcgcgcggcagatgatcgccggggcgaacccggtgtgcatcaagcgcgtcaccaagttcccgctggcgagcgagcttgaccgcggggtgttcggcgaccaggacagcaagataaccaaggaccatgtcgagaagaacatgggcggcatgacggtgcagcaggccgtagaggaggggaggctgtacgtcgtggaccaccacgactgggtgatgccatacctgaagcgcatcaacgagctccctgcgagcgaggagaaggcggaggtgtcgcagaggaaggtgtacgccgccagaacgctcctgttcctggacggcgaggactcgtcgatgctcagaccgctggcgatcgagctcagctcgccgcacccggagaaggagcagctcggcgcggtcagcacggtgtacactccaccggacagcggggacgacggcatcacggccgggaggttctcaacctgggaactggcaaaggtttacgcctctgccaacgacgcagccgagaacaacttcgtcactcactggctcaacacgcacgcatccatggagccgatcgtgatcgcggcgaaccggcagctgagcgtgctgcacccaatccacaggctcctcaagccgcacttccggaagacgctccacatcaacgccgtcgcacgccagatcatcgtcggctcgggtgaccagaggaaggacggcagcgtcttccgtggcatagacgaggtcacgtacttccccagcaagtacaacatggagatgtcctccaaggcgtacaaagcctggaacttcacggaccttgctcttcccaacgatctcatcaagagaggtctggcaaaaggagatccaaagaagccagagacggtggagctggcgataaaggactacccgtacgcggtggacgggctcgacatgtgggcggcgatcaagaagtgggtggctgactactgcgccatctactacgccgacgacggcgcggtggcgagggacagcgagctgcaggggtggtggagcgaggtcaggaacgtggggcacggcgacctggcggacgcgccgtggtggccggcgatggactgcgtcgccgacctcgtggagacctgcgccaccgtcgtctggctgagctcggcgtaccacgcgtccatcagcttcgggcagtacgactacctgggcttcgtcccgaacgggccctccatcaccacgcggccggtgccgggcccggacgccggggcggaggtcacggagtcggacttcctggcgagcgtcacgccggtcaccgaggcgctcggcttcatgtccatcgcctcggggccgatggggctcaagggcacggaggtgtacctggggcagcgcccggacacggagcagtggacgcgcgagcggagggcggccgaggcgctggcggagttccgggcgaggttggaggaggtcgcgggcaacatcgacaggcggaacgcggaccctgcgctgaagaaccggacggggcaggtggaggtgccctatacgctgctcaagccgacggcacagcccggactggtgctccgtggcatacccaacagcatcaccgtttgagcagcagagcgccgtcggcagctgtcagctgtgtacagtacagaataataaggtggtcgtgtttggcgctatctccaccacataaacgtgaaaatgtttttttttgaattatatggacatgcagggccgcagcccgtaagcctggccccagtttcggttttctgttttttttttttttgcctcgatctggtgatcagcaagccacgtcggtccgggtgatctcgctaccggagatagaatgtgtacacgaaacctaataggtttttactccattaggatacgaggttgagtcaattttcatacctatagatttgttaatgagcataaatttatacccgacgagttcatgagtataagtttattatgtgaaccgtgggtttttaaacccgaccaaacttagtgtatattgtcattttatttt

SEQ ID NO: 101758 - DNA, 3217 bp, Zea Mays
gcgacctgacctcgtgttacatgctactacggccgtgtatataacagcgatcaatctaccgtgaccacccccatcctctctaacccacggaagcaagacaaaagctcgtgctggacgacatctcccctgtcgatccacgaccatgatgcagcagctccgtcacagccagccgagcccgtgcctctgcggcctgcgggcggcacggcctatgctcgccctcggcgcagcagcatcccgttcgcggcccgccggaaaactgcaaccgagcgtctgcctcggcctcggccatgtagccccagccgcggcgagaggacagccccgtccccgtgccgttgccgactcggcgctgggagcatcgcctacgagcgtgcatgtcggaggcaagctgctgctgcagaacttcgccgccgacagccagcagcggctcaagctctccatccagcttgtcagcgccaccgtggccgatcccgacgggcgcggggtgaaggcggaggcgtcggtgctggacgccgtcgtgggcagcggggacagcgagctcgacgtggacctgatctgggacgaggcgctgggcgcgcccggcgcggtggtggtgaagaaccactccgacttccccgtgtacctgaggctgctgagcgtgccggccggcgtcggcggcgccgacgacgaggccgccgccgtccacttcgcctgcaacggatgggtgtaccccgtcgacaagcacccgcgtgtgtcaaggaagaaacgccgagcgccctgctcaagtaccgggaggacgagctcggcgcgctccggggagacggcgagacgacggagcgaccgttccagccgtgggaccgcgtgtacgactacgcgctgtacaacgacctggggaacccagacctgcgccaggacctggcgcgccccgtgctgggaggatcccaggagtacccgtaccctcggcgtaccaagaccggccgaccagccgccaaaacagatcctcggtcggagagcagagcgccgctggacgaagagatctacgtcccctgcgacgagcgcgtcggcttcgccagcatccccgcgccgacgcttccgccgctgggcgggcacttcaggtccctcgccgatgtctaccgcctcttcggcctcgacgacctcggccggctcccggaggccaaggcggtcatcaacagcggcgcgccgttccccgtcgtgcctcaggtcatttcagtgaacccgacacattggcggaaggacgaagagttcgcgcggcagatgatcgccggggcgaacccggtgtgcatcaagcgcgtcaccaagttcccgctggcgagcgagcttgaccgcggggtgttcggcgaccaggacagcaagataaccaaggaccatgtcgagaagaacatgggcggcatgacggtgcagcaggccgtagaggaggggaggctgtacgtcgtggaccaccacgactgggtgatgccatacctgaagcgcatcaacgagctccctgcgagcgaggagaaggcggaggtgtcgcagaggaaggtgtacgccgccagaacgctcctgttcctggacggcgaggactcgtcgatgctcagaccgctggcgatcgagctcagctcgccgcacccggagaaggagcagctcggcgcggtcagcacggtgtacactccaccggacagcggggacgacggcatcacggccgggaggttctcaacctgggaactggcaaaggtttacgcctctgccaacgacgcagccgagaacaacttcgtcactcactggctcaacacgcacgcatccatggagccgatcgtgatcgcggcgaaccggcagctgagcgtgctgcacccaatccacaggctcctcaagccgcacttccggaagacgctccacatcaacgccgtcgcacgccagatcatcgtcggctcgggtgaccagaggaaggacggcagcgtcttccgtggcatagacgaggtcacgtacttccccagcaagtacaacatggagatgtcctccaaggcgtacaaagcctggaacttcacggaccttgctcttcccaacgatctcatcaagagaggtctggcaaaaggagatccaaagaagccagagacggtggagctggcgataaaggactacccgtacgcggtggacgggctcgacatgtgggcggcgatcaagaagtgggtggctgactactgcgccatctactacgccgacgacggcgcggtggcgagggacagcgagctgcaggggtggtggagcgaggtcaggaacgtggggcacggcgacctggcggacgcgccgtggtggccggcgatggactgcgtcgccgacctcgtggagacctgcgccaccgtcgtctggctgagctcggcgtaccacgcgtccatcagcttcgggcagtacgactacctgggcttcgtcccgaacgggccctccatcaccacgcggccggtgccgggcccggacgccggggcggaggtcacggagtcggacttcctggcgagcgtcacgccggtcaccgaggcgctcggcttcatgtccatcgcctcggggccgatggggctcaagggcacggaggtgtacctggggcagcgcccggacacggagcagtggacgcgcgagcggagggcggccgaggcgctggcggagttccgggcgaggttggaggaggtcgcgggcaacatcgacaggcggaacgcggaccctgcgctgaagaaccggacggggcaggtggaggtgccctatacgctgctcaagccgacggcacagcccggactggtgctccgtggcatacccaacagcatcaccgtttgagcagcagagcgccgtcggcagctgtcagctgtgtacagtacagaataataaggtggtcgtgtttggcgctatctccaccacataaacgtgaaaatgtttttttttgaattatatggacatgcagggccgcagcccgtaagcctggccccagtttcggttttctgttttttttttttttgcctcgatctggtgatcagcaagccacgtcggtccgggtgatctcgctaccggagatagaatgtgtacacgaaacctaataggtttttactccattaggatacgaggttgagtcaattttcatacctatagatttgttaatgagcataaatttatacccgacgagttcatgagtataagtttattatgtgaaccgtgggtttttaaacccgaccaaacttagtgtatattgtcattttatttt

SEQ ID NO: 101759 - DNA, 2111 bp, Zea Mays
atggcagcccaatgtgatggtgaagtcgtcaaggctcctggaaatctggtcatcagtacttacgtgacatgtcctgatataacattgacagtaacccctgatttgaagcttggtaatgatggcatccttcttcatattgacctcgctaaaggaaatcgccgtcttggtggttctgctcttgcacaagcatttgatcaaattggaaatgattgcccagacattgatgatgttctgtacctgaagaaggtatttgaggccattcaggaattgctcagtcagcgtcttatttcagcaggccatgacataagcgatggtggccttattgtgagtgttcttgagatggcatttgctggtaattgtggttttaagcttgacatagacttggaagataggagccttcttgaaggactttttgcagaggagcttggccttgttattgaagtgcactcgaaatatctcaatatcgtgaagcaaaaacttgaagcaacaggcatttctgctaatgtaattggagaagttacttgctcaccagaaatagaagtttttgttgatggcaatctgcatctcaaggaaaaaacttcagatatcagggatctctgggaggaaacgagcttccagcttgaggagttacaacgactgaaatcttgtgtcaaacttgagaaagaaggattaaaaagcagaacatcaccatcgtggtctctgtcttttactcccaaattcacagatgagaaactgttgattgcttcctcgaaaccaaaggtcgctatcattcgtgaagaagggagcaatggggacagggaaatggctgctgcattccacgctgctggatttgaaccatgggatatcacaatgtcagacctcttggcggggaagtcttcgctaacagtgttccgtgggattgcgtttgttggtggtttcagctatgcagatgtgctggattcagcaaaaggttgggctgcatcaatcaggtttaacaaacccctcattcagcaatttcaggaattctaccataggccagacacgttcagccttggagtatgtaatggttgtcaacttatggctcttcttggctgggtgccaggatctgatgttggaggttctcttagtaaaggtggagatataacccagcccaggtttattcacaatgaatccggtcgtttcgagtgccggtttactagtgtgtccattggggtttctcctgctatcatgttcaaagggatggaaggttctaccttgggtgtttggagtgctcatggtgagggaagagctttcttcccagatgaaaatgttctagctactgtagtgaagtctaatctggcacctgtgcgatattgcgatgattttaacaacataaccgagacctaccccttcaatcctaatggttctccactaggtattggagccctttgctcccctgatgggagacaccttgctatgatgccacatccggagcgttgcttcatgatgtggcaattcccatggtatcccaaggaatggcaggttgagaagagtggccccagcccttggctgcgtatgttccagaatgcaagggaatggtgttcatagtgcagggcagtgcccagctgtagcgatgcggatggttgttttcatctgatgaccccttccttttgcggaataaagaggtgttcgacccgcagcgcgttatccaagctgataacaaacgtgtcaaaattgaagttttatacatagaaaactgccaggttttttgcgtagcctatgccaaagatgcgtaaactgtcagccccatcagggcttgtttggtaatcttggattagagtggattgaagtggtataagatatattaaagtgtaatataaactaatttccctttaaatctctaaaatacacctcaatccacttcaatccctctttatccaaacaaagcctcagtgaatttcccaatcaacgtagagaatgcttgctgcgttactcaaatctgatgcttatgcaatggtcgtttttgtgctgtctgtctgatgatgagtaagtatgagttcattcgcaaccagacaagtcattagtatgaattcagtcgcaaccagacaagtcattgtaatagcttgagataattcatctggtgatgtggcaaa

SEQ ID NO: 101760 - DNA, 999 bp, Zea Mays
atggcgagagctggaggcggcggtccggtccgcggcgcggcgctggtggtcgtgctgctaggcatcgtcgtgggcgcggcgagggctcagctgcggcagaactactacggcagctcgtgccccagcgcggagtccacggtgcgctccgtcatctcgcagcgcctccagcagagcttcgccgtggggcccggcacgctccgcctcttcttccacgactgcttcgtcaggggatgcgacgcgtcggtgatgctgatggcgccgaacggggacgacgagagccacagcggcgcggacgccacgctgtcgccggacgccgtggacgccatcaacaaggcgaaggcggccgtggaggcgctccccgggtgcgccggcaaggtctcgtgcgcggacatcctcgccatggccgcacgtgacgtcgtctccctgctgggcggtccgagctacggcgtggagctggggcggctggacggcaagacgttcaacagggccatcgtgaagcacgtcctcccgggccccggcttcaacctggaccagctcaacgccctcttcgcgcagaacggcctcacgcagacggacatgatcgcgctctcaggcgcgcacacgatcggggtgacgcactgcgacaagttcgtgcggcggatctacacgttcaagcagcggctggcgtggaacccgccgatgaacctggacttcctgcgctcgctgcggcgggtgtgccccctcagctacagccccacggcgttcgccatgctggacgtcaccacgcccagggtcttcgacaacgcctacttcaacaacctccgctacaacaagggcctgctcgcctccgaccaggtgctcttcaccgaccgccgctcccgacccaccgtcaacctcttcgccgccaacgccaccgccttctacgaggcattcgtcgccgccatggccaagctcggcaggatcggcctcaagaccggcgccgacggcgagatacgccgcgtctgcaccgccgtcaactaa

SEQ ID NO: 101761 - DNA, 1313 bp, Zea Mays
gcaaactctgcatgaaccaagtgagaaggaacaatgcttttggcagagaattttagttgcattatttcttcacctcgcttcccgcgagatcaccggctagttagaggaaaacgcaggtaaaaacgattacaacacgcgcacactccactattgaaaaacataacaataagaaaagagagagagaaaagaaactccctagaaagacgggtacccaaccataccatcatatggcagtatctggtggtatagagagctttacagctaggaaaatttttatctgtaatcagatggctcccgtcgggcagcaaaggtgttgtcgtcgacatcgcagcagaggggctctcacaccgtgtagttctgctggatggtgtcgatgtccaggcccttgagcttgaccaccgactccacgtggcccttgagggtgttgagctccctcagcctcgcgatctcagctcgtctcttggcctgctcggcgatctcggacagctcgcggtagctgctcttgtcgttgaacagcgtgttggaggaagcctccggcggctggagcccgtgcagcgtcctctgcgcggtggcccactgcgcctccctctcttcccgcccgtagtccttcttggtggtgaaggcggtctgtgcacacgagaacatgttagcaaatgctcctacaatggcccgctctccggcgactactgggacagaaataatcctaccttgttctcgaggaggttgtcccatgccctgccgctgagcacgaagcggatgaagaacttgagcaggtccagggggaagtagaagacgatgctgtagagccagaccacacctgcccagccccagccgatacccttgatcctggcgaagccccagttggcgtagacagcgaggaaggtggcaacctgatgataagcaggcacagcttaattaggcatgcgttccacgaccattcagctcacaggcatcatgcatgcagcccggtacttacaagttgagcgagcaggaacgcggtgaccaggagcagaccagggcgctccacgaaggaccagctacgggaacgggtgacgaagatcagagcctggctcacgatactgacttggaggtacagggcggacatcatctcatgctcgctgtccctgatcgacctcacaccgaatttgtcctgcaagaagtcggtcttgtgcatagcccagaagaaaatgacagtcatcagagcaaggtagcttccaagcacgatgcccgtagcaaagatctccttcagcttccaactgtcgggcaacggagatggcttaactctgtccttagagatggtcatgatagtacct

SEQ ID NO: 101762 - DNA, 1938 bp, Zea Mays
cactatacggattgtgatggaaactgcatagatctgttgatccacaagatgaagaaaggaaaagagtcagaagatagatcatgcatgctaccataaaaaaaatgggaggcaggagaatattatatgcttagaaaagaactaacggtgtagttcttcatcctctggaagatgcatctgctggtgaggacggcgctgataatgacgctaagacctggctcagtaaggacaatatcggaagcactcctcgcagcgtcagtagcatccgcaacagcaataccgatgtcagccttcttaagagccggggcatcgttgacaccatctccagtcataccaacgatgtgcttcttctcctgcagtctcttcacgatctcgtacttgtgttctgtgcaacaaacaatcccataagcaaaaggttctttatgtagcgacaagagtacttataggtgtttgactcaccagggaagactccggcaaaaccatcggccttctcaatgagctcatctacaggaagcgcttcaagcgtagcatccttgttttggccgagcagcgcagaggatggatacatgttggtacccatgccaagcctccttccagtctccttaccaatagcaagctgatcacctgaagtaaaaaaaaaagtccatgtttatcaattgcacaaatactggacctataaactgtatggtcagttgttagtaacaggctacgtacccgtgatcatcttgacgttaacaccaagaacaagagccttgcgaattgtctcagcgctgtcatgcctaggcggatcaaacaggggcaacagaccaacgaactgccatggtccaccaggggactccttgtttttctcaggtacttcctgtggtaagatcacatttggaatgagaaaaatggctcaccgatcactaaaccgcaacaacgggaaaaagaacatcaaccacgatacctgtctggcaacagcaagcgaacgaagaccacgctcggcatacttgtcgataatagagtgcaccttccgcctcagatcctccttgcagtggcacaggtcaagaatctgtttgggagcacccttgctgacacggtgccagttgccatcggcatcaatgtacgtcagagcagtcctcttatcaacagggttgaagggcaagaagtggatttcccttataccagccctggcctccttaggatcagcaagcatgccaaccatggcggcatcgatagcgtcctggttctcagtccttgaagcccttgcagccaacagcaacacatggtctttgtcgacgcctttgcagaacacctcgacgaggttcttatcgacgctaagcttgttgagggtgagtgtgccggttttgtcactgcaaagcacgtccataccagccatctcctcaatggcagtcatcctcttagtgatggcaccctgctgtgacagcttgtgcgaaccaatggccatggtaactgaaagcacggtaggcatggcgattgggataccaccgatcaagaggaccaacaggttctcgattccgctgcggtacttccggtgctggattgggaacatgacgatgatctcgacgaggatgccgaccccaatggagcagatgcagaagttaccgattgctgtcagcacctgctggaagtgtccgacctggttggtgctgtccacaagatgagcggccttgccgaagaaggtgtgcactccggtggcaatgaccacggcctcgatctcaccctgcttacaagtggaacccgagaagacttcgtcccctgggcccttggtaaccgggagggattctccagtaagcgcagactggtcaaccttgagtgcatcaccctcgaggagacgagcgtcggcagggacgatatcgccaagcttgatgctgatgatgtcaccaggaaccaagattgcagcctcttgctcgccccatcggccatctctcagaacctaca

SEQ ID NO: 101763 - DNA, 113 bp, Zea Mays
ataaattagcaggcgataaatattcgaaaacggaggtggtgattagttggtttgcacttatacaaaaaaaacaaacaacctcatcccttgccaaccgaagcgcacagcacagc

SEQ ID NO: 101764 - DNA, 1395 bp, Zea Mays
atgagcctgacagcattttgtagtgccggaacgtatcatggtcacgttgaaagcggtgcgcggccgtgtgcagtgcagggcagagaagcaaaggtcacgggattgggggtggtggcatcgtcccactcccacgacacgcggtgcggccggggccaggatgtgccgtccgccaccgaggcaggcgagagtgacgactccagcctctggctcttttcgttgcgtgtcagcttggccaacgcccgcatgcggtcaagctccgccgatacgatgaggcggctggaactggaactcgctcgtccggctggttccacacgcatgcgatgggggtggggagcagcagttggcattttcaagtctcaggcgccggcaggcaccttgggagctgttctgtttgtgcaggggattgataggcttctgctaacagtacctgttgtgtgtcagcctgttagattacccttccgttgtcttgccatgtgtgagcacggtttcgttggtgatgcaagcttctcgcggtcgcttcctaatcacccaaagctccccaaggggaagctggtggctgttgtggtggtggacggatggggcgaggccaacactgaccagtacaactgcatccatgtcgctcagactcatgtcatggactcactaaagaatatgtatatgctatcctttacacctgcccacctgcttgggttgcgtttcgttggtgatgcaagcttggtgttctcgcggtcgcttcctaaccacccaaagctccccaaggggaagctggtggctgttgtggtggtggacggatggggcgaggccaacactgacctgtacaactgcatccatgtcgctcagtctcatgtcatggactcgctaaagaatattgaggttcttgctctgattatctctcccacgagagaattgtcctcgcagatattcaatgtggcccatcccttcttcgcgaccctgaatggtgtgtcgtccatgctcctggtgggtgggctggatatcaaagcagagctcaagaaggtagaggaagagggcgcaaacatattggtgggcactcctgggaagctgtttgatataatgcacactgatgctctagagtacaagaatcttgagattttgatcctatatgaggattataggttcttggatatgggattccagaaacatattaacttcatactttcaatgttgccaaagctgaggaggactgggcttttctcagctacccagacgaaagctgttgcggacctatccaaagcagggttgagaaatcctataagggttgaggttaagacagaggcaaagtccacaagcaaagatgatggacagcaagagcttggtccatccataacaccattagggcttcggttggagaatagtgggaagaaaataatggtgtaa

SEQ ID NO: 101765 - DNA, 540 bp, Zea Mays
atcgccatgccgaagctgcagaggttcagaggagtgaggcagaggcactggggctcctgggtctccgagatccgacacccactcctgaagacgaggatctggctgggcacgtacgagacggcggaggacgcggcgcgggcgtacgacgaggcggcgcgcctgatcagcggccccgcggcgcgcaccaacttcccccttaccggcggcggcggcgggggcacgctctccccgacgctgcgcgcgaagctggagaaatgctgctgcacggcgctggcgcaggaggcgcagcacggcgcggacgtgccgcggacgggtgcgggtcggggcgacgacggcagtagccgccgcgatcgccggcgggacggcgacgaggaggatgaggaggccggcgtgaaagtcgagcccgacgccgacgccgacggcgaggagtacatcgaggagatgatcagggagctcacctactacggccctgtcgagatacagcaccacccgtcggccgccggcggcggcggcgcctgctcgagctcggcgatcgggtga

SEQ ID NO: 101766 - DNA, 76 bp, Zea Mays
gaacagaacagtcaaggcgggggcagttaaggggacgtcacgaacgaacctccaggagcgatccgtttcgccgtat

SEQ ID NO: 101767 - DNA, 784 bp, Zea Mays
cctaattcctaaagcagcatcggctactagcctactactactgtctcttgctcacacagctcgtctgtgcagcacatagctagtgaacgaaaacgaccatggcgtcccaggccatcgagagccaccgtgcaggcgctgaggtcgtcaatggaggagacgccatctgcaggaagaagtcaatcgagctgctggaggagctcggcctccccaagggcttcttgcccctcgaggacatccaggagttcgggtacaaccgcgagacaggattcatgtggctagtgcaggggaagaagaaggtggaggcgtggagcacacattcaagaagatcaagcagaccgtgtcgtacgccgctgaagtgacggcattcgcggagaagggcaagctgaggaagatcaccggcgtgaagacaaaggagctgatgatctggcttagcgtcgtcgaggtctacgtccccgaggcctcgccggaaaaggttaccttcaagactggcactggcctatccgacaccttcgatgcatctgcttttgcgctgggagagtaattaccagccacaaaaatggttggcttcaaaagacattcataatctatcttttgtatttgtaaacttccatatatcttgtgatgagcttgtgcctcggagtattcatactcatgggccatgtccattacaaacatttctatgatttttttgtttattggatataattttaaaaatatctcacttcaaaatattaatattaaaacaaatgtcctcgcaggccgcagccatatgtgagttcttctt

SEQ ID NO: 101768 - DNA, 411 bp, Zea Mays
atggcgtcccaggccatcgagagccaccgtgcaggcgctgaggtcgtcaatggaggagacgccatctgcaggaagaagtcaatcgagctgctggaggagctcggcctccccaagggcttcttgcccctcgaggacatccaggagttcggtgcaggggaagaagaaggtggaggcgtggagcacacattcaagaagatcaagcagaccgtgtcgtacgccgctgaagtgacggcattcgcggagaagggcaagctgaggaagatcaccggcgtgaagacaaaggagctgatgatctggcttagcgtcgtcgaggtctacgtccccgaggcctcgccggaaaaggttaccttcaagactggcactggcctatccgacaccttcgatgcatctgcttttgcgctgggagagtaa

SEQ ID NO: 101769 - DNA, 987 bp, Zea Mays
gtctccatcacgcgcctgcccacctctccctcgccgtgtgccgacctcgctccccacaaccatccgcaaggagggcatagccatggtgcgggcgagccttctcgccgtgcgcgaggcgctagcggtcggcgctgctgcggccacgcggcacggcgccgacgccgccccgctcggtcccgtggcgatcttgctcctcgcggtggccgcgacggcagccgtggcggccatcgcggcgttcgggtgcgcgcaaggcgccaagaagccgcgccggcagaacaacaacaacaacgcctactactacggccagggctacccgccgcctcccgcgggcgcgtacggctaccctgcgcaggccgcgtacggctacccggcgcagggcgccggagggaggcccggccgcagcgggcttgggtcgggagccgcggggctcgccgtcggcgcggtcggcgggctggccgccggcgccatcatcggctcggcgctcgactccggcggcggcggcggctgcggtggcggtggcggctgcggcggcggcggatgcggtggcggtggctgcggcggcggatgcggtggttgacctctctgatttacctctgtcatgtgatacgcgtggcaatctgcatggcactatgacttgtgttcacgggttcttttattttgtgaaacaaaaagaaagcacgatatgattccatgggatttcgtgctgtcggatcaaatgttcttgttaaaccataatcgatgtctgatcatctatatataactgttgtcgcgtaggagtacgtatgtacatacccacgttatcctgtttattatgatattaatgcacataatcctcatcgcgtccttattaatttattatcgtgtatagtggtctaatatggataggaagttctattttattgtttctatgcgtattattttatattgtatctttactcctacaaaacatcaacttcgtagtactacgtcatttttcaaaaaaaaata

SEQ ID NO: 101770 - DNA, 2258 bp, Zea Mays
cccaggccccaactcgcaagtcgcctgccagcccggttagcaaggaagcacgcaggatatttggtgcgcgcgggcggtgtgagcggtgagcctgcaaaagccagcagcagcgagcgtcggtaggggagcccgggcagcggagcacacttgccctctccacctggaaccccgagcaggctccgccggccacggccggtgccgcgacgactcggcacgcgctagctagctagctgttcctcttcccgagggccccaccactaccaccatcctgccgcccggcctcgtgtggcggatgatgattcctagggagccgtggcggccggagcacccttccaactcctgatcccgagctgacccccgccatcgcagcggcggctctgccgcagcgtctgtgtccaggtgaggttggtgccccacggatttggagacttatgatgatggagacccctcaaatcgagatgggcggtttcaaggtcaacagcccgcaagtgcccaacggcgtgttgcggcccaccgtgtcttcctcctggaactcgcgagggacggtcgagagggcgctcaagagcatcaggatcgtcattttcacttccaagctcaacttgctcatgccgttcgggcctgcgtccatcattctccacttcacgactaggaggcatggattgattttccttttcagcatgctaggaataacacctttagctgagcgtttaggatatgcaactgagcagcttgcaatatacactggtccaacagttggtggccttctgaatgctacatttggaaatgcaaccgaaatgatcattgcagtatatgctttgaaaaatggaatgatccgagtagtgcagcagtcactattgggttccatattgtcaaatatgctgttggttatgggttgtgctttctttgctggtggtgttgttcaccgcaacaaagaccaaatcttcagtaaggcaactgcagttgtcaactcaggtttactgttgatggctgtcatgggattgatgtttcctgccgttcttcatttcactcattcagaagtgcgtcaaggggcatcagaggttgcactttcaaggttcagtagttgtattatgcttgtggcgtatgccagctatctctatttccaattaagtggacggagcaacatttacagtccaataggcagtgaagaggcgcctattgaggatattgcagaggaagatgaagaagctgagattggcatgtgggaggcagtaacatggcttgcggttttaacactctgggtgtcttttctttctgagtacctagttaacgccattgagggagcatctgattcattgaacctaccggtggcttttatcagtgttattttgcttcctattgtgggcaatgcagctgaacatgcaagtgcaataatgtttgccatgaaagataagcttgacataacactgggtgttgcaattggttcatcaacacagatatcaatgtttgtgattccattttgtgttgttattggttggatgatgggacaaaggatggacttgaattttcagctatttgagacagcaactctcttcataacagtgcttgtggtagcatttatgctacaggatgggactgcgaactacttgaaaggacttatgctgatcctatgttatctaatagttgctgccagtttctttgttcatgttgatccacaatcaagtgatggttgatgccgtagatgctgtaagtaatgcgtcaaataccttttgaaacttgttaatcctttcttgtggaggtgctactccatagcaacgttccacctgtttcaagcagcatgctggcaaaaaaaaaaggcgggaagatcacacattgtcggttccttcatgaaccgcaaaaggaattcttgtattgtgtggataatgaggtgtactaggggtagtctcaatgtatacagaaacaagaagtgccagcatgttacattcgattaattggatgggtgagtccctctttttttttctggttccctttgagatttgggtatatgatttgatgctgactgaggctaagatctctcatccttttttgtggttgatgatgtccgcgcactcatggttctacatctacgtttctttttcttccctagtgattatgtgtacatttgtggttgaccatgtccgcacagtcacggatggtcataccccatgtgaggatcttaatactctaacgccgcgcaaaaattctagtattccttaaaccaaacacatcttgatggcaaatcaatttgtatggcttgtcct

SEQ ID NO: 101771 - DNA, 2230 bp, Zea Mays
cccaggccccaactcgcaagtcgcctgccagcccggttagcaaggaagcacgcaggatatttggtgcgcgcgggcggtgtgagcggtgagcctgcaaaagccagcagcagcgagcgtcggtaggggagcccgggcagcggagcacacttgccctctccacctggaaccccgagcaggctccgccggccacggccggtgccgcgacgactcggcacgcgctagctagctagctgttcctcttcccgagggccccaccactaccaccatcctgccgcccggcctcgtgtggcggatgatgattcctagggagccgtggcggccggagcacccttccaactcctgatcccgagctgacccccgccatcgcagcggcggctctgccgcagcgtctgtgtccagacttatgatgatggagacccctcaaatcgagatgggcggtttcaaggtcaacagcccgcaagtgcccaacggcgtgttgcggcccaccgtgtcttcctcctggaactcgcgagggacggtcgagagggcgctcaagagcatcaggatcgtcattttcacttccaagctcaacttgctcatgccgttcgggcctgcgtccatcattctccacttcacgactaggaggcatggattgattttccttttcagcatgctaggaataacacctttagctgagcgtttaggatatgcaactgagcagcttgcaatatacactggtccaacagttggtggccttctgaatgctacatttggaaatgcaaccgaaatgatcattgcagtatatgctttgaaaaatggaatgatccgagtagtgcagcagtcactattgggttccatattgtcaaatatgctgttggttatgggttgtgctttctttgctggtggtgttgttcaccgcaacaaagaccaaatcttcagtaaggcaactgcagttgtcaactcaggtttactgttgatggctgtcatgggattgatgtttcctgccgttcttcatttcactcattcagaagtgcgtcaaggggcatcagaggttgcactttcaaggttcagtagttgtattatgcttgtggcgtatgccagctatctctatttccaattaagtggacggagcaacatttacagtccaataggcagtgaagaggcgcctattgaggatattgcagaggaagatgaagaagctgagattggcatgtgggaggcagtaacatggcttgcggttttaacactctgggtgtcttttctttctgagtacctagttaacgccattgagggagcatctgattcattgaacctaccggtggcttttatcagtgttattttgcttcctattgtgggcaatgcagctgaacatgcaagtgcaataatgtttgccatgaaagataagcttgacataacactgggtgttgcaattggttcatcaacacagatatcaatgtttgtgattccattttgtgttgttattggttggatgatgggacaaaggatggacttgaattttcagctatttgagacagcaactctcttcataacagtgcttgtggtagcatttatgctacaggatgggactgcgaactacttgaaaggacttatgctgatcctatgttatctaatagttgctgccagtttctttgttcatgttgatccacaatcaagtgatggttgatgccgtagatgctgtaagtaatgcgtcaaataccttttgaaacttgttaatcctttcttgtggaggtgctactccatagcaacgttccacctgtttcaagcagcatgctggcaaaaaaaaaaggcgggaagatcacacattgtcggttccttcatgaaccgcaaaaggaattcttgtattgtgtggataatgaggtgtactaggggtagtctcaatgtatacagaaacaagaagtgccagcatgttacattcgattaattggatgggtgagtccctctttttttttctggttccctttgagatttgggtatatgatttgatgctgactgaggctaagatctctcatccttttttgtggttgatgatgtccgcgcactcatggttctacatctacgtttctttttcttccctagtgattatgtgtacatttgtggttgaccatgtccgcacagtcacggatggtcataccccatgtgaggatcttaatactctaacgccgcgcaaaaattctagtattccttaaaccaaacacatcttgatggcaaatcaatttgtatggcttgtcct

SEQ ID NO: 101772 - DNA, 107 bp, Zea Mays
ctgagtcactgttgcatcattttttgttacttaatagatcttggaacgcgatgtttattgccctgtataaaaacgtctagacaactttaatttgtttgatacagcga

SEQ ID NO: 101773 - DNA, 244 bp, Zea Mays
tgtcttgtattttttcttttatcaatgggtttaagattcactagctttctcattctactctttcacaaaggagtgcgacaagaactcaatgaatcttatgctattcattaaatagatgatttctttttttatttattagagtagagtatcggcaaggaatctcgattattaattcgttttttaagtattattaagtaagccatccataatgcatagactacccctcccatttcctaattttgaa

SEQ ID NO: 101774 - DNA, 2696 bp, Zea Mays
aagattgagatactaggccttggagggaatttccgtggagaatcaggatcggccccattgccgtctctagcaccactagtagcgaagccactggttgttggtaggtgcacgcaccccaccccctcctgccgtcctcgatctcgtctcctcctccctacccaatccctcgcggtgggcgagggtggaagcgagtgacgatggcggcgctggaggcggcgagggagtgggcgggctccgtcataccgccggagctcgccgccgccgcggggggagacccactcgccgcgctggcggccaccgccgcggccctcgtcgcggggctgcttattatcgctgtctggttccgatccggaggcgggacgccgtccaagccggtcgccacgccggtacggccaccgccggtcaaggtggacgccgacgccgacgttgatgacggccggaagcgcgtcaccatcttcttcggcacacagactggcaccgccgaggggttcgcaaagtccatggcggaggaggcgagggcgcggtacgagaaggccgtgttcaaagtggtggatctggatgactatgctcaggaggacgaggaatacgaggagaagctgaagaaggaaactgtggtgctgtttttcctagcaacatatggggatggggagccaactgataatgcagcacgattctacaaatggtttactgagggaaaagagaaggaagtttggttgaaggatcttaaatatggtatttttggccttggaaacaggcaatacgaacattttaataaggttgcaaaggtggtagatgagctagtagaggagcagggtgggaaacgtcttgttcctgttggccttggagacgatgatcagtgcattgaggatgatttcactgcatggaaagaactagtgtggccagaattagatcaattgctccgcgacgaggatgacacaactggtgcatcgactccatatactgctgctattcctgaatacagagttgttttcattgacaaatctgacctgtcattccaagatagatcatggacactagccaacggtactggtgtgattgatattcaacacccttgcaggtctaatgttgctgttcggaaggagctgcacaaaccagcttcagatcgctcttgtatccatctcgagtttgacatttctggcactggtcttgtgtatgaaaccggagaccatgttggtgtatatgcagaaaattctgttcagactgtggaggaggttgaaaggctacttgacctttctccagacacattcttctccatccatgcagatgcagaagatggatctcctcgtaaaggaggaggttccttggccccacctttcccatctccatgtaccttgcggactgcgcttctacgatatgctgatctactcaatccaccgaagaaggctgctttgcttgctttagcttctcacgcatctgatccagctgaagctgagcgacttagattcttggcttctccttctggaaaggatgagtattctcaatggataactgctagtcagaggagccttcttgaagttatggccgcattcccttcagctaagccaccactgggagtgttttttgcagcaatagctcctcgtctgcaaccacgatactactcaatttcatcatctccaaacaggatggctccctccagaattcatgtaacatgtgcgttagtttatgggccttcaccaacaggaaggatccaccaaggagtttgttcaacatggatgaagaatacaattcctctggaatatagcgaagaatgcagctgggctcccatctttgtgaggcagtcaaatttcaagttacctgctgatccgtccactcctattatcatgattggtcctgggacagggctggctccttttagaggcttcttgcaggaaaggttagcattgaaacaatctggggcagaattgggcacttcaatccttttctttggatgcaggaaccgtaatatggactacatatatgaagatgagttgcaaactttccttgaggagggggcgctttctgagctaattgttgcattctctcgggaagggccaacgaaagaatatgtgcagcataagatggtggaaaaggccacagatatttggaacatcatctcaaatggtggttacttatatgtttgcggtgatgccaagggaatggctagagatgtacacaaaatgcttcatacaatagtccaagagcagggatctttggataactccaaaaccgagagctatgtaaagagcctgcagatggaaggaaggtacctccgtgatgtatggtgacacatcacctcaaataagccatagctctagcgtgtggaagtaaagctggctttgcgtgtatgacatgtctaatgccaacccaatcgtcagctttggaatgaagcgtgccattgatgatatactgaaatgagttgatcagtgcaattctttgacatctaactatttattattatatgagatgggaggaactgatggagaataaatgctgctgtagatttgtagaagttcaaaaaaattgggtacccctgacaagtttgtagccaagggggtacatcatacagtttgagatgaggacactatgtatactgtttgagacgaggacattatgtatactactctagaaggctaccgaaaccaaattttgcatctgtttattaaaagcttgtacttttatcatggtatccgtcgttg

SEQ ID NO: 101775 - DNA, 2700 bp, Zea Mays
aagattgagatactaggccttggagggaatttccgtggagaatcaggatcggccccattgccgtctctagcaccactagtagcgaagccactggttgttggtaggtgcacgcaccccaccccctcctgccgtcctcgatctcgtctcctcctccctacccaatccctcgcggtgggcgagggtggaagcgagtgacgatggcggcgctggaggcggcgagggagtgggcgggctccgtcataccgccggagctcgccgccgccgcggggggagacccactcgccgcgctggcggccaccgccgcggccctcgtcgcggggctgcttattatcgctgtctggttccgatccggaggcgggacgccgtccaagccggtcgccacgccggtacggccaccgccggtcaaggtggacgccgacgccgacgttgatgacggccggaagcgcgtcaccatcttcttcggcacacagactggcaccgccgaggggttcgcaaagtccatggcggaggaggcgagggcgcggtacgagaaggccgtgttcaaagtggtggatctggatgactatgctcaggaggacgaggaatacgaggagaagctgaagaaggaaactgtggtgctgtttttcctagcaacatatggggatggggagccaactgataatgcagcacgattctacaaatggtttactgagggaaaagagaaggaagtttggttgaaggatcttaaatatggtatttttggccttggaaacaggcaatacgaacattttaataaggttgcaaaggtggtagatgagctagtagaggagcagggtgggaaacgtcttgttcctgttggccttggagacgatgatcagtgcattgaggatgatttcactgcatggaaagaactagtgtggccagaattagatcaattgctccgcgacgaggatgacacaactggtgcatcgactccatatactgctgctattcctgaatacagagttgttttcattgacaaatctgacctgtcattccaagatagatcatggacactagccaacggtactggtgtgattgatattcaacacccttgcaggtctaatgttgctgttcggaaggagctgcacaaaccagcttcagatcgctcttgtatccatctcgagtttgacatttctggcactggtcttgtgtatgaaaccggagaccatgttggtgtatatgcagaaaattctgttcagactgtggaggaggttgaaaggctacttgacctttctccagacacattcttctccatccatgcagatgcagaagatggatctcctcgtaaaggaggaggttccttggccccacctttcccatctccatgtaccttgcggactgcgcttctacgatatgctgatctactcaatccaccgaagaaggctgctttgcttgctttagcttctcacgcatctgatccagctgaagctgagcgacttagattcttggcttctccttctggaaaggatgagtattctcaatggataactgctagtcagaggagccttcttgaagttatggccgcattcccttcagctaagccaccactgggagtgttttttgcagcaatagctcctcgtctgcaaccacgatactactcaatttcatcatctccaaagatggctccctccagaattcatgtaacatgtgcgttagtttatgggccttcaccaacaggaaggatccaccaaggagtttgttcaacatggatgaagaatacaattcctctggaatatagcgaagaatgcagctgggctcccatctttgtgaggcagtcaaatttcaagttacctgctgatccgtccactcctattatcatgattggtcctgggacagggctggctccttttagaggcttcttgcaggaaaggttagcattgaaacaatctggggcagaattgggcacttcaatccttttctttggatgcaggaaccgtaatatggactacatatatgaagatgagttgcaaactttccttgaggagggggcgctttctgagctaattgttgcattctctcgggaagggccaacgaaagaatatgtgcagcataagatggtggaaaaggccacagatatttggaacatcatctcaaatggtggttacttatatgtttgcggtgatgccaagggaatggctagagatgtacacaaaatgcttcatacaatagtccaagagcagggatctttggataactccaaaaccgagagctatgtaaagagcctgcagatggaaggaaggtacctccgtgatgtatggtgacacatcacctcaaataagccatagctctagcgtgtggaagtaaagctggctttgcgtgtatgacatgtctaatgccaacccaatcgtcagctttggaatgaagcgtgccattgatgatatactgaaatgagttgatcagtgcaattctttgacatctaactatttattattatatgagatgggaggaactgatggagaataaatgctgctgtagatttgtagaagttcaaaaaaattgggtacccctgacaagtttgtagccaagggggtacatcatacagtttgagatgaggacactatgtatactgtttgagacgaggacattatgtatactactctagaaggctaccgaaaccaaattttgcatctgtttattaaaagcttgtacttttatcatggtatccgtcgttggcaatct

SEQ ID NO: 101776 - DNA, 2467 bp, Zea Mays
ctgctcgccacagcgcggaatctcacctctcttccccgacccgagagagctcggtcggacaaacccaccacccacaccggccggccgggagagccacgaagttactgcgcgcgtacgtcgccggtttcctttctcaccgcacgtcgtcgtcatggacacctcgcaccactatcatccatggctcaacttctccctcgcccaccactgtgacctcgaggaggaggagaggggcgcggccgccgagctggccgcgatagccggcgccgcgccgccgccgaagctggaggacttcctcggcggaggcgtcgccaccggtggtccggaggcggtggcgcccgcggagatgtacgactcggacctcaagttcatagccgccgccgggttccttggcggctcggcggcggcggcggcgacgtcgccgctgtcctccctcgaccaggccggttccaagctggccttgcctgcggcggcggctgctccggcgccggagcagaggaaggccgtcgactcctttgggcagcgcacgtccatctaccgcggcgtcacacggcaccggtggactggcaggtacgaggcacatctgtgggacaacagctgccgacgcgaagggcagagccgcaagggccgccaagtatatttgggtggctatgataaggaggagaaggctgccagggcgtatgatcttgcagctttgaagtactggggttctagcaccaccaccaactttccggttgctgagtatgagaaggaggtcgaggagatgaagaacatgacgcgacaagagtttgttgcttcccttcgaaggaagagcagtggattctctcggggtgcttccatctaccgaggtgtaaccagacatcaccagcatggacggtggcaggcgaggatcggaagggtggccggtaacaaggacctctaccttgggacgttcagcaccgaggaggaagctgcagaggcctacgacatagcggccatcaagttcagaggcctgaacgccgtcacaaacttcgagatcagccggtacaacgtggagaccataatgagcagcaaccttccagtcgcgagcatgtcgtcgtcggcggcggcggcggcgggtggccggagcagcaaggcgctggagtcccctccgtccggctcgcttgacggcggcggcggcatgccagtcgtcgaagccagcacggcaccgccgctgttcattccggtgaagtacgaccagcagcagcaggagtacctgtcgatgctcgcgttgcagcagcaccaccagcagcaacaagcagggaacctgttgcaggggccgctagtagggttcggcggcctctactcctccggggtgaacctggatttcgccaactcccacggcacggcggctccgtcgtcgatggcccaccactgctacgccaatggcaccgcctccgcctcgcatgagcaccagcaccagatgcagcagggcggcgagaacgagacgcagccgcagccgcagcagagctccagcagctgctcctccctgccattcgccaccccggtcgctttcaatgggtcctatgaaagctccatcacggcggcaggcccctttggatactcctacccaaatgtggcagcctttcagacgccgatctatggaatggaatgattcgggccgcccggtcgtggctgctggtcggcctccgctcgccgctggcgtctcgcatgtgcgaaaagggtggggagaagccatgagaacacgagactgacatgggcgctctcgcacaaaagacataaagcggggggactgaaagatcagaggtaccagtagacagtagtagtatgatggaagagacagtaagcagcgagtagtgtgctgcaggatacactgaccatcgatctgctaacaacaaaatgatcgttgcagctagctatagcatatttgcctttgcccttttgtagctttggtctggtctctctctctctctctctcttttttcagctttgttgctccccagcgtcctgcactgcatgccagctgctttgaagctttctctttctactgacatggttctgcaagtgccatcatagctttagtcagccctgtacaatggatgcaggaacgtcgtctttgaattggatctctgtagctcatctctccccctagctcccccactttgttttcttttttgtgctttcctttctgctgcctctgctagcgttatgtgtactgaacaagttcatcaaacagatatagcacccttgcaactatgaatcaatgtcggtcttatttaatgaaactctcccaaatttaccgccttaacgatacgttcatactacaaccattttgcctccctggaaggtacggtttcccgttctgctgttgatttctcgtttgcagcattctgtatgcctttcctttgcccagcgagaataatattgtatgcgtttgaataccaatgattttgcaaaatctctactattttatcaatagtgaatgtgtcac

SEQ ID NO: 101777 - DNA, 1445 bp, Zea Mays
gtcggtcgctcgttcgcctgttccccttgttcgtctgtctgtctttgacaccacagcgcccgcctccgtttgcactgttgcctgccgccctccttcctgctcctgctcggctcgctacggctacgggcactggcatcgacagtgacatccccgctcgcgccgtcctcggtcctccctttcttctgcctctcgctcgcgcgtgcagttgagagcggctcggcagcgcagcgtgcgcggacacggcagcgccagttactctctctctctctctctctctctctctctctctctctctcctcgctgctcggcgtccaattcaatgcgctcctgcgcaacggggcagagcagcgacctccttccttctccaccattgggttgagctccgccactcaattcaatgcctgtccgctcttgaagaaacgcctcctcctctcttctttaaccgccccgtgtcatcactcttactcgtacgtgctcgcgcacgccggtttcaatacgtccgctggcctctgcgtgcgtcgtctcgtcacgcaggcagcaaggcgtggagaggagaagagggaggggattgaattgattgatggggttgctccgctgagctagctcctccggccgtccttcccgtcttctacctctaggtgggtattgccattgctcggtggatcgcagtgggagatgaattacctccggagccggagcctgaagcggctcctgtccctcggccgccggagcaacgccgatgagtgcgccgaggagtgcgtcgacgtcgacccgccgccgaacaagcccacctggaggtgcttctcgtacgaggagctcaaccaggccaccaatggcttccaccaagacaacatggtgggcaagggcgggtacggagaggtctaccgcggggtgctggacgacggccgcgccgtcgccgtgaagcgcctggcgccgacggccgcggcggacgagaagaaggagaaggacttccttacggagctgggcacggtgggccacgtccgccaccccaacgtgtccgcgctcctgggatgctgcgtcgaccgcggccttcacctcgtcttccacttctccacccgcggctccgtctccgccaacctccacggtggtggagctactggagtccggcgagatttctcaagagcagtggcagatgcccgaggaggaggagcaagacgagctgtgggacttcgacgatctcgacgacttcgacgaggacgactacgacgacgagtccgattccccctcgatctcctcgtcggcatgcagcatccaccccgatgattagccccaaaatacttgcgcgtgtcagtagattattatcgttgttattattcaacctgctgatacggtccttgattgtatcggtgtgtacatacaccatccatccctagtagagaatagtaatatgaaaatccgggagaaaatcgagagagacagagaga

SEQ ID NO: 101778 - DNA, 2697 bp, Zea Mays
ccttgttcgtctgtctgtctttgacaccacagcgcccgcctccgtttgcactgttgcctgccgccctccttcctgctcctgctcggctcgctacggctacgggcactggcatcgacagtgacatccccgctcgcgccgtcctcggtcctccctttcttctgcctctcgctcgcgcgtgcagttgagagcggctcggcagcgcagcgtgcgcggacacggcagcgccagttactctctctctctctctctctctctctctctctctctctctcctcgctgctcggcgtccaattcaatgcgctcctgcgcaacggggcagagcagcgacctccttccttctccaccattgggttgagctccgccactcaattcaatgcctgtccgctcttgaagaaacgcctcctcctctcttctttaaccgccccgtgtcatcactcttactcgtacgtgctcgcgcacgccggtttcaatacgtccgctggcctctgcgtgcgtcgtctcgtcacgcaggcagcaaggcgtggagaggagaagagggaggggattgaattgattgatggggttgctccgctgagctagctcctccggccgtccttcccgtcttctacctctaggtgggtattgccattgctcggtggatcgcagtgggagatgaattacctccggagccggagcctgaagcggctcctgtccctcggccgccggagcaacgccgatgagtgcgccgaggagtgcgtcgacgtcgacccgccgccgaacaagcccacctggaggtgcttctcgtacgaggagctcaaccaggccaccaatggcttccaccaagacaacatggtgggcaagggcgggtacggagaggtctaccgcggggtgctggacgacggccgcgccgtcgccgtgaagcgcctggcgccgacggccgcggcggacgagaagaaggagaaggacttccttacggagctgggcacggtgggccacgtccgccaccccaacgtgtccgcgctcctgggatgctgcgtcgaccgcggccttcacctcgtcttccacttctccacccgcggctccgtctccgccaacctccacgacctgaagctgccggccatgtcgtggaagcagcggcacgggatcgccgtcggcaccgcgcgggggctgcgctacctccacaagggctgcgcgcgccggatcatccaccgcgacatcaaggcgtccaacatcctcctcaccgccgactacgagcctcagatatcggacttcggcctcgctcggtggctgccgtcggagtggacgcaccacgccatcgcgcccatcgagggcaccttcgggtgcctggcgccggagtacttcacgcacggcatcgtggacgagaagacggacgtgttcgccttcggcgtcttcctcctcgagctcatctccggccggaagccggtggacggctcccacatgagtctcatcgcgtgggccaaaccttacctgagcgacggcgtggtgcaagggctcgtggacccgcggctcggcgacggctacgacggcgggcagctgaggcggctcatgttcgtcgcgtccctctgcgtcagggccgccgccgtgtggcgcccgaccatgacacaggtggtggagctactggagtccggcgagatttctcaagagcagtggcagatgcccgaggaggaggagcaagacgagctgtgggacttcgacgatctcgacgacttcgacgaggacgactacgacgacgagtccgattccccctcgatctcctcgtcggcatgcagcatccaccccgatgattagccccaaaatacttgcgcgtgtcagtagattattatcgttgttattattcaacctgctgatacggtccttgattgtatcggtgtgtacatacaccatccatccctagtagagaatagtaatatgaaaatccgggagaaaatcgagagagacagagagagagagagaagaggatccaggcccgtggctttcagttttggtgtcgccatctcatcaggaatcttccccgtccataatacgccgtccgtccgtcttaactccagcagccgatctgatcagctcctgacagcgacggatgcgtgctggtttcttcccaaaccagctgacagtttggcatgccgggccgtgcgaaccagaaactgtcgttggtgtggtggtgcttggctttatttctgtgggcgagccatggatgatgcagggactgagggacccctggcctgaatcgcaggagccaggagcggtttggctacgagcggttagctagcttgctagcagccacatgctcagagcagaggcaagccaggtggtgggtttcggtttcggctcggctgccgttggttagcttgcccaagtgcagttgggcggccctactgcccggctgttcaggagcgcgtctgaaagcgaggtgatcagtgagctaaccacggcaacgggatcggttgatcattgagcgaccttgagacaggacgaagcaagtcgctctgtcagacgagaggcaataatttgcccttttttcacttttcatgcatttcagtcgtgtgtgggtgtgttagttaattcgggatgcagtcatgcatggccgcaagcccgttggcttgttttaatctataccgatttttaatacttttagagtgtgttcgtttgtttcggaatcatgacctagaaccaatccaaccagtaatgattatctaa

SEQ ID NO: 101779 - DNA, 2069 bp, Zea Mays
cgctcgcgcgtgcagttgagagcggctcggcagcgcagcgtgcgcggacacggcagcgccagttactctctctctctctctctctctctctctctctctctctctcctcgctgctcggcgtccaattcaatgcgctcctgcgcaacggggcagagcagcgacctccttccttctccaccattgggttgagctccgccactcaattcaatgcctgtccgctcttgaagaaacgcctcctcctctcttctttaaccgccccgtgtcatcactcttactcgtacgtgctcgcgcacgccggtttcaatacgtccgctggcctctgcgtgcgtcgtctcgtcacgcaggcagcaaggcgtggagaggagaagagggaggggattgaattgattgatggggttgctccgctgagctagctcctccggccgtccttcccgtcttctacctctaggtgggtattgccattgctcggtggatcgcagtgggagatgaattacctccggagccggagcctgaagcggctcctgtccctcggccgccggagcaacgccgatgagtgcgccgaggagtgcgtcgacgtcgacccgccgccgaacaagcccacctggaggtgcttctcgtacgaggagctcaaccaggccaccaatggcttccaccaagacaacatggtgggcaagggcgggtacggagaggtctaccgcggggtgctggacgacggccgcgccgtcgccgtgaagcgcctggcgccgacggccgcggcggacgagaagaaggagaaggacttccttacggagctgggcacggtgggccacgtccgccaccccaacgtgtccgcgctcctgggatgctgcgtcgaccgcggccttcacctcgtcttccacttctccacccgcggctccgtctccgccaacctccacgacctgaagctgccggccatgtcgtggaagcagcggcacgggatcgccgtcggcaccgcgcgggggctgcgctacctccacaagggctgcgcgcgccggatcatccaccgcgacatcaaggcgtccaacatcctcctcaccgccgactacgagcctcagatatcggacttcggcctcgctcggtggctgccgtcggagtggacgcaccacgccatcgcgcccatcgagggcaccttcgggtgcctggcgccggagtacttcacgcacggcatcgtggacgagaagacggacgtgttcgccttcggcgtcttcctcctcgagctcatctccggccggaagccggtggacggctcccacatgagtctcatcgcgtgggccaaaccttacctgagcgacggcgtggtgcaagggctcgtggacccgcggctcggcgacggctacgacggcgggcagctgaggcggctcatgttcgtcgcgtccctctgcgtcagggccgccgccgtgtggcgcccgaccatgacacaggtggtggagctactggagtccggcgagatttctcaagagcagtggcagatgcccgaggaggaggagcaagacgagctgtgggacttcgacgatctcgacgacttcgacgaggacgactacgacgacgaaatgcagtgcacagtacacaccgaataaaatttgcgacagcccgatgccgaactaactagcattatgagcatgcatagcatgggcaacggacgcagcctcttgcttgcgctcgtccgcgagcacatgtagttgcagccacgagcatgctggatccaacatccacagtgttgttgactgtgacagaatggccaaaaacacagagctgcacaacgaacggtttcatgctggaggttacctgaaggacagacagcggtgttgatggatgggggcctaagctgaaaagaatgctggctatagtatagtgctgcaacgctgctaccacgcacaacagagatgactgctgatggattcttattcttcttgatagatttgtttatgtgatgatggaatctaacctatatgtcgttgctcttcataaatctgcttgtctcgcttggaaataaatgtaagtgtgaatgaatgattgattgatgagtagttgaattcattattaaacttctt

SEQ ID NO: 101780 - DNA, 1484 bp, Zea Mays
atacagcccacagacacttccttcctccacgcttgggcacggcagcggcgccgcaaagccgaacgagagagagaagcagagaacccctcctcgacctcggcctctcctcttcctcctccgctcccaaaatcctagggttttgctcgccgcggcgcgatggagcccacctcatcggcgtcgatcgcgcggcagacgtgggagctggagaacaatatccccgcggcggcctccgacccggacgcgatggacgcgatctaccgctacgacgacgcgtctcaggcgcgggcgcagcaggagaagccttgggccaacgacccgcaccacttccgccgcaccaagatctccgcgctcgcgctgctcaagatggttgtccacgcccgcgccgggggcaccatcgaggtcatggggctcatgcagggcaagtgcgagggcgacgccatcatcgttatggacgcattcgcgctccccgttgagggcaccgagaccagggtcaatgcccaggccgatgcctacgagtacatggttgactactcaaccatcaacaagcaggctggaaggttggagaatgtggttggctggtatcactcgcaccctggctatggatgctggctgtcaggaatcgacgtgtcaactcagatgctcaatcaacaattcacagaaccattcttggcagttgtgatagaccccacaaggacagtttctgctggtaaagtggagattggagcctttagaacatacccaaaagattacaagccaccagatgagcctgtatctgagtatcagactattccactcaacaagatagaagattttggtgtccattgcaaatcgtactatgctttggatataacttatttcaagtcatccctggattctcacctccttgatctgctctggaacaaatattgggtcaacacgctatcttcatcatcgcttctgggcaacagagattatgttgctgggcagatctttgatttagctgataaactagagcaagctgaaggccagctggcacacagtcgatttggtggtatgattatgccatcgcaacgaaagaaagagcaagaagagtctccactggctaaggtaacacgagatagctccaaaatcacagctgagcaggttcacggcctcatgtcacaggtcataaaagacatccttttcaactctgttcacccgtcaagcaaggcaagcacaagtgctccaccagattcatccggtcctgagcctatggttgaagcctgagttccagcggaaggggacaatggatatttgtgttatgttatctgattcagaaggtgcaaaacaagttatcttttgagtacagaatcatcatgtaattatgagttgccatcttgggctgccactgagagggtgtgatttgggtccggttagcaatctcatgtattggatttcggatcagtattcgaagctttcataacgaggagccatcatcttattttagctgtttgtttggcttgcca

SEQ ID NO: 101781 - DNA, 1555 bp, Zea Mays
atacagcccacagacacttccttcctccacgcttgggcacggcagcggcgccgcaaagccgaacgagagagagaagcagagaacccctcctcgacctcggcctctcctcttcctcctccgctcccaaaatcctagggttttgctcgccgcggcgcgatggagcccacctcatcggcgtcgatcgcgcggcagacgtgggagctggagaacaatatccccgcggcggcctccgacccggacgcgatggacgcgatctaccgctacgacgacgcgtctcaggcgcgggcgcagcaggagaagccttgggccaacgacccgcaccacttccgccgcaccaagatctccgcgctcgcgctgctcaagatggttgtccacgcccgcgccgggggcaccatcgaggtcatggggctcatgcagggcaagtgcgagggcgacgccatcatcgttatggacgcattcgcgctccccgttgagggcaccgagaccagggtcaatgcccaggccgatgcctacgagtacatggttgactactcaaccatcaacaagcaggctggaaggttggagaatgtggttggctggtatcactcgcaccctggctatggatgctggctgtcaggaatcgacgtgtcaactcagatgctcaatcaacaattcacagaaccattcttggcagttgtgatagaccccacaaggacagtttctgctggtaaagtggagattggagcctttagaacatacccaaaagattacaagccaccagatgagcctgtatctgagtatcagactattccactcaacaagatagaagattttggtgtccattgcaaatcggtctctttctccaacttctttgtttggctcacatatgtggtttagttctgccctaactgaatttcttgcagtactatgctttggatataacttatttcaagtcatccctggattctcacctccttgatctgctctggaacaaatattgggtcaacacgctatcttcatcatcgcttctgggcaacagagattatgttgctgggcagatctttgatttagctgataaactagagcaagctgaaggccagctggcacacagtcgatttggtggtatgattatgccatcgcaacgaaagaaagagcaagaagagtctccactggctaaggtaacacgagatagctccaaaatcacagctgagcaggttcacggcctcatgtcacaggtcataaaagacatccttttcaactctgttcacccgtcaagcaaggcaagcacaagtgctccaccagattcatccggtcctgagcctatggttgaagcctgagttccagcggaaggggacaatggatatttgtgttatgttatctgattcagaaggtgcaaaacaagttatcttttgagtacagaatcatcatgtaattatgagttgccatcttgggctgccactgagagggtgtgatttgggtccggttagcaatctcatgtattggatttcggatcagtattcgaagctttcataacgaggagccatcatcttattttagctgtttgtttggcttgcca

SEQ ID NO: 101782 - DNA, 1488 bp, Zea Mays
gtggggccccccaaaaagaaggatcccctccaaaaataagcgtatgctgctatgtgcagagcacacacggtattctttagtaaaaggcgaaagaatagttcgctctgtgcgcactgcgcagctgcgtgcttcaactaggtagccttcctgctccttttattcatctcactcgatgctcacctcgcgcatgcaagccgtatggtactaatccctccttgcgaccatctcacgctctacgcgctctgccgcgctagcaaacttgggccaggcccactaaccattgccaacccactactggaccaggccgggcctgatgcatcgaagcgctttacagcgcgagcgattgcgagcggaggttttcctggaccggccacatctgccacctagaaaaaaattctcgccatcacgagcagtcgagcaccaccctctgaccggtgaccgctgtgaagtcagtcagcttcagcaccacgagcacgatggccctcgcgctcgccacgaccccactcgcgcatctcgcccttgccccgccctcgatcttcggctcccagtcctcgctgctgctgctcccgcgccgcgcgtcgcccgcccccgtctccctctcccaccgccgcatcatcgcggccgtcgcgaccaaggaacccgagctcggcggcggcggatcgggggccggcgacggtgccggagggagcggcggcggcagcgacccgaggggaggagggcaggaaggagacggggaggaagagaagatggggcagggcctgtccatgtcgcagaaactcaccctcgcctacgccgcgctcgtcggagctggtggtgtaatgggatatatgaagagtggaagccagaaatccttggctgcaggaggcatatcagccctggtcctgtacgtcgtccacactcaactcccagtgagacctgtcctcgcatcatcgatcggtttaggtatatcggccgcgctactgtcagtgatggggtcgcgcttcaagaagtccgggaaggtattccctgccggcgtcgtgtcccttgtatccctggttatggtcggaggctacttccacgggatcttgcgtagctcgcacgcgtgatgcagcctgtggtcttttctgttccgtaatgcaatttggctccccctttgaactgtttctctgtttcacttctcggtggatgttttgtatccgttctcaactttagttcatcttttgtgacagtgggcaataataaccaataagcatgtgagagctgatagaggtgaagtttaagctttgtgagaatttttagatttatactgcagcagcaacaagtgtgaattgcactacgagtgcctgaatatggcttgtgcggacagccaaacagacttatctggatataatggcgagctggacaattcagtggttaccgacgacaccgactcgtgggcgccgccaacagtccaggggttccgcatgcatctgcgtgggacgacatcgaaattttattttatttttggtc

SEQ ID NO: 101783 - DNA, 109 bp, Zea Mays
gctcaccttccatcgacgaggtcgccccgctcaccttccatcgacatggccgccccacccaccgccatctctgctccccgccatcaacgccccgctctatcgatggaag

SEQ ID NO: 101784 - DNA, 1626 bp, Zea Mays
cccactaatcagatccccgcaggctggttcactgagccggcttccgagcggcccatgggcttgcccaggaccggctcttccagtcgcctcaacgcgcaggcgccggagttcgtgccgcggggcccgccaccaccgacgccgccccggccgtttgagtactatgcgcctatggtgaacgcagcggatttgctgccaaggagcaacaggcgcgggagccggaagcggagatgctcccgcccgccgcggtgaagacggagctggtgtatctgggcaatttggtcggttggcacggggtatgcatcaataggcaccgtcatcgcagtaggacgcgtgcgtgatcaagcctggatgggacggttttgacacagcacgtcctgtgtgcgaggatctcgaactgggtcagttcgtggtgatgttcttctaggattctttcgtcatttcttttactgcatcgttgaaactgatccagggtagtgcggcggtgttgggggttgcggcgggcctcgccctcatcgtcggcttcgtccgctgcgatacctgtgaagttaacaatctacgctattatcgatagcaatccagcgctgaagtcaagaagttacctgggcaaaaacagtatacccgattctaggtgagaagctcaaagaaggggaagacatctacatctatcaggggtgacaaatccttttgctatgaagatgaccacagggttcttgtttgcgagttcatcctctagaatgtattgggttgtcgccacgaaaaaacacacgaatacataaattcaaataatttctggtgctgtggagtattcataattgtgtgcttttgttgaatccttcatgtaccataattcttactgctttcaagcccttttagaatatgactttaggatgtagaaattggtgaaaggagacaagaaattattctctaaactactattttttataggcaagggaggctggaagcaccttttttgcatgggagctgcatggagagaaattattggcagaaaacaaacttagaccagattcttgaatgtgccaagggaataagcttcgcttgctgcaattcatgtgctgcttggcgccacaaaaggagtagaggggcggatctgcggctcgcgacccagtaaatacagctacagggaatgagggaaaaggcccaagcgtccagcccagtcgctctcgctcgccctactcgtccagccggcagccgctcgcccagccgctgcctgcccaccggccaccgctcgcccagccggcagccgctgcctgcccagtgcccaccgtcgctcgcccaggcccagccgcagagccgctgcctgcccgccgtcgctcgcctagccgctgccgctgccgccgccgctcgcccagtctaggtccagccgccgccccgcccagccgctcgcggctcgtccaagtgtcctgcgcgcggatctgagcaagcggtcgctgttgggcaactgctaacacatatttgctagatgtaaactgtaaactctgactctgagttgaacttttggtgcaaacatgtgccatgttgattagtgattatatggtgaactggaagctttgtgctgtcacatgctcttgtaattgactgcattgagtgttaattagtggtgtttct

SEQ ID NO: 101785 - DNA, 240 bp, Zea Mays
atgggactggacaccaatgaagaattcttaatggctatgcaacaacagcttgtccatgaaattcgtgaagtatggacaacttcagttgagcatctactttatatcaaggaagaccttatcatccctcatggatgtgttcattctcttgtaatctacgaagttctgttaaagttagttgaaccattttctgattctatgttctctctactatttgacaacaacacatcttttatgaattaa

SEQ ID NO: 101786 - DNA, 994 bp, Zea Mays
ctgggccggccaatccgcatctgcgattgtccaacgtcacggcccgcgcccgcgccagtccgcattcgccgcaaacggacgcacgcatccccgctccccccgccccttctcgtcgccacgagtgtgtgctagggttccggcgtccggcgcgggcggtggcggccattccgatggaggcggatacggggtgtcggttggaggtggacgacgtcctctccttcgccgacgacctcgtcgtagtgctccgccgcagcgacgacgccgacgccaacgcgcaggtgatcgcgggcgcggggttgctgcggaccgcctgccgctccgagtccgaccacctccacctgcagctgaaagattatcagcaaaaaatatgctcctgcaaggacaagacagacaaagcaaaagctgaaacgattgctgctgatgaactgagtgtactgcaaaataaaatggaagaaaatcttcaggaagataaacaacttcgtgaagaattgagagctacacataatgaccttgaaaacctagaccatcaaagggcttctatacaagacaggaagaacgctatcaagaagaaggatgaaaacatgcggaaagccacatataaactttccatgtgcgtgtcagttacaaatatcataccaaatttggaagatcgggataagatctcaagctatactgtcgacaagaatgggaagaagatacagaagttcgagtttgagaagacgacgccaccagttgagatctgtaacacgctttggaaaacaatttagggcgtgcagatcgttgttactgtctgttaacgaagattgtcaattgtacttgtatatatagctgactagctgaggatggtggacctctcatcttcaattgtgcttgtttatatagctgaggattgtcaattgtgcttgaatttagggcgtgcaaaccgtcattactgtctgttgattttacagtgttttgatttcagtcagtataagatcgaagatttgcgctttgc

SEQ ID NO: 101787 - DNA, 1023 bp, Zea Mays
attcgccgcaaacggacgcacgcatccccgctccccccgccccttctcgtcgccacgagtgtgtgctagggttccggcgtccggcgcgggcggtggcggccattccgatggaggcggatacggggtgtcggttggaggtggacgacgtcctctccttcgccgacgacctcgtcgtagtgctccgccgcagcgacgacgccgacgccaacgcgcaggtgatcgcgggcgcggggttgctgcggaccgcctgccgctccgagtccgaccacctccacctgcagctgaaagattatcagcaaaaaatatgctcctgcaaggacaagacagacaaagcaaaagctgaaacgattgctgctgatgaactgagtgtactgcaaaataaaatggaagaaaatcttcaggaagataaacaacttcgtgaagaattgagataagttgttgctctagcattggtattgcctgaaaagttgcatgttagaactaatattttgagttatatgctatgatgtcaacacagctacacataatgaccttgaaaacctagaccatcaaagggcttctatacaagacaggaagaacgctatcaagaagaaggatgaaaacatgcggaaagccacatataaactttccatgtgcgtgtcagttacaaatatcataccaaatttggaagatcgggataagatctcaagctatactgtcgacaagaatgggaagaagatacagaagttcgagtttgagaagacgacgccaccagttgagatctgtaacacgctttggaaaacaatttagggcgtgcagatcgttgttactgtctgttaacgaagattgtcaattgtacttgtatatatagctgactagctgaggatggtggacctctcatcttcaattgtgcttgtttatatagctgaggattgtcaattgtgcttgaatttagggcgtgcaaaccgtcattactgtctgttgattttacagtgttttgatttcagtcagtataagatcgaagatttgcgctttgcagcccct

SEQ ID NO: 101788 - DNA, 675 bp, Zea Mays
atgcacagaattgcatcaaatttcccagatttcccaagcttttgtgctgttataggaacctcaaagcttccgggaacactaacaactgttatattttcttctttaacagagtatcgctcgaaagtttccagggcaccctgtagtaacaaatttgtcacgacctcgttgaaccgtgccacaaccaccccaaacctgagtccctcgttagtggtcaaagatcccatcaacttctggtgccccgcggctgcaaccacgtcagagcgcctcaacaatccagtacatgagttcattgcggctgaccatggacgacaagggaaggagatggcggcaggtgtacgcctcaggggcaagctaggctggacacatggggagttcgtagccacagagaatttcacaggagcagttgccatcgccggcatgtgtgttccgagtccgacagctactcgactgaactactgtggtacaggtgaacgtcagcaatgtttccgaacctggtgggtgctcgtcgccggcgacgggcccagcgaagacctgggggcggcggcggcggtcgcccaatcgacgccgagagagagagagagagagagagagcaggagcaggagcaggagcaggagcggagcggccctggctccctgccctgtggctgtcggtttttttactcttttcagcaatag

SEQ ID NO: 101789 - DNA, 1818 bp, Zea Mays
atcgaccaagtagccggcagccgcgcggcgtccgcgtcactccaatcccctcgccccgcggcgcctccgttcacagcgccatggcggggtggatctcctccaagctcaaagcagccgagaccctcctccaccagatcgatcagcaggcggcggaatccctcggcaagtccccatccgcttccgacctcgccacgctgcactccacaacatctcgctccgccgatgacctccttgacgtgccgctcccgcgcaggccgccgccgtccggcccgcccccctcactcggcctccgtctcgcagcgaagcgccgctccccgccttcccaagggccccgtcgctccgcatcggcggctgcgatgctcgcggtgcaggatcaagccggtggtgaaccaacggtgggggtggtggccgaggtgaaaccggaaacggatggaggggatcgcgaggacggcaagagtgtcgcgtccgagagcgggagcgatgaggactccgatgggtcagggagcgaagattcggaggattccgaggaggagaggcggagggaggaggagaggacgcggcggcgggctgagcggcttgcggccatggccgcacgcgctattgctgagcgcgaagatgctgttgcgaggctcgagggggagaaggcggggcttgagaagctgctcgccgagcgtgagaaggagcaggctcaggaggcttcagagttgcagactagtatgattgaaaccttggaagcagtggagatagagaaacagagacatcacagcactagaatggaagcccttgcacgtttggctagacttgaggttacaaacggtgagcttgcaaagtcacttgccagggaacaatggaatctggaagttcaagtagatcaagtggcgcagcttcgagaggaagttgaattgaagaaacttgctcaagataaatacagaagaaagctaacaaagatacaaaagacaagtgcccctccggttgatgaaatagaatctttgagaaggttcaagctggaggaagaaattattgatgcagaatacactctgacatgtgacagaattgtgagcttgaaggacaaggcaaggaagattgaagaaagcattgagctgactagaagagacatggttcatcctacagaggtggaaattgagctcaagaagaggcttgatcaactaactgatcggttgattcagaaacaaatgcaggtggagtccctatcttcagagaaggcagctctgttaatgagaatcgaggcagtcacgaggttgcttgacaatagcacctcatcatcagcttcctcaagctcatcaagattggacattgaagctggtgcatggcaacaatcacattcaccaacaatcacattcaccaacaatcacattcgcgacagaatacgggctggacagcagcaactgggatctgcgatccgacagctcgattcgatcttttcagccgggcatatcttcttgaggcggaatccgaaggcgcaggtttgggccttggtgtacctggtatgcctccacttatgggtactgtacatactaacatcacacccaacagtgtcggaaactcgctctggggcaaccttttctttggagacattaaacaagactagcacttgattgctttttcctggcatgttctgatgttatattctggctgtatacatgaggcatcatacctttttctggttgagaaaaatcttagcatataatgcctcgtgcattttgttttggtacctgtccctatccgcaattaaagtgtaacggtggctggttgcatacatgaaagttggaattacttttggacaatggtggctggttt

SEQ ID NO: 101790 - DNA, 778 bp, Zea Mays
cgcttttcctcttcatctgaagctgctgccatataccgccctcttcctctcctttatatctaccccttggacctggaggagaggagctagtgagctaccgagaagaagaaggaagggccatcttccgacccacttgtaggcgctgtaagcctgtaagcagtcacctctcagccacagacatggtgggcatgagaggcgcctacggtggtgcttgcaatgacgacagcaagagccggctgcacggaggcaaggcggcggagccggagatcgcgtcgatggcagtgcacaaggtggcgccgccaccggcgcggagcacggcgagcaagatgaaggtgagggtgaaggagaccttcttccccgacgacccgttccgggcgttcaaggggcagccgccggggacgcagtggctcatggcggtcaggtacctcttccccatcctggactgggtgccgagctactccttgtcgctcttcaagtccgacctcgtcgcgggcctcaccattgccagcctcgccattcctcagggcattagctacgcgaagctggcaagcttgcctcccataatcgggctgtgtacgtatctgtaacccctgctagcttagctggcgtcgatctactagtctacctatattaaaggcatgcacgcaacgcatgcagattcgagcttcgtgccgccgatggtgtacgcggtgctggggagctcccgtgacctggcggtgggcccggtgtcgatctcgtcgctgatcatggggtccatgctgcggcaggccgtgagccc

SEQ ID NO: 101791 - DNA, 2856 bp, Zea Mays
cgcttttcctcttcatctgaagctgctgccatataccgccctcttcctctcctttatatctaccccttggacctggaggagaggagctagtgagctaccgagaagaagaaggaagggccatcttccgacccacttgtaggcgctgtaagcctgtaagcagtcacctctcagccacagacatggtgggcatgagaggcgcctacggtggtgcttgcaatgacgacagcaagagccggctgcacggaggcaaggcggcggagccggagatcgcgtcgatggcagtgcacaaggtggcgccgccaccggcgcggagcacggcgagcaagatgaaggtgagggtgaaggagaccttcttccccgacgacccgttccgggcgttcaaggggcagccgccggggacgcagtggctcatggcggtcaggtacctcttccccatcctggactgggtgccgagctactccttgtcgctcttcaagtccgacctcgtcgcgggcctcaccattgccagcctcgccattcctcagggcattagctacgcgaagctggcaagcttgcctcccataatcgggctgtattcgagcttcgtgccgccgatggtgtacgcggtgctggggagctcccgtgacctggcggtgggcccggtgtcgatctcgtcgctgatcatggggtccatgctgcggcaggccgtgagccccaccgcggagccgacgctgttcctgcagctggccttcacctccaccctgttcgcggggctggtgcaggcctccctgggcatcctcaggctcggcttcgtcatcgacttcctgtccaaggcgacgctggtggggttcatggccggcgccgccatcatcgtggcgctgcagcagctcaaggcgctgctgggcatcgtccacttcaccaccgagatgggcatcgtcccagtcatggcctccgtcttccaccacaccagcgagtggtcgtggcagacgatcctcatgggcgtctgcttcctcgtcttcctgctgtcggcgaggcatgtgagcatcagatggccaaagcttttctgggtttcggcgtgcgcgcccctggcatcggtcaccatctcgacgctgcttgttttcctcttcaaagctcagaaccatggcatcagcatcattgggcagctcaagtgcggcctgaatcgcccctcgtgggacaagctcctgtttgacacggcgtatttaggcctcaccatgaagactggccttgtcaccggaatcatctcactgacggaaggaatagcggttggtagaacatttgcctcactcaaggactaccagatagatggaaacaaggagatgatggccatagggttgatgaatgttgttgggtcctgcacatcatgctacgtaacaacaggtgcgttctcccgctctgctgtaaaccacaacgccggctgcaagactgccatgtccaacgtgatcatggcgctgactgtgatggtcacgctgctgttcctcatgccactgttcgtgtacacacccaacgttgtcctcggagcgatcatcatcgccgcggtgatcggcctgatcgatttccccgcggtgtaccacatctggaagatggacaagatggattttctggtgtgcgtttgcgcgtttgccggcgtcatcttcatctcagtccaagaaggccttgcgatagcggttggtatatctatatttagggtgttgatgcagatcacaaggccgaagatgatggttcaagggaacatcaaggggactgatatttacagagacctgcatcactacaaggaggcccaaagagtttctgggttcttgatcttggccattgaagcaccgataaacttcgccaactccaactacctgaatgaaaggattaaaagatggatagaggaagaatcttttgaacaggataaacatactgaactccatttcataatcttggatctgtcagctgttcctgcaattgacacaagtggcatagcgttcctcattgacataaagaaatcaatagagaaacgtggtctggagcttgtgcttgtcaatccaactggagaagtcatggagaaaatacaacgtgcaaacgaggctgaaaactattttaggccagattgcttgtatctgaccactggcgaagcaatcgcttcactttctgcacttgccaagatgacaaaaccctaaatggattgctgaattgtcattgtgttcatccctagcactgttaaaagttttcggtgcaggattttctgtaatggggagtgcatccaataggagtacatcacagctatgtttgtatctagtagaattcttcagatccatgtgatgcaaattcaatggaaaacaaatatgacagtacaatagtagatcttacagaaattttctgctgcagcgataaatattaggtgtcataagagtatagagtatatttgaattcatctatttactacaaagttcttcttcgttctacattgacagttggtacaatttttggagcgaggtgcgctagtagatatatatcagaatacctgattggcatcccactttgcaatatggcacctgagagtagtagataacttacattacatggtgcatgaaatcgaagtcatcttggaattttagatgattgtatgaactctttctccaagctgaagagtctagtaccttcacttcctctattaccgttgcatgactcaacttttggggcatttttgaagactagattgataaatcctcgagacgagattaacaagtcaccataaacgtctcgttgttaatgggccgtcgcctaaaaaatacaaaacattaaattttaaaatactcacttcaacatggagtcggacccaatatctttgatgatattgaggctgtggatgag

SEQ ID NO: 101792 - DNA, 1879 bp, Zea Mays
aaccatccttgcatgaacgaagacgccgcctttgtttctttgcttggagagttggagtatgcagtgcttattgatgctgctgctgctagcactccaatgcaacatgctgcacgccgcctaatctgctgaccctagtcatacagcatgcgaccagccgtgcccgctattcacacctgagcttaagactaaacgggcgtttaattaggccatgtttattgcttgattggcggttgcaaagtcgtgtgctgtgcactgaggctctccactagttcttagcgagactgccccacattttggcagtggctttgacattcgtgtcccgacctggagtacaaaaatgcaactggctggatctcgcttgatcggacgatcctggttccaagaataccaaacgagaggcactagaagagtactctgactgggctttcagctatgacttatctagcttttcatttcggacgaagagatgccatatttgtattgaattaattgttttctagagtgctcaaattatagatatgtatggcatgacacacacacacggtcactcaacttacctggtattagcaagccactgttcgctagctctaggcgcgaacaacttacacggtcactcaactgaccagtgaccactcaagtcacagaagaattctcattgcttcgccagctctaggcgcggtctagctagctaccagcaatggcgtccaggcagaccttcgcctgctacaccatggccctgctgttcgctgcggctgctgtctcggcgcagctctccaccgacttctacgacgacacatgccccgacgcgctcgacatcatcgagtccgcagtgagagctgccgtctccaaggagtcccgcatgggggcctccctcctccgcctccatttccacgactgctttgtcaatgcaagtgccatacagttgtggatagtgtgtgtcagctactcagcttcaaatctgggctgtgacgggtcagtgctgctcgacgacgcactgggctttaccggcgagaagacggcgcagccgaacaagaactctctccgcgggttcgacgtggttgacgacatcaaggcgcagctcgaggacgcatgcaaccagacagtctcctgcgccgacatcctcgcagtcgccgcccgcgactccgtcgtcgccctcggcggtcctacgtgggacgtggagctcggccggcgggacgggacgacggcgaacctggacgacgcgaacaacgacctcccagcgccgaccctggacctcggtgacctcatcaaggccttctccaagaaggggctgagcgcgagcgacatgatcgcgctgtcgggcggacacacgatcgggcaggcgcggtgcgtcaacttccgcggccgcctctacaacgagaccgccagcctggacgcgtcgctggcgtcgtcgctgaagccgcggtgcccgggcgcggccggcagcggcgacgacaacacgtcgccgctggacccggccacgtcctacgtcttcgacaacttctactacaggaacctgctgcggaacaagggcctgctccactcggaccagcagctcttcagcggcggcggctccgcggacgcgcagaccaccgcctacgcgtccgacatggctggcttcttcgacgacttccgcgacgccatggtgaagatgggcgccatcggcgtggtcactgggtccggggggcatgttagagtgaactgccggaagacgaactaactgatcgcgatcggtgtcaggcttcgacgtttcgtactgtcagctgtcacgatggagtgatcagtacgtgtctggtctgcgcagagttactgctccttctatgatggcgtagtctgcttcgaacggttgtagtactaccttttacaggaataaaaacgaagg

SEQ ID NO: 101793 - DNA, 1498 bp, Zea Mays
atgggtgcgggcgcgtcgggcctggcgggcgcggagcccagcggcaaggtggcacgcggcgccgggctgggtgacctcccggagctgtgcaccgcagaggtgctgctccgcctcggcgcgccggacatatgccggctcacgcggctcaacctcgcgttccacggcgccgtgggcgcggacttcgtgtgggaggccaagctgcctctccaaggatccggacaacgtccgcgagatcgcgctgacgttggggcccttggggttggatttatgacctggatggatgaattctccgagttcccccttcctctttggatgtttctaccattggaagaaagccaagctctgttccctttactcctgccccctttttttatgtggttctacttgtgctgtgttgcaattacttattactgcaccccaagtgcgtttttcgaccaaggaaatcttacgtcttttcatcttcttacttattactgcaccgcaagtggtccactccacatgatggccatgcctgcgttgtttgaggctatattattactcattctaaaggatggtcaaggtggtgatgaaaggaagcgatgcacgcccatgcaggcggcggccatcccacacttgctgtcgcacaaggacgtcgccgtcgacgccgccacaggctccgggaagacccttgcattcatggaattagcaaagacagtagctaaattggctgaagatggcaaggtcgacgagagcattgttgggaggcagcatgttattgtgagggggttgaaaggcgatggcggccgagggtgtcgtgtgctgctgaagctcaagaaaaaggcggtcaaagaaggtgccccatttcttcttgtttttgctttgacacttatcacaggagcttgcccctacaatgtggatattcctctcgagtcatcaaaggatatgaagaaaacgagaaagaacttcatgcatgctctgaagtgcctcgtagttgagtcagaacaaggcgcggatgggtgcgacagagctgtgggatctcttggcctccgactcagagcaattcgtggagatgtgcagggtgtatcaacacctcaagctgaagaactgttcgtggaggttgtggctctagaagggaaagcattcgacaccaggtgtgccctcatgaaggtctggtctgaactattatgtgcgctttgggactcttcaagtgtggccaagacgttacttcttcttaccatcagcaccaagagctatgagctaggatacttggattgtttggagcaaatgattgttcatgagaggacgatcacgagatggataccatagccatgtcgtgagcaacaagacaaaccatgcagagaagaaaccaacaaggacgagcaaagacaacaatcctgcagagaagtattaagcaacgaataacagagcatacaagtgtgggggtggtgtagtgtttagctattgggatgtagtgcagatctttacaattatttctagcttacttatctacaagctgaaa

SEQ ID NO: 101794 - DNA, 3190 bp, Zea Mays
atgcggccgcggccctcccgcttcctccagctactccttgtcgttgtgatcgcctgcgccgttccgggggtgagatgctccgaccggcggtttccgcacctcgaccgcgtccgcgagctccaacgccgggagggctcgtcatcggccgagcaggaggccgctgcgaggggacttctggcgcgcctcctaccgtcacactctaccagctttgagttcagagtcatctccacctccacggagctatgtggtgggaagacatgtttcgtcatcaacaaccacccgttgtttgatggagaagggactccagaaatattgatacttggagcaagtggggtggaaatttctgctggctttcattggtacttgaaacactattgtgcagcacatatatcttgggataaaaccggtggtgcacaactatcaaccattccgcgtcctgggtcactacctcgtgttcctgatggtggtgtactgattcaaagacccattgactggagctactaccagaatgcagttacatccagctattcttttgcttggtgggattgggaccgttgggagaaggaaattgactggatggctcttcaaggaataaatttgcctcttgctttcactgggcaagagtctatatggcagaggatttttgagaggtacaacattagcaaatcagatctggatgatttctttggtgggccagcctttcttgcatggtctcgaatggctaatatgcatggatggggtggacctctccctcagacttggcttgatgaccaactagttcttcaaaagaaaatcctttctaggatgtactcttttggcatgttcccagttcttccagccttctctggcaacatcccagctgcgttaaagtcaaagttcccttcagctaaagtcactcaccttggaaactggtttacagttgacagcaatccaaggtggtgctgcacatatcttcttgatgcatctgatcctttatttgtagaaattgggaagatgtttatagaagagcaaatcagagaatatggtaggacaagtcacatctacaactgcgatacttttgatgagaacactcctccattaagtgacccgaattatatatcttcgttgggtgctgcaacgttcaggggtatgcagagcggtgacaacgatgctatttggttgatgcaaggttggctgtttacctatgatcctttctgggaacctccacaaatgaaggcactactgcattctgttcctgttggcaaaatgattgttcttgatctttacgccgaagttaaaccagtgtggataaattctgatcagttatatggtgttccctacatctggtgcatgctccacaatttcgctgcagattttgaaatgtatggtgttttagatgctttggcttctgggcctattgatgctcgattaagtgataactccacaatggttggagttggtatgtctatggaaggtattgagcaaaatcctattgtttatgaccttatgtcagaaatggccttccatcacagacaagttgatcttcaggtttgggtcaagacatatccaacaagaagatatggaaaaccagtgaagggactgcaagatgcttggtggattttgtatcgaactttatataactgcacagatggtaaaaatgacaaaaatcgggacgtgatagtagccttcccagatgtcgaaccttttgttattgcgacaccagggttgcatgtgaatactagacaaatgtattctacagtaccatcgaagaattacatacggaaggacgtctctagtgatgcatatgaacatcctcatctatggtatgatactaatgctgttattcatgccctggaactttttcttcaacatggagatgaagtatctgacagcaacaccttcaggtatgatcttgtggatttgactcgtcaagttctggctaaatatgctaatgacgtttttctaaagatcatcgagagctataaatcaaacaacatgaatcaagtcaccatcctctgccagcactttctcagcctcgtaaatgaccttgacacattactatcctctcatgagggttttctgcttggcccttggttggaaagtgccaagggccttgcacgaaacagtgagcaagaaatacaggtaatctttttcttttgtcattttttgaagctgaattatgtctaatgatatggcatcataccatatttatcaaaatcccaaattcctacagttgtgaaagtaggtataattccattcttatcgacctgtttgattcttcctgttgttaggctgtttatgagcattaggctcaaacttgtggagcggttcacgttgagccaatctaagatttttcatatatgcactgtggtcatgatcgtgtgatgtatgtcactccagcattgatgacaagtagtcatgttcgtctaatttttgaattacaacttcgttgaaatccttgcagtatgaatggaatgctagaacacaaattacaatgtggtttgacaacactgagacaaaagcaagtttattgcgcgactatgcaaacaagtactggagcggcctgctgcaagattactatgggccaagggccgccatctacttcaagcacttgttattaagcatggagaacaatgcacctttcgccctcaaagaatggaggagggaatggatcagtctcaccaacaactggcagagcgataggaaggtgttttcaaccacggctacaggagaccctctgaacatatcgcagtcgctttacacgaagtacttgagcaacgctgatctacttgggctagtagaaggtacaggctctccttggaagtctgcaagcttataagtaggtgatgcgtgcaatcatgggtcatttcagattcgcaattacttttttttctctaatgtttttcctcaaactcataaatatcgtttggctgcgacatggttgctacgaatcagttctgtgtgaactgtgaagtactgaagtctttctgtatagcagtagaaggacgggtttctttcctttttccagtgttccttgccgtaaatttttcagttctgtatgtatccccatttttccatgaccatgcacagtaaagtagcccttaggagaatggtcatggaaaaattcggcctagttcagggtgtcggaactttactgtgcgtctgtacctgagaatcgtgctgctttctgtgaaatccatgtctttcaaac

SEQ ID NO: 101795 - DNA, 2868 bp, Zea Mays
atgcggccgcggccctcccgcttcctccagctactccttgtcgttgtgatcgcctgcgccgttccgggggtgagatgctccgaccggcggtttccgcacctcgaccgcgtccgcgagctccaacgccgggagggctcgtcatcggccgagcaggaggccgctgcgaggggacttctggcgcgcctcctaccgtcacactctaccagctttgagttcagagtcatctccacctccacggagctatgtggtgggaagacatgtttcgtcatcaacaaccacccgttgtttgatggagaagggactccagaaatattgatacttggagcaagtggggtggaaatttctgctggctttcattggtacttgaaacactattgtgcagcacatatatcttgggataaaaccggtggtgcacaactatcaaccattccgcgtcctgggtcactacctcgtgttcctgatggtggtgtactgattcaaagacccattgactggagctactaccagaatgcagttacatccagctattcttttgcttggtgggattgggaccgttgggagaaggaaattgactggatggctcttcaaggaataaatttgcctcttgctttcactgggcaagagtctatatggcagaggatttttgagaggtacaacattagcaaatcagatctggatgatttctttggtgggccagcctttcttgcatggtctcgaatggctaatatgcatggatggggtggacctctccctcagacttggcttgatgaccaactagttcttcaaaagaaaatcctttctaggatgtactcttttggcatgttcccagttcttccagccttctctggcaacatcccagctgcgttaaagtcaaagttcccttcagctaaagtcactcaccttggaaactggtttacagttgacagcaatccaaggtggtgctgcacatatcttcttgatgcatctgatcctttatttgtagaaattgggaagatgtttatagaagagcaaatcagagaatatggtaggacaagtcacatctacaactgcgatacttttgatgagaacactcctccattaagtgacccgaattatatatcttcgttgggtgctgcaacgttcaggggtatgcagagcggtgacaacgatgctatttggttgatgcaaggttggctgtttacctatgatcctttctgggaacctccacaaatgaaggcactactgcattctgttcctgttggcaaaatgattgttcttgatctttacgccgaagttaaaccagtgtggataaattctgatcagttatatggtgttccctacatctggtgcatgctccacaatttcgctgcagattttgaaatgtatggtgttttagatgctttggcttctgggcctattgatgctcgattaagtgataactccacaatggttggagttggtatgtctatggaaggtattgagcaaaatcctattgtttatgaccttatgtcagaaatggccttccatcacagacaagttgatcttcaggtttgggtcaagacatatccaacaagaagatatggaaaaccagtgaagggactgcaagatgcttggtggattttgtatcgaactttatataactgcacagatggtaaaaatgacaaaaatcgggacgtgatagtagccttcccagatgtcgaaccttttgttattgcgacaccagggttgcatgtgaatactagacaaatgtattctacagtaccatcgaagaattacatacggaaggacgtctctagtgatgcatatgaacatcctcatctatggtatgatactaatgctgttattcatgccctggaactttttcttcaacatggagatgaagtatctgacagcaacaccttcaggtatgatcttgtggatttgactcgtcaagttctggctaaatatgctaatgacgtttttctaaagatcatcgagagctataaatcaaacaacatgaatcaagtcaccatcctctgccagcactttctcagcctcgtaaatgaccttgacacattactatcctctcatgagggttttctgcttggcccttggttggaaagtgccaagggccttgcacgaaacagtgagcaagaaatacagtatgaatggaatgctagaacacaaattacaatgtggtttgacaacactgagacaaaagcaagtttattgcgcgactatgcaaacaagtactggagcggcctgctgcaagattactatgggccaagggccgccatctacttcaagcacttgttattaagcatggagaacaatgcacctttcgccctcaaagaatggaggagggaatggatcagtctcaccaacaactggcagagcgataggaaggtgttttcaaccacggctacaggagaccctctgaacatatcgcagtcgctttacacgaagtacttgagcaacgctgatctacttgggctagtagaaggtacaggctctccttggaagtctgcaagcttataagtaggtgatgcgtgcaatcatgggtcatttcagattcgcaattacttttttttctctaatgtttttcctcaaactcataaatatcgtttggctgcgacatggttgctacgaatcagttctgtgtgaactgtgaagtactgaagtctttctgtatagcagtagaaggacgggtttctttcctttttccagtgttccttgccgtaaatttttcagttctgtatgtatccccatttttccatgaccatgcacagtaaagtagcccttaggagaatggtcatggaaaaattcggcctagttcagggtgtcggaactttactgtgcgtctgtacctgagaatcgtgctgctttctgtgaaatccatgtctttcaaac

SEQ ID NO: 101796 - DNA, 1584 bp, Zea Mays
atggccaagcggctcgccggcgccgacaaagaggtgctcgtcgaggtggtgaggttcacgcagaagagcggcctgaggggctgtgacggcggctggaaggatttcctggcccggaacgacaggaagtttggcgcgtcggtcagcgaccccaggaagcgctccagggatgtgctgctcgccttcctgcagaccttccccaaggatttccagaagtacttcggcaaattagtgaagcgtcataatgaaagaagtgctgttcagcagtatgtggctgatttccccgacgaagtttctccccagcagaaacttgttcaactgacggcagagcacccagagtacagaaaacactactgcttcccatcgtaccaggaggcgtcgaaagtattgcagatagatgtctctagtttaacgagctcaagtgctatgttgtcaattgactgtgagatggtcctttgcagtgatggcacagaggctgtggtcagagtatgtgttgtagacgacaagcttaaggctaagttggacatacttgtaaacccatcgaagactgttgctgactataggacacacatcactggtgtatctaagaaggatttagaaggagtcacatcatcattagttgatgttcagaaatcgctgaagagaatgttatccaaaggaaatattttgattggccatagcttacatagagatttatgcgccttaaagattgattactctcaagttattgatacagcatacatatttaagtatgcaaatttaccaactactgcatcaccttccttgaacagtctgtgcaaggctattttggggtattcagttcgagaagaaggagaaccacataattgcttgaaggatgcagaagctgcgatgaatctagttcttgcaaagcttaagaatgagtttaatgaccccattgaaattgctgcaagtagtgtaactgaatctgatgtggtgaagttgctcgctcatagaattccagtgtacctgccttgtcaagagctgtgcaaaattttctctgggaaccccaatattgatgacaagattgattcgagaatacgaggtgaattttattccacatgtatttcattcaatgacgtagatgaggtggacaaggcatttgaagaactggatggccaaaagaccaaggactcaggtgggagacttcaaaagcatgtactgctgaagcttgacaatggagatgtcgtgagcttctatgttcggaagatggtatacgattcctggcccaaacagatcgaagttccaaggaagagaccagagcctactgaggatccagagccaaagaaagagcatgccaagggggttcagcaaaagaagagaaataactttgtgagagatactgaggatccagagccaaagaagagaccagagcctattgaggatccagagccaaagaaagagcatgccgagggggcacaggcagacctggaggcgtcggctacggcggcgattccagaaacggcgcggttgagaaggacagcgacgagggaggcgccgccgacgaggatgggcaggccgcggaccagcgtgacgtttcgccggacccaaccctccacccactcttga

SEQ ID NO: 101797 - DNA, 892 bp, Zea Mays
tatataatcccatgcattgcacggctaatctcaaaaccatcaagcaaagcagagcaccgcaaacacagcagagtgacaaggagctcgaccgtttcttctgcaagcaagcaaagatggccactgcgagagggatagccgccatggcgatgttcttcctggtcgcgctctccgcctcccacacggcgtcctccctccgccccggcgccggcctcggcacgtgccgcgccagcggatacctcccgggccgctccggcaactgcgagaagagcaacgacccggactgctgcgaggacggcaagatgtacccgcagtaccgctgctcgccgccggtgacggcgagcaccaaggccgtgctgacgctgaacagcttcgagaagggcaaggacggcggcggcccctcggagtgcgacaacgcgtaccacagcgactcggagaaggtggtggcgctctccacggggtggttcagcaacatggcgcgctgcgggcaccgaatcaagatcagcgccaacggcaactccgtgtacgccaaggtggtggacgagtgcgactccgtgcacggctgcgacgacgagcacaactttgagccgccgtgcgacaacaacatcgtcgatgcctcgccggcggtttggaacgccctgggactcgaccagaacgtcgggatggtggacatcacctggtctgaggagtgagaggcagttcagtgctgtgtttccactttccgatcctccatctgttagcacccgatatatgtcgctgtcgtgtacatgcatatgattataggatacaggtcgacaggtcgtgggtcattgccatcactagtgtaatgtatgtgtgccatgtcattgtatatatagatataatatatatattattattgaaatttcagcataga

SEQ ID NO: 101798 - DNA, 576 bp, Zea Mays
atggccactgcgagagggacagccgccatgggcatgttcttcctagtcgcgctctccgcctcccacacggcgtcctccctccgccccggcgccggcctcggcacgtgccgcgccagcggatacctcccgggccgctccggcaactgcgagaagagcaacgacccggactgctgcgaggacggcaagatgtatccgcagtaccactgctcgccgccggtgacggcgagcaccaaggccgtgctgacgctcaacagcttcgagaagggcaaggacggcggcggcccgtcggagtgcgacaacgcgtaccacagcgactcggagaaggtggtggcgctctccacggggtggttcagcaacatggcgcgctgcgggcaccgaatcaggatcagcgccaacggcaactccgtgtacgccaaggtggtggacgagtgcgactccgtgcatggctgcgatgacgagcacaactttgagccgccgtgcgacaacaacatcgtcgacgcctcgccagcggtttgggacgccctgggactcgaccagaacgtcggaatggtggacatcacctggtctgaggagtga

SEQ ID NO: 101799 - DNA, 1712 bp, Zea Mays
ctaatgggtatggcttcgtgtgtccactggtaccttacccactgccatccctacccccaccacggccgaaacggatcgcagcgagcgaaaatggatgcacggtttgtgtgcgccgccgactctgagctccagctggcgcgggcccggtgcgtcgcgctgcaggaccacctcgccgcttcgccggacctgccacgccatcccgcgctccgctccctccttcgcctcgtcaacgccgagctgcgcttcctctcctcgctccgcctcgccccggccacgccgctctcctccaacctgccccacctcgtggcgctccacctcgtcctcacccaccctgccatacggagcccgtcccggctctcgccgctccccggcgtagatttctcctgcgccttccgcggccggcccgcgtgggtgctcgtgtccgcgagcaaccccgccaggctcgcctgggccccgcccgggggtctccgtgcccgcttcgcggcggcgctagaagccgcgcgcggtgccccgcccgctacgcggcccgagaagctgcttgtagtcttctcccgcggtgtcggcgtggatatcgcgcgggggctaaccgaggggttcgaggccgtggaggctgacttgctcgaggagttcattggcgactccgaggaggagaatgagcacgggtgggttgtcatcagcttggactcgagtgaggagctcaggaatttcagggcgttcgagattgatgtcgtggagggtgctagtgaggttttgcttccatcagacgtcgcggtggacgaggtaagtgctgatgaggaagagcttttgggtttctggggatcctttgctgcctttatggagaagatgtggaaagtatcgagggagctggtgaatctggacaccacggcactggtcgctatagtgtcagggatcagcaatggcggggtagggaagctgatggctgcacctgaggcagagaccagagcaaggttcaagtgcaactacaagttcgtcatggatcaggcacaatacgaactgcagtttccaatactcatagagttacggaaagcagtggaggggaagcaatgtatcatatgtgaaactgtcaacttggaattcaaagaaattgtttctatgtgtggtgggcctgaggagaacaccagagcaagacatttgttgaaacaacttaccattgtcccagacaatccttcagcacgaatgatggatcttccaaccacaaggaagctcgcgatgaaaaataaaattgtttttggcacaggtgaccattggcgggcccctactttgactgctaacatgggttttgtaagagctgtttcccagtctggtatgtccttgctaaccatcgagcaccgacctcgggcgctgattggtctgtgacagttagtatgccataactattctataggtgttttgagatcctaacgtttgtaattctgccccttctgaacattaaacaatatgaagttctggtaattgtagttgtcctactcctagaactatggtgtagtgtaggatgtcctagtttactccagtgtctagtactgcgagctttgtccatgactgtgtaactggtccagatccactggagtttattcgagcgagaatgcttactatctgtacttgtatccttgacgtcaaagtcaagcaaagcatatgtacaatatgaatgaacgcatcagcatgaatgactcgttggcagcgtgaattgttgc

SEQ ID NO: 101800 - DNA, 1771 bp, Zea Mays
ccgtccccaacccatcccccgcccgctccgccacagtccacacaggccccagccatggaggcggccccaacccccgagccggggccgcacgtgcttgtcatccccttccccgcgcaaggccacgcgctgccgctcatcgacttcgtcgccctcctggcggcgcgcggcctccgcctcaccgtggtcacgaccccggcaaaccttcagcttctctcctctctcctcgccgcacaccccaccgccgtccgcgccgctaccttcccgttcccctcccacccatccctgcccccggggctcgagaataccaagggttgcagcccggtgcagttccccgccttcgtccacgccttggccgagctgcgtgggcccatcctcgcgtgggttaaagcgcagcccgatcccgtcgtcgccgtggtcgccgacttcttctgcggatgggctcagccgctggcccgcgagataggcgccgctgggatcgtgttctcgccgtccggcgtcctcggcaccgccgtcccgcactcgaccttccgccgcctggtgaggcgccccgcggagtgcgatggcgacgacgagttcagcgtctcgttcccggcgattcccggcgagccgtcttaccagtggagagagctcttgatgatgtacaggaactacatggcaggcgctctggacgagcaggtcggcgcgtcggtgaggcagaacttcatgtggaacctgcacgacagctgggggttcgtgttcaactcgttcagagcgctggaggggaggtacctggagcagcctctcgaggacctgggcttcaagcgcgcctgggcagtgggccccgtggctccggaggcggacgccgcggttgcccgcggcgggcaggcaaccgtcgagctcgccgatctcagcgcgtggctggacgcgttcccggaaggttcggttgtatacgtgtgcttcgggagccaggccgtgctgagccccgccgtggcggcggcgctggccgaggcgcttgagcgcagcgccgtgccgttcatgtgggccgtgggcgacgccgtggtcccggacgggttcgaggcgcgcgccgcggcgtcggggcgcggctcggtggtgcgcgggtgggcgccgcaggtggcgctgctgcggcatccggcggtggggtggttcgtgacgcactgcggctggaactcgactttggaggcggtggccgcgggggtgcccatgctggcgtggcccctgacgggcgaccagttctttgacgctcggctgctcgtggacgaggcccgcgtcgcggtccgcgcatgcaagggcggcctcggctttgtccccgacgcaggtgagctggcgtccgtgttggccgacgccaccggggagaagggccacgacgtgaggacccgcgccaaggcactcgcggcagaggccgcccgcgccatgaagcctggcgggacatcgtacgcggatctagagctgttggtgcaggaaattcggaatcggaagcttagctagctccctctccaggaatacatcaggtacccttctagatcaaagcagatacttccatgcattcggactcatttgttaaagctgaacttcgctgtggcttcagcttgaacctatttaagtgccttcccatgtgtgcacgggaataattggtttccgtttggcactcagttgtgctgtgtttttgcagctttgcatgaactgaagaccagctaaggccccgtatgaatccactcagtttattagaaactggttttaaaagttataaagcctccaaacaaatcaagttttt

SEQ ID NO: 101801 - DNA, 2332 bp, Zea Mays
ccaggccaccacaaccatcccccaccaccagccgcttgcccttcctcccctgctgctgctgccgcgctcctaataattgcatcgccccgtcgtccccgccctgttaatcctgcagcggtagcctatcctgcctgccacctgccacctcgctgcttatatcaccggctagctctccatcaacgccaccgcccgctggctggctggctggcttagcgcgtgctgtgagcctgtgaccgactgcgagagcaccgcaccggaggccggagcacgcccgcgcgcgtgagaaccgcagcgcagagccaggggcgcgcaggggatcttgtccgcaggtcggtaggcatgaagctgccgctgctgcggccgctgtggctgggcctggggtccgcggcggggccgcccgacgcggcgccggagccggccaagccctcgctgccggccgcgtggctgttgctgcacgcgctcttctgcgccacctccatggccgtcggcttccgcttctcccgcctcatcgtctacctcctcttcctgcccaccccgcccatcaaccccgccgcgcacctcgtctcgctcgtgtcaccgcccgccgtcgtgctcgcgggcggcaacgccacggccatggccacgatcaccaccaccaccaccaccacgacaaccgtcaccaccaccaccaccgtggccgccgagatcagcgcgcgcccgcagcaccaccaccaccacggccccgtcttcgtcggccgccacccgatccgcgtccgagcctggccccacccgaaccccagcgagcttcttgacgcccaccgcatcctcgccgccgtccagaacgcgcagcgtagcgccaagcgccgcggcgcggggcccgccaggcccgtcattgccgtcaccccgaccaccacctccgcgctccaggtgccatcgctcacgtctctggcgcacaccctccgcctcgtcgacgcccagctcgtgtggatcgtcgtcgagccggggcaccgcaccgacgccgtcgccgcggtgctctcccgctccaacctcgacttcctccacatcaccggccctggagactccaccgcaagcctgcgaatgcacgccctcagggagattcgggcgaagcggatggacggcatcgtggtgttcgccgacgagaacagcatcctccgtacggagctgttcgacgaggcgcagaaggtgaccaccgtgggcgccgtgcccgtcggcatcctcggcgaggacgacggcaccagcgagtccttcctccaggcgccgtcgtgcgacgcggaggggaagctggtgggctaccacgtctcggaggagaccgtgctgccggcgaaccggagcgacatgctgatggccagcaggctggagtgggccggcttcgtggtgaacgcgcgggcgctgtgggaggacaccaaggagcggccgctgtgggtgcgcgatctcagcgccatcgacgatgcagacgctcgcgccgccagccctctcgcgctcgtcaccgacgccggccgcgtcgagccgctcgccagctgcgcccaggcggctctcgcgtggtcgctgcgttccgacagtctccacgaggtcaaattcccacacgagtggaaaatcgatccggcactgctgaataccggtgcccgtcagcaaactgttcaaccagagacacaaccgatgcaaactactctagcgagcactgaagaccagcactagaggacttttttttttgtggacagtagaagtcagagcaaatcaggcagctgttgctccccaagatttgtcaaaagtgtttcctcaagtaaaaaaaatgactaaagtccccagttccccactgatgcaccgtcggtgccaacctctgccaaagtaacagaaggcctcagctcagctcatttctttggactccagataaagctaccagcagcacatgtaatcttggtcacttcgtcgtccaaatccccatgtatcgacgtataaaaaaataggtaagaagtttaattatccatacctccgttccccttgctgtagaatactagcattttaggcatattgttttcgtgtaaaatagatgagagcagggacttgcaaaaggcttgtggtttgggaatccgaagcattggttgtacacttgtatgaaataatgatggtccagttttcacttcgctttctatacacgtcgtacgtatgtcaagatgtttggccgtgcaacccctggcggtcaattggtcttggtgttcctaactttgaaaccatacttccacaactgaatcattacgtattttagatgcatattttatccgactcagatatttttcaacgtattgttaacagaaacggcgagtaaaaaacgaaa

SEQ ID NO: 101802 - DNA, 2328 bp, Zea Mays
aatagaaaagcgacggggaaagggtaggaagaaaaaaagagaaaaaaaaacgccggaggccggagggatcacggaatctgagcccaccactcccccgcccccacttgtataaagcgaccccgataccagcccgtcatgggaagaaaaggaaggaagaagggcctcctgtatcctctcacttccctcagtcctcgtccgtctgctccctcctctctctacctagctctagctagccttcctgtagcgcggcagagatggctgcccctgcctccaccacggcggcggcggcggcagcgctgctgctgctgctcctcctgtcgctcgccgcggcggcggacatgtcgatcgtgtcctacggggagcgcagcgacgaggaggcgcggcggatgtacgcggagtggatggcggcgcacggccggacctacaacgccgtcggcgaggaggagcggcggtaccaggtgttccgggacaacctccgctacatcgacgcgcacaacgccgccgccgacgcgggcgtccactccttccgcctcggcctcaaccgcttcgccgacctcaccaacgacgagtaccgcgccacctacctcggcgccaggaccaggccgcagagggagaggaagctcggcgccaggtaccacgccgccgacaacgaggacctgccggagtccgtcgactggagggccaagggcgccgtcgccgaggtcaaggaccagggcagctgcgggagctgttgggctttctcaacaatagcagctgtggaaggcatcaaccagattgttacaggcgacttgatctccttgtctgaacaagagcttgtcgactgtgacacttcgtacaatcaggggtgcaatggaggtctgatggactatgcatttgagttcatcatcaacaatggcggaatcgacaccgagaaggattacccttacaagggcacggacggacggtgtgatgtcaacaggaaaaacgcgaaggttgtcactattgacagctacgaagatgtaccagcgaacgatgagaagagtctgcagaaggcagttgcaaaccagcctgtcagtgtcgcaattgaggctgctggcacagcatttcagctctacagctcgggtatcttcactggaagctgtggaacagcgctggaccatggtgtcacggccgtcggctacgggacagagaacggcaaggactactggatcgtgaagaactcatggggcagcagctggggcgagtccgggtacgtgaggatggagcgcaacatcaaggcgtccagcggcaagtgcggtatcgcggttgagccgtcatacccgttgaaggagggcgccaacccgccgaaccctggccccagcccgccgtccccgaccccggcgcccgccgtgtgcgacaactactactcgtgccctgacagcaccacctgctgctgcatctacgagtacggcaagtactgcttcgcctggggctgctgcccgctcgagggcgccacctgctgcgacgatcactacagctgctgcccccatgactaccccatctgcaacgtcaggcagggaacctgcctcatgggcaaggacagcccactgtcactgtcagtgaaggctacgaagcgaaccctggccaagccgcactgggctttctccggcaacacagctgacggaatgaagagcagcgcatgagaaaacgcagcgtggcattaggtcgtcagcaacctgggtggtcgattagagcccctgcgtgggaaatggtcacctggccccctgattgacgacggaagcatggctcggcggccgctatctacctatatcgattttagtaggtactcactcctgtacataaaccctgcagaaaaaaagagggttcagttgtttatggaaccctggcaaatttgctttcgcgcacaatgtaaaactcagctaagctccccggcgtagctcgacacagctgcgatctattattatttgatgtaatggggactgatattgcaacgaccagcaatgttatactacattcattttcttggacgcgctctgttatgtgtcggcggtgataccctctgatggtttttgtatttggttcttttactaacggagagtggacaatagattctagcttcattgcatcacatcagtggcagcagataccagcacgagtgcacgagttacacgagcccaagaggccagccaactgttggaggtagagatggcaatgggtaaatacccacgacaaaaaaataaccccaccgggtcacccatatacactggtgggtatggatttacccccatacccatacccacgtgggtatgggtcacccgtacccacaaaaattaaacatctatcaaaata

SEQ ID NO: 101803 - DNA, 541 bp, Zea Mays
tgcccatggacttcatgctgcctgcctcgcccgctgtgtgctctctccttctgtcggcggcttcacgggcggactcggtcgatttgatttttttctcggagtcggagctggactcggcgacgagggagtcgaccgagcgggcaggggagctgggatccggaggcagacggggggaagaaaggtcgtcgtcgtggactctgtcgcggctggggagctgccgagctggtcaggtagagagtaaggaggagcaggaaccaaaccaaggcagccaagagagcgtcttaattatggtgacagaggctgattagcagctgctgttgcccggtccttgcctggtttgttggctaaaagaaaccatctaccgcgtcaggtcgcggcacgttgttcgtgcggtgcggatcaaatcaaggggctataaagttttggaggctgcagcttcgtactttaccatccttggtcatcgatcatcgtatcgtgtgactcagagtggtcctgtcgtctgtaggacctcgttcgagactccacgcggtatggtggtggt

SEQ ID NO: 101804 - DNA, 2680 bp, Zea Mays
ccctcgtccccgtcgttccccagatctcctctcgcatctcgcatctcggcgtgccaccaccactccgctccaccgctacactgaaaccaaccaccacgccacggcacgggcaccacccaaacccatccctaaatcccgagccccaaaacccccgtacgcgctcgccgcgccgcaatggcacaccaccgccgcgccccgctcctccccatcctcctcctcctcctcctgctcgccaccaccacggaacccgcggcgcccggcgccgcatcgcactcggagccgacgctgccagtgccgccggtccaagccgccgcggtgccccccgccgcggcgctggcgtcgacgcctccgccggtctcgccctcggccgcggcgctcgcggcattcctcgccaaggccgacccggcctcccgcctgcgcctccccagccccgccgcctcgccctgctcccgcccgggggtcacatgcacggccaccgcccatatcatccgcctcgtcctcgagtcggcggggctcaacgggacgttcccgccgggcacgctctcgcgcctcgccgagctccgcgtgctcagcctcaagtccaacgcgctccacgggcccgtcccggacctctccccgctcgccaacctcaaggcgctcttcctcgcggggaaccgcttctcggggcccttcccgccctcgctcgcctccctgcgccgcctccgctccatcgacctctccgggaacaggctctccggcgcgctcccgcccggcatcgaggccgccttcccgcacctcaccctcttccgcctcgacgccaaccacttcagcggcaccctcccgccctggaaccagtcgtcgctcaaggtgctcaacgtctcctacaacaacttctcggggcccgtgcccgtcacgcccgtcatctcgcaggtcggcgccgccgcgttcgcgggcaaccccgagctctgcggcgaggtggtccgccgcgagtgccgcggctcccacctcctcttcttccacgggggcggcgcgaacggtaccgccgctccccctgtgcagagcgctgctgctagcgacagcgggccgcagcgggagaacctgagcgtgccggattcgtccgtgccaaatgcgaagagagcgagacggaggatgaccaaattggccgtcgcggtcgctgccgggtctgtcctcgccgcgcttcttgtctacgccatgattgcgatgaagaggaacaacaagcggaggcgcccgagcaccgcgtcgtacgagagccccaaccccaagaagagcgcgcccgcgtccgaggtgagcagggacaatgctgacatgggctacgtcgagtgcgtccccgacgaggagacggcggccattatggtgccggaggagaaggcacggcgcctggagcggagcgggtgcctgacattctgcgcgggcgaggcggcgagctacagcctggagcagctcatgcgcgcgtcggcagaggtgctcggccgcgggagcgtggggaccacatataaggcggtgctcgacggccggctcgtggtcattgtcaagaggctggacgccgccaagattggcccagcggcactggaagcagaggcgttcgagcagaacatggatgctgttggccgactgcgccatccgaaccttgtaccactccgagcattcttccaggcgaaggaggagcggctgcttgtgtacgactaccagcccaatggcagcctctactctctcatccatggttcaaggtcatctcgggcaaaaccacttcactggacatcatgcctgaagatagcagaagatgttgcacagggtcttgcttacattcaccaagcttctcggcttgtccacgggaacatcaagtcttccaacgttctgcttggttcagactttgaggcttgccttacagacaattgcttgtcgttcctcctggaatcatcagaagtcaaagacgatgctgcttacagagcaccagaaaacatgaaatccaacagaatgctaacgcccaaatcagacatatatgcttttggtgtcctcctccttgagctccttagcggaaagccaccgcttgagcattcagtcttggtcgcaagcaatcttcaaacctatgtccagtcagcgagagaggatgaaggagtggacagtgatcacatcacaatgatcgtggacatagccacgagctgcgttcggtcctcaccagaaagtcgacccgccgcctggcaagtacttaagatgattcaagaagtgaaggaaaccgatgcaactggtgataatgacagtgatcttaccagcaactcctagttgcctgtgtgggtccatctctggtggatgaatcattcctgctgaacggatgtagactgtataatttgaagtgagggtgaaccctagataggaccgtaggagagtactgcaatagcataaggatctctatgttcggtgtggtttgagctagggatgctgtaacatattataggatttcttattgtcagcaactcagcatgttctggtctggttctactagtggcagttttagcaccagtctgttgtgtgaaagtttattagattgatagtagtgaagccacaaaagctgtgtgaagactgaagatctggttttaaattctattaccagcaagtattgtgagattttcatgaaatgattagttggggatggaacggtgaatataactgtcttttctgttct

SEQ ID NO: 101805 - DNA, 1015 bp, Zea Mays
cttgctgtccgtcattactcattgcccaacaccaacagcagctgctcggtcgtccgcgctcgcaaccggggaaggccgcacccgcgaccgcgagccgcgcagcccaacctacccgaccggcaaagtgacacagcgacgtcgccgtcctttacttaaccctccacccacagcgattcccgcctcgtccaccagctgagctgagctgcgcccgtttttagcgagcgagacaggtccgcgcgcgcgtgcgccggcgaggattggattggaaccgtcgcccgtcggtcgtcgatggggatccacctggtggcgttcgtggcggcgaggggcttcctgcaggtgttccaggtgtcggcgccgctgctgtggccgctcaacctctggctgccgctcgcgcgccacctgcccgaggcctgcgccgccttctacgacgccctcgtctcgcacgccgccagcctgcgcgccaccgtccggcgccgccgacgcgacagcggggacgccctcgacgagtacctccgcagcgccatcatgctaaccctctccgactgagactcttgagccgagcgcgcggccaccggccagtgccaggcaacggccagtaccggaggcgggcgtgcacaggccggccgcccggcgcgcgctgtgatgtgagtagccatagctaggatctgtgttatctcgtttgtttgtttgtttttcccttggctcgctcttcttttgctgcttttcggtcggtgcctaatctagctatctactactagcactagctagctagcatctcaagactgagctccgtatggtcaatttgtaatgctcgtctgtgactgaactgaagaacaagaccattttaatcggcttcttgcttccagcaacaacatctactatgttctacagtctacacatgtaaacgtctgcctgtgcagtgtgtgtacgtaggagtgcctcaccatcactgtttcagattgttttctttcttgcaacgacgggatatatgccggtagtctctggagaaattatc

SEQ ID NO: 101806 - DNA, 2599 bp, Zea Mays
tagataacggatgggtgaaaatacactcttgcagtacacgtcagaggcaaccgtggggtcctttctttcttatccaaaaccaaaaccagcgaaaccaccggccccgcccttgaccaaaactagtccgtcagccggtggctcccgctcccctcgctgccgctcgtaactggggaaggccgcaaccccctcgggcaggcagcggctacccccaccaccaccagtgcaccaccactccaccagcgtggcagcgacgttgctgctgtcggcccgtacgtcctggcgtgtccttggcctacttaacccgcaaggacacgccgccattccgcagggcgagctcaagcctcaagctgggattggcccgtcggcagaacaagtgcacgcgggaccgggcaacatttcccgctgcagccaacaagcagagggggcgacgatatatagccacgggcggccgttgctggatccggcatcttcctcgatcggcaagacgataggatggggttccacctgctggcgttcgtggcggcgaggggcctcatgcaggcgttcaacctgtcggcgccgctcagcctccggctgccgctcgcgcgccacctgccggaggccctcgccgtcctgtacggcgtgctcgccgcgcaagccgcgtggctcaacggcgccctggcgcgcggcgccgcctggagccacagcgggagccggggcggcgtcgacgagtacgtccgccacgccatgctcagcgtctacgactgagaccaccggcggaaggtcgacggacagcaggcgccacgcgagggcgcttctagctgctgtccctgcccccgtcgtgctcgtggtggcaagtgcacgccgcgccggcgccggcgccgccctctgctagctagcggcgactagcagcgtagatctttgtaattcattgctcgctcgctcgtttggcgttccttcttgttcgtagcatgatttttgatagcatcgaaaaggtttgggaggttgctctctgtaacatgcaattgcaagccgtcggtggtagctagtggctggtaaattaaatacaagtgatgaattctgttagactgaattttctcgtcgccagccacgacgcattgatatatctccatgtgagcagctcgctcgctcctcctcgatcgggtcgccagaaaaacgctgggaagcccgaaaatgcgaccccatggtccatggacgacagcgaagttggtcatggtgcatgtgtggattgtgtgggccggggctcaaatgtcacatcttgtgcaaatacctgatccgtcctgcacttgcctgcgatacctcgtcatcatatatgaaccagctgattagtagcttagttgattagtactccagaacctagtgttgcttaattagatagctctttacgtccaagctatatatctgcgagagaccaaacaaaaaaaactatactgctggacccaggtgtgtatatatataatctctggtccagctataatctctggtccagcatgtgagttgctgacttatccgtgttgagaactacgttaccacggatcaccagatccgcacccttccctcccgtcagcagtagaggcgcaagaagatgtagagaacccgtctcccttcccataagcacgacagtggaaacacacgagacactggatatagggttgggcctctggcctctttctgatctatcatatgatggggtgtacaggttccttatatagagatgtgagacccctcaggggcagagccggtatttgcccacataaccctaactagggttacttaacactcccccttgggcgaataccgcgaccaacacatgcctcgttaaaactccgaaaaacccagtgggaaaaatatggagaaagagtgcatggtgatacaaattgcatttgcactttgttgcctcgttaaaaacctcatgtgagaaacttcaagaaaactcaccaagggaaaaagagtacaacagctgtcatcgggacagatttcgatcctctgggatctagattctatcgaatcttctacaagggctaactttagaaatgtgctccccctgatccttgcaaaaccgtatcaataaagcaaaacatcttcttctggaagtatatgcacataaagatttagcaaacggattgcatatccttgcaaagattatttcaggaacttcacctcaactcacttctaggatacatgaggtaagtgcacgtatcaacataaataagccacttcaactagtggtgttcgatcgaccagatctacatatttgatagaaacttccataaaggttcacatattgatcatcaagctgacgccttcagggcatagaatatgacatttattgtttcacggttgtgatcaatataagcattcgctccccctgacgatgacatctgtcaaagtcgttatccctcattactcaagcatattcttcaagatatatgtctcattgttcatctggaataacgagaatggatgaggttgaggtgctatcattttctatcttacaccacaatttatacatagttgtgcaaagcaaataacatgtccttcaataggacttaggggataatatagttgcaatagtacatattctaaatatgatacatcg

SEQ ID NO: 101807 - DNA, 648 bp, Zea Mays
aaagatgcaaaacgaccttctcctgtcctgcatctgcatgcaataagcagccgctttagtgctgccgtgcagagagtacttccatgctgctcctggccgtgccggccgtgctggccgggttcctcaaggcgttccgcctcgccttcctgctttggccgctcaacctcgcgctcccgctggcgcgcgacctgccgcgggcctgcatcacggtccgggccatcgcgtccttctacgccgccgggctgcggggctacgtcgccggcgcccgccgcggggtgcagctgctgcatgcgcggagacagctgggccagcagcaacagcagctcgccgcctcctcctcctcttcttcctcctcctcggcgctcggcgtggcgtggacgcgtgaggatgccgatgtcgtcgcccatgccatgctcgccttcgacgacatctactgatgatctgcaaggggatcttcttcgaacggttatgttagcgtgccgttatatctcttggccgctcctttggttaattttagcgtgcgtaattaaggatcatagcttcgttcctccaaacatatcctgtttcctcagaacttttctagtcgcgtggccgctttttggtcctctctctcgctcgttttctgcatatatactctattctttttcg

SEQ ID NO: 101808 - DNA, 2638 bp, Zea Mays
atggcaggtatcgtatggttaccacagcctaattcgtgtcttataataataagtacaagcacgccgttatggtcggccattcaagctcctacgcccttcatctgggaagcgatccgcgctgccctcccggacatcaatcttgaagtgctcccctactcgcttggctccttgcttgttcgctttcagtcggcgggcgaatgtgctgctgctgtgggtcgctcccccttgttgcacaaagacgctgtgatcactctggtacctcacgacgggttcagctccaagcgccgggtgggggtgcaagcggccctatccgtcctcgggtttcccctggcctactggcatgaggacctccttcgcctggccttcctgtccttcggctccgtcgtggaggtggactggcgctgcacctcgggctatgactactcctccgtccgggtggtagtccaggtggacgacgtctctcgcattcctgctgaactgcgacttcgcgatgcttctactggcgactgctatatctgccagctgcagctgattacctcttggccgattccagatgcttgtgcccccctcgaaactccccgtcccttttttgtcttgccgacttcgcaacctctggtaaccccaccagcttaccacgttgcgcagccctgcctgctccccctgtccgcatacccatctgcacaccaagcccactcccgccctcaccactgcctctctgtttctacactcaccaccaccccccacgtctccatccttgcgcgtcttgcttctatgattcccgcagcgacccttcttcagccctgccgtgctcctctccctcgcctccctgctctccccattatcataaagctttgtcatctccccatgcttgctgttgcagacccccttgctgccgccctcccccctcttcctgacatggccgctgcgcaaaactcccctgtcgcggagtgtaaatcgcctatccccatgtcctcccttgaacctgaccctattcacgaggcctctgctcggaagatccgtgtccgcgccaagcgttcggctgatcatgcagccaaatacaagggtgctggccaactccttgcttctcgccacagcgagcgcttgcgcgcgaaggagcctgctcactatgtcgatatgtccaccaaagcatcgcggctgaaatctctgaaggatgaactagcaaactgctccaaggaactcaaggttcaggttaagcgccgtggtctgctgcgcaaccgtactttgaatgctgctgatctaagggcgctcgctggcacggtggccctgtcggcgacagctacagctgagctggaacaggtgcttggacattatgcatgattgtcaccagctcctgtgccctgccgaggctaggctcgtgttctcctagcaagttctcctttgcatcccatttcttacactgtatttccctgttcgggctcgaatattttgttctccacatgtatgccgatgtttccacacacccccctctctggacgtcgtgtatgtttgtcttatgaactccaaccgcaatattgtcattgtctcttggaacgttcgcggtcttggccacgaggataagtgtgcagctgtgcgcgatgtgttcgctacctgccatccctcgatcgcatgtgtccaggagaccaaactcagtgacattccccccaaaaaattcaaatccttccttcccacctctctttctgctcatactttcctccccgccaatggctcccgcggcggcattgcgactgcctggaacgcctcccatttctcccttgtctctgtctccaatgcaacctatactctctctaccgtcctttcttacaacttttctgatatcacctttacccttacaaacgtatacgctcctgctgaccacctctacactgctgccttcctggacgagcttcgctctctcgccaactcaatttctggtccctggatgataacaggtgactttaatcttattcgcgacccctctgacaaaaacaatgataactttgatgtctccttagcgagcgcttttaacagtaccattcatgatttatctctagtcgagctcccactccttgatcggcttttcacttggtcaaacaaacgtacgtctcctgttctggctcgacttgatcatactttcttcaatggtgaatttgagtctactgcacccaacacctccctcacctccctctctcacgccacctcagatcacacccctctaaaaatcaccatagacacctctatccccaaaactcgctgcttccgttttgagaatgcttggctccataacccctccttcctccctgtcattgaaccggtttggacaacagttactaaccatgcaggttgtgccacgggtgcatttgtcgctaggttaaaggacacccgccgtgtcgctaaggtttggtccaaacacaaccacactccactccttatcaataactgcaaatttattataaaactgcttgacctgcttgaggagaggcgtcttctgtctacaggagagatggtcctacgtgctcactgccgtgaaaagctcttgcagctgatcaaagctcgtgctgcgtactggaagcaacgtggaaaaatcaaagtcgtcaaagaggcagacgagaacactaagtttcaccatgcgtatgcctca

SEQ ID NO: 101809 - DNA, 3563 bp, Zea Mays
atggcaggtatcgtatggttaccacagcctaattcgtgtcttataataataagtacaagcacgccgttatggtcggccattcaagctcctacgcccttcatctgggaagcgatccgcgctgccctcccggacatcaatcttgaagtgctcccctactcgcttggctccttgcttgttcgctttcagtcggcgggcgaatgtgctgctgctgtgggtcgctcccccttgttgcacaaagacgctgtgatcactctggtacctcacgacgggttcagctccaagcgccgggtgggggtgcaagcggccctatccgtcctcgggtttcccctggcctactggcatgaggacctccttcgcctggccttcctgtccttcggctccgtcgtggaggtggactggcgctgcacctcgggctatgactactcctccgtccgggtggtagtccaggtggacgacgtctctcgcattcctgctgaactgcgacttcgcgatgcttctactggcgactgctatatctgccagctgcagctgattacctcttggccgattccagatgcttgtgcccccctcgaaactccccgtcccttttttgtcttgccgacttcgcaacctctggtaaccccaccagcttaccacgttgcgcagccctgcctgctccccctgtccgcatacccatctgcacaccaagcccactcccgccctcaccactgcctctctgtttctacactcaccaccaccccccacgtctccatccttgcgcgtcttgcttctatgattcccgcagcgacccttcttcagccctgccgtgctcctctccctcgcctccctgctctccccattatcataaagctttgtcatctccccatgcttgctgttgcagacccccttgctgccgccctcccccctcttcctgacatggccgctgcgcaaaactcccctgtcgcggagtgtaaatcgcctatccccatgtcctcccttgaacctgaccctattcacgaggcctctgctcggaagatccgtgtccgcgccaagcgttcggctgatcatgcagccaaatacaagggtgctggccaactccttgcttctcgccacagcgagcgcttgcgcgcgaaggagcctgctcactatgtcgatatgtccaccaaagcatcgcggctgaaatctctgaaggatgaactagcaaactgctccaaggaactcaaggttcaggttaagcgccgtggtctgctgcgcaaccgtactttgaatgctgctgatctaagggcgctcgctggcacggtggccctgtcggcgacagctacagctgagctggaacaggtgcttggacattatgcatgattgtcaccagctcctgtgccctgccgaggctaggctcgtgttctcctagcaagttctcctttgcatcccatttcttacactgtatttccctgttcgggctcgaatattttgttctccacatgtatgccgatgtttccacacacccccctctctggacgtcgtgtatgtttgtcttatgaactccaaccgcaatattgtcattgtctcttggaacgttcgcggtcttggccacgaggataagtgtgcagctgtgcgcgatgtgttcgctacctgccatccctcgatcgcatgtgtccaggagaccaaactcagtgacattccccccaaaaaattcaaatccttccttcccacctctctttctgctcatactttcctccccgccaatggctcccgcggcggcattgcgactgcctggaacgcctcccatttctcccttgtctctgtctccaatgcaacctatactctctctaccgtcctttcttacaacttttctgatatcacctttacccttacaaacgtatacgctcctgctgaccacctctacactgctgccttcctggacgagcttcgctctctcgccaactcaatttctggtccctggatgataacaggtgactttaatcttattcgcgacccctctgacaaaaacaatgataactttgatgtctccttagcgagcgcttttaacagtaccattcatgatttatctctagtcgagctcccactccttgatcggcttttcacttggtcaaacaaacgtacgtctcctgttctggctcgacttgatcatactttcttcaatggtgaatttgagtctactgcacccaacacctccctcacctccctctctcacgccacctcagatcacacccctctaaaaatcaccatagacacctctatccccaaaactcgctgcttccgttttgagaatgcttggctccataacccctccttcctccctgtcattgaaccggtttggacaacagttactaaccatgcaggttgtgccacgggtgcatttgtcgctaggttaaaggacacccgccgtgtcgctaaggtttggtccaaacacaaccacactccactccttatcaataactgcaaatttattataaaactgcttgacctgcttgaggagaggcgtcttctgtctacaggagagatggtcctacgtgctcactgccgtgaaaagctcttgcagctgatcaaagctcgtgctgcgtactggaagcaacgtggaaaaatcaaagtcgtcaaagaggcagacgagaacactaagtttcaccatgcgtatgcctcacaccggatgcgccagaatcagatcagagtgctcgagcttgatggtgttcgctgcacgagccatgtggacaaagccttgattctggacaatcatttttccgccttgcttggagcaaacatagagccagtttgggattttgatgtctttgcgatgtacagcaccttgccgagagttgaccctgagccgctaattgcgccattcactgaagctgaagcacatgcggcagtcaaagccatgaattcaaatagcgcccccggtccggatggatttggccccagcttctacaggcatgcctggcattttgtcaagcctacagtcatgaaatttctggattcctttcatgggggtgttgctgatttggagcggatcaaccgtgcgtatatcgtgctgctcccaaaaactgctggtgcagtggccccaggttcgtttcgcccgatttcgcttcaaggatgcccggtaaaaattgtggggaagatcatgacctcccggctccaacagcaagtgtcttcattggttgatatggatcaaacaggtttcctgaaaggccggtccatctctgaaaattttgtatatgcaactgagttggtgcaatgttgtcacaagaggcgaactcccactgttgttctaaaacttgactttgcaaaagcatttgatagtgtaagctggaatggacttctcgctgttttacgggcacgcggcttccccactctctggtgtgaatgggtcaaacaacttcaggttactgccaagtcagctgtcctgctgaatggtgtcccaggcaaatggatctcttgcaaaaaagggcttcgtcaaggagacccactgtccccttacttgttcatccttgtcgctgatgtgctgcaacaacttttgactagagattgcgtcatccgtcatcccctagcagcagaccgaccgtgcactg

SEQ ID NO: 101810 - DNA, 642 bp, Zea Mays
aaagcacagagggatagaacgatagacattagacagacagacagacggataggtccagtgcaagcaagcgagccgcgagcgcacatcgtcgtacgtcatccagggaggctcaccgatgcgatgccggtccacgtggcgctcctcgccgcgccggcggtggcggccgggttcctgcgcgcgttccagttcgcgttcctgctgtggcccttcaacctggcgctgccgctggcgcgccacctgccgcgggcgtgcgtcgcgctccgcggcctcgcgtccttctacgacgccgagctgcggcgctacgcggccgccggcgccgggcccgtcccgccgcggagccaccggtacgcctcgctccgcgccgtgcaggggacgcgcgaggatgccgccgtcgcgcgtgctatggccttgctcgtcgacatctcctactgacgcggcttgcttccattcccactccgcgcgcactacgtaccgggcgatcagatcagtcgcgtgcgttctcgctacatccgacctgagtatattcctccgaattttagccttaggagtgtgagagtgaaattcactgggggtcatcagacttgtcctgcgttctcatgtactcctaaaaccagatttaaagtaagccaggctttaaagtaa

SEQ ID NO: 101811 - DNA, 1672 bp, Zea Mays
tttatgattatcccaaccaagctctaatcatacccccttcacccgcaaaatcccaatacaaatactcgcccagcaaatagatagccagagggacggcggagggaagccaagaaaaccacgccaacgaccaaagcagctgtcgataacacggcgtgctacacctgcttgcctgcctgcctgcacaaccctcagcagggccgcaggcgagagagagagagagaggaagagagacagcgcgaagcggcagcggtagccagcaaaggcggctagagctgttgcccatgcaaggcgagtaccggtcttccagcgaggagtcggcggccgctgcagcagccgcagccatggctcctctggcggccgccgcggccgcagcagtgaagatggaggcggagcaggcggcgatggcgagcgcggctgcgccgcagctggggtcggcgcaccagcaccagcaccagcaccagcagatgcagccgcggcggcagtaccgcggcgtgcgcatgcgcaagtggggcaagtgggtggcggagatccgggagccgcacaagcgcacgcgcatctggctggggtcctacgccacggccgtggcggcggcgcgcgcctacgacacggccgtgttctacctgcgcggccggtcggcgcggctcaacttccccgacgagatcccgtcgctggcgccgtcggagggcgagggcgacggcgacggcggggagcccgcgcgcgaccccgccgacggcggcggcggcggcacgctgtccgccgcgtccatccggaagaaggccatcgaggtggggtcccgcgtggacgcgctgcagaccggcatgatggtgccgccgccgcaccaccgggagcgccagaggcaccaccatcaccaccaccaccacctgccgcagctgcggatgcacgccgccgccgcggaggcggcggcggcggagcaccggcaggaggtgaagcagtcgccgcagcggccggcgtggagcgggcgcgtcaagaacccggatctaaaccgggcgcccagccccgagagctccgacgccgagtgacatgagaagcgagcgagcagcagcagcagccaccgcaaaggctcaacgtcaaagacgacgtccgttgttgcgacggcgcccagcgcagcatgccgctgtcgtcttcgttcgtatccacgtacgtacaacggcccagctgacccgcctgcctacccgtccgttctctgcgactggatggtcggtcggcgggcgtcgcggcgagggctttcggtacgtcgtggataagcacgaggggagggcgggcaggcgggaacggaggcggaggcggcggccccaagtggcggtctttccaaatgtcaaaaaggacagctgtaacagtgataagaaaaacaagtcatcatcctcgtctctccaccccccctatctctctctctctctatcctctcgcgcagtagcttgttctcgttccgagtagataagcagcaacgattagtactccactactatgatttttcaaatccaatccgcctaccccacacttgctttactgccgcctgtattccatgattccatcataaaactacccccgccgcccgttcgttcatacgtctcatcggcatcgccccccgcctttgcttaccaacgcagttagctgtcggctagtgcgcaaatccgcgtttagaggtgagccc

SEQ ID NO: 101812 - DNA, 723 bp, Zea Mays
atgttcgtcctgcgaatccagtccgtcgacttccccgacgccgccgtggcagcagtcgccgccgacgaagtcggcaccagcagcggcggcgttaccacctctcgtccgctctccagccaccctcccccctctaccaccacatcgtccatacttactctcgagctccccggcgcaaaccccgtcgcgcccagccgaagccctaggatcctccacacccgcggcgtcatccacctctaccactcgtcgtcctccacttccacctcctcctcctacgcctcggcggtcgcagccacctcttcctcctcatccgggccggccaccccgcagcccgcctccgactcgcacctgcccctatgtcgcggcacgcgcctcctggtgctcgccgttccgacgcgcgtttcgccggaggactttgttcgcttctgcggcccccacctcgagtgtgcagccgacattcgtttcatcagggatgatggagtggaggaccggtacagcgttctagtggagtttgaggaccagagtagcgctgaatggttctacgccgatctcaatggctggaggttctcaacctctgaggtgtcttatcttcttaattgaattctagtttattcgctgatcatatttgagatcgttgctaaattggcgattaactctcgtttccatggtgtagagtgaggtgtgccatgttctgtttatagctgctgtgcagtatacaccttcctc

SEQ ID NO: 101813 - DNA, 1823 bp, Zea Mays
atgttcgtcctgcgaatccagtccgtcgacttccccgacgccgccgtggcagcagtcgccgccgacgaagtcggcaccagcagcggcggcgttaccacctctcgtccgctctccagccaccctcccccctctaccaccacatcgtccatacttactctcgagctccccggcgcaaaccccgtcgcgcccagccgaagccctaggatcctccacacccgcggcgtcatccacctctaccactcgtcgtcctccacttccacctcctcctcctacgcctcggcggtcgcagccacctcttcctcctcatccgggccggccaccccgcagcccgcctccgactcgcacctgcccctatgtcgcggcacgcgcctcctggtgctcgccgttccgacgcgcgtttcgccggaggactttgttcgcttctgcggcccccacctcgagtgtgcagccgacattcgtttcatcagggatgatggagtggaggaccggtacagcgttctagtggagtttgaggaccagagtagcgctgaatggttctacgccgatctcaatggctggaggttctcaacctctgagagtgaggtgtgccatgttctgtttatagctgctgtgcagtatacaccttcctcagaggttgccacaactccaccggctggatccactgaacttccaatgtgtcctgtttgcattgaaagattggatcaggacatcagtgggattttggcaactacttgtgatcactctttccgttgctcatgtgtttcagtgtggaccaattcatcctgtccggtatgccagttttgtcagaagcagtctgaaaattctacatgttctgtttgccaaaccactggaaacctctggatatgtgtgatatgtggttttgttggatgcggacggtatcaagaaggacatgcgaaacagcactggaaagatactcagcattgctattcgctagatttggaaacacaacgtgtttgggactatgttggtgacagttttgtacatcggctgaatcaatccaagagtgacgcaaagcatgctaagttcaaatcaaaaagtaaatattctggggatgaatgtgtaaactgctcgtgcaatgatgactctgatatgggtggagctatgttcagcagcaaagctgaaacaattgtggacgagtacaatcgtctcctggcaagccaacttgaaactcagagagagtattatgagggcctgttgtctgaggctaaaagaaacaaggagcaccagatttctgaagctgctgataaagctgtaagtgataagcttgaagagatgcaacttaagctcgagaatcttattgtggagaaaaagaaagttgcagatatgaacgaaaaactcactaggagccaagacatgtggcgccagacactaagagatatagaggaaagggaaagagcacagttgaagtcgaaggacgaaatgattctcgatctggaagaacagataaaggatttcaaattttccatcaaactgcagaagtcaatagagaagaacgatggtgtcaagggtggtacgctggttccactccctacggtttcagattctggaggcaagggtaaaaggtcatcaagaacaagcaagaggaggaattagtatcctttgctgagtagcaattagtcttgactggaacagacgtatacgaaccttattggcatgtatttactagcctgttatgatgaactacagcgtgatgtttgatttgtcacgaaaattagtacgatcataaactgcttcgaagatttgaacttggatactacatgtggaaaatacaatctaaatcgaagtacagccagttatttcgt

SEQ ID NO: 101814 - DNA, 771 bp, Zea Mays
cagacgtgcagttcattcctgctaagttttctatgtcactattgaaagcaaagtttgtctctgatgtataggttgtatagactttgttagccagctgaaaatgtggttatctctgatgcatccatctgcctaatgttcatgcttgcagtattatgagggcctgttgtctgaggctaaaagaaacaaggagcaccagatttctgaagctgctgataaagctgtaagtgataagcttgaagagatgcaacttaagctcgagaatcttattgtggagaaaaagaaagttgcagatatgaacgaaaaactcactaggagccaagacatgtggcgccagacactaagagatatagaggaaagggaaagagcacagttgaagtcgaaggacgaaatgattctcgatctggaagaacagataaaggatttcaaattttccatcaaactgcagaagtcaatagagaagaacgatggtgtcaagggtggtacgctggttccactccctacggtttcagattctggaggcaagggtaaaaggtcatcaagaacaagcaagaggaggaattagtatcctttgctgagtagcaattagtcttgactggaacagacgtatacgaaccttattggcatgtatttactagcctgttatgatgaactacagcgtgatgtttgatttgtcacgaaaattagtacgatcataaactgcttcgaagatttgaacttggatactacatgtggaaaatacaatctaaatcgaagtacagccagttatttcgt

SEQ ID NO: 101815 - DNA, 2158 bp, Zea Mays
cccgtcggcgaaccgatcacagtcggcgagggccgaggggaggccttttttttttttttgacgcggacgccagaaatcccgtcatgtcaggtcccgccgtcccggcgcagaggagagcgcgagccccgagaagcgcggagcggaattgcaagagcagacgagcagtgtagacaacgggacagccattgacttccccgcctaccctgccccgtcccgtccgtctccgtcccaatcggatccacccgcccgtcgtcgcctataaactctccctcccatccgcctctcgaggggcccggcttcctcccaactgccaccgatttgtttgttcggcttcggccccatctccagtcacccgttcccacttcattggtcgctgctccctccctccacggccgatcccgtgccggcgagagggaccatggcggggaaagggaaggaggtgtacgtggccgccatcgaccagggcaccacaagcacccggttcatcgtctacgaccgccacgccaaacccgtcgcatcgcaccagctcgagttcaagcaacactacccggaggcagggtgggttgagcatgatcctatggagattatagagactgttaaggtgtgtatgaaagaggcagttggcaaagccaaagatggtaaacacaatgtggttgctggtttgaaggccattgggatcacaaatcagagggaaaccactgttatgtggagtaaatccactggccgtccactgtataatgctattgtgtggatggatgctcgcacaagccctgtttgcaggagattggaaaatgagctgtcaggcggtaggacccacttcgtggagacatgcgggttgccaatcagtacctatttcagtgctctgaaattattatggttgatggaaaatgtggatgctgtcaaggatgcagtccggactggtgacgctttattcggcacgatcgacacctggttgatttggaaccttacaggaggtgttgctggtgggcagcatgtcacggattgctcaaatgcatctcgtacaatgcttatgaatctaaagacacttgactgggataagccaacacttgctgtgttaggagttcctgttgagattttgccaaagattatcagtaattcagagaaaatcggtgtggtcgccaaagagttcccgtttgcaggagttcccatctcggggtgtcttggagatcagcatgctgctatgcttgggcagctgtgccagaagggtgaagcgaaaagcacctatggaactggtgccttcatccttcttaacacaggggaagagcctacccaatcctcccatggccttcttagtaccattgcttacaagcttggtccagctgcacccactaactatgctcttgaagggtccattgcaattgcaggcgcagcagttcagtggctgagggacagccttggaatcattcagtcagcagctgagatcgaaaagttggctgaaacagtgccagattcaggtggagtgtactttgtgccagcatttaatgggttgtttgcaccatggtggagagatgatgcgaggggaatttgcatcggaatcacaaggttcacaaataaggggcacattgctcgagcagtgctcgagagtatgtgttttcaggtgaatgatgtcctcagctccatgcacaaggatgctggagaggcaggagaagtaaagagcgcagaaggagagttcttattgcgtgttgatggtggtgctactgttaataatcttctaatgcagatccaggctgatttattaggcagccctgttgtcagaccagctgacatagagaccacagccctcggagctgcatatgctgctgggttggctgcaggagtttggaccaaggagaaggtttttgcaggtttgcacaaggagaacacgacagtcttccgcccgaaactggatgaggcgcacaggaaaaagagggcggattcatggtacaaggcggtttcaagatcattcgatctggctgatctttctctgtaaatttatcctgccagcgctcctctatctggttttggaagctgcaaatgaataaattggtcttcgctgggactaatcttaactgcttgttatttatatataacatcacgatgtttataaaagtgagtacatgaatatcctcagattttcagcaggaagtgtttttctaga

SEQ ID NO: 101816 - DNA, 1333 bp, Zea Mays
cgcagtgctagtgtgctacgcgcagtgagtgaaaccaataccgtcacggcgtcactcatccgtccatccccgcgaccgcaccgccaccgccatcggaccagagtaccagaccaccacctccccccgcaccacgctgccacactccaccggccgcacccccaccccgacccggccaccccgtcacccgccgccgccgtccccaccacagcacaccccggtccgtcccctcccctccccgatgtccaccccgtccgtgccaccgccctgcccgcacctcgccgcgcaccgcctgtcctcacgcccgctgcgcttcctccgccgctgcctgcgcgtgcgcccgctcggccgccccgagatccggcgggacccgcgcgagctcccgcgctgctcgccctgctccgccgcgtccccgtcccccacctcccgcctctacgcctgcctctcctgcgccgccgtcttctgcccctcccacgccgccacgcacgcctccgcctccgcggggcccggccaccagatcgccgtcgacgtcgaccgcgccgagctcttctgcgccgcctgcggggaccaggtctacgatcccgacttcgaccacgccgtcttcctcgcccagtcctcctcgcttctcccctccacctccacctcctccgcctccgcctccgcctccccggccctccgcaagcgccggcgcgtcgattaccgcgcgtgggcgccagatccggccgagttcgcgctcatgacctccgcggaccccaccacctccgcctcagcctccgcgccggcggggctgcgggggctcaacaacctcggcaacacctgcttcatgaactccgtgctccaggcgctcctccacgcgcccccgctccggaactacttcctcggtgatcgccacaaccggttcctctgcccgcgccgcacgcccgtcaggcaccgcgcctcagacgccgacagggtcgcgtgcctcgcgtgtgatctcgacgagatctactccgcggccttctccggggaccgcacgccatacagccccgccaagtttctatataggtctggactctggatctcgcgcgctaatcgcaatggttgatgccatttcgggcctatagcagcatgccttactcctttctgctggatccatagcgtattgggaaagcaaagttaatatttatggtagccaaaatgggttcttgatgagttgtaacgtgggaaagagaatcttgcctgagatgttgggttgtatttcttgcttgcaaagatacattacagtgctatttggattacatgccttgtatttcaactagaccatgatcgtgcagaattgcaaatggaactacttaat

SEQ ID NO: 101817 - DNA, 2614 bp, Zea Mays
cgcagtgctagtgtgctacgcgcagtgagtgaaaccaataccgtcacggcgtcactcatccgtccatccccgcgaccgcaccgccaccgccatcggaccagagtaccagaccaccacctccccccgcaccacgctgccacactccaccggccgcacccccaccccgacccggccaccccgtcacccgccgccgccgtccccaccacagcacaccccggtccgtcccctcccctccccgatgtccaccccgtccgtgccaccgccctgcccgcacctcgccgcgcaccgcctgtcctcacgcccgctgcgcttcctccgccgctgcctgcgcgtgcgcccgctcggccgccccgagatccggcgggacccgcgcgagctcccgcgctgctcgccctgctccgccgcgtccccgtcccccacctcccgcctctacgcctgcctctcctgcgccgccgtcttctgcccctcccacgccgccacgcacgcctccgcctccgcggggcccggccaccagatcgccgtcgacgtcgaccgcgccgagctcttctgcgccgcctgcggggaccaggtctacgatcccgacttcgaccacgccgtcttcctcgcccagtcctcctcgcttctcccctccacctccacctcctccgcctccgcctccgcctccccggccctccgcaagcgccggcgcgtcgattaccgcgcgtgggcgccagatccggccgagttcgcgctcatgacctccgcggaccccaccacctccgcctcagcctccgcgccggcggggctgcgggggctcaacaacctcggcaacacctgcttcatgaactccgtgctccaggcgctcctccacgcgcccccgctccggaactacttcctcggtgatcgccacaaccggttcctctgcccgcgccgcacgcccgtcaggcaccgcgcctcagacgccgacagggtcgcgtgcctcgcgtgtgatctcgacgagatctactccgcggccttctccggggaccgcacgccatacagccccgccaagtttctatatagttggtggcagcatgcatcaaaccttgcaagctacgagcaacaggatgctcatgaattctttatttccatccttgatcatatccatgaaaatataaaggatgatcaacaaaagtcatatgcccaaggccatggggattgttgcattgctcacagagtgttttctggtatcctgaggtcagatgtcacctgcacaagctgtgggttcacatccacaacttttgagccctgtatggacatttccttagacatggatgcaggagataacagttcttttggtgttgcaaacacaaagtcgcatgtgcgcaatggagagcgaggcttggctggcgtgaattccaaggtattaactctaatgaggtgtttggagaggtttacaaggtctgagagacttgatgccgagcagaagttcttctgtgaacactgcaacgagaggcaagagtccctgaagcaaatgtccattcgcaggcttccattagtttcctgctttcacataaagagatttgagcattcgtcagtcaaaaaggtgtcgaggaaagtcgatcactgtttgcagtttcccttttcccttgacatggcaccttacctgtcgtcatctattctcaggagtagatatggtaaccgtatatttcctgcagaagctagtgacgcggacgcagtttcagaagtgtcgtcagaattcgaaatatttgcggtgatcacacatagcggtaagctagaagctggccattatgtgacatatctgaggctaaacaatcattggtacaaatgtgatgatgcctgggtaaccagagttgaggagcataccgtcaggacttctcaggcatacatgctcttctacgtgcagaagacgttttactacaaagcttgtgaaagagcagccacagtctgatctgaagcaaacattgatgacacaactccagaccaccataaatttatttgtcaccgaatcagatacacatgtagtagtagttcgtcaatcgagagggaaaacgggcgccgtatccacagcacagccatggcctgtcaaatcttttcgttctccactgacctgtagttccaatcagagagaaagctttttcggcagatttttttctttacagacagacatctgcccaagcgaagatgcttgaatttatgcattgagttatattgtgctggctaatggatatgttgtggcgatttccttaatactcaggtgcttcaccgtttggtacctgtggtggtgactggcgaggatgctcttaaccagttgtgcttgtgttcaatataaggtggagcaaggaagaggagtataaaacgtggaaagaaaacataaagaaagggaaccgatttttttttaatgtgttcctgtcagcaattgcattcttgttctactgaaggtagagggtttcttgctgataccgattgttgtgtatttgctcccttgcctttttttcgcttggtctttgtcttaatgaatgagctgaaatctatagcagttgtcatagtgcccactacccaccaaaatgtagggcattacagtgctgagatgagcaggaacatgcagacatcatgcgggtcgcattttgccatc

SEQ ID NO: 101818 - DNA, 1691 bp, Zea Mays
acccaaactcgccgtccgcctccgccaccacccccgcccgcgcccatagcaagctcgccttccacgcgcgcggccgcgccagcgcaccacgcctcgcttcgttttcccgttgcttgacgctgaatccattccaccaccacccaggcacggccaggccagcgccagcgcgtcgtccccggcccccgctccgcctctccggtcgcgcccgcctcggggcgaccaccaccaaaatagaaacttccgtgtgtaggtgacccccggctttacccccgcccgaccgcccccaccccaccccgcccacgcctccctccctcccgccgggacaaaaccgccgctcctcctcctccgcccctccccgctctttctgtgaggcgggaagcgaggcggatgccgaggcgacggggctcgcgcaccgcacgcgtgtgcccgccgcccgggggccaggcgaggtggtgaggtgaggccgagcgcggttttaaattgttcacccggccgcccttctcgccgtagttttcagtggtacaagcaagggaggaacgaacgtgagggctgcctgcctgcctgcggacatgggctccagcctcaagtaccgatctggcctgtgcctcatcgtcgccgtcgtgctgatctgggtcatctctgccgaggtcacgcagtatttatcgaatgcagcgcttgcaagaactagtgttgccagtaccacagtgctgtcttcaacttcaggactcttcactcttttcattggtgttttacttggccaagactccataaatgctgcgaaaattattgctgttttcattagcatggctggcgttgtaatgacaactgtgggccagacttgggcatctgatgaatcagaagcaggcaaatctggttttacacagaggactcttctaggtgatatgtttggtcttatgtcagcaatcgcctatggtctatttactgtgctgcttaaaaaattttgtggagaggaaggagaaaaggttgatgtccaaaaactgtttggttatcttgggctttttacccttgttgctctatggtggattgtctggccattaaccgcactaggcgttgagccaaagttttcaatgccccactcagctaaagtggatgaagtggtggtggcaaatagcctaatcggaagtgtattatcagactacttctgggctctttctgttgtttggactactcccttggtggccactctaggcatgtctctcacaattccaatagcaatggttgctgatatgatcattcacggccgtcactattcagcagtatatattcttggttctgtccaggtattttcaggctttgttatcgcgaaccttgcagatcgcttttctcgttctctagggctatcatagtctcataaaacagaacaggcccttattagagcgtgcatcaggaagctccaaggtcgggttggttaggccaatacttcagaaaacctggatcgggagataccaggaattattttccctttgcttctttaaacatagtggaggtgaattttgccgtggtgaatagtgaaaggcagcagatgaagaagaaaacatatgttatagcaaccctttgcaactgtaaattctcttactacaaattgcgcgacagtgtagactgcggccgttctcggcccatgtcaacaggcttgctcgatttcaaatttgcaatgtccttttatccgtgtt

SEQ ID NO: 101819 - DNA, 2090 bp, Zea Mays
acccaaactcgccgtccgcctccgccaccacccccgcccgcgcccatagcaagctcgccttccacgcgcgcggccgcgccagcgcaccacgcctcgcttcgttttcccgttgcttgacgctgaatccattccaccaccacccaggcacggccaggccagcgccagcgcgtcgtccccggcccccgctccgcctctccggtcgcgcccgcctcggggcgaccaccaccaaaatagaaacttccgtgtgtaggtgacccccggctttacccccgcccgaccgcccccaccccaccccgcccacgcctccctccctcccgccgggacaaaaccgccgctcctcctcctccgcccctccccgctctttctgtgaggcgggaagcgaggcggatgccgaggcgacggggctcgcgcaccgcacgcgtgtgcccgccgcccgggggccaggcgaggtggtgaggtgaggccgagcgcggttttaaattgttcacccggccgcccttctcgccgtagttttcagtggtacaagcaagggaggaacgaacgtgagggctgcctgcctgcctgcggacatgggctccagcctcaagtaccgatctggcctgtgcctcatcgtcgccgtcgtgctgatctgggtcatctctgccgaggtcacgcaggggatattcacaaagtacagacatccatttgcagttacttacttgggggcctcccttatggtcatatacctccctttgtcatttctaaaagattttatatacaattcgttgagaaggcattctagaaacactagtgcttccaaaattgcaagcaaatcttcctttggtggtagtgcccctttgaagaatggtgaatttcagaagatgttggaaatggaatcacagaaaactatagtggtaaattgccctgatgtgagcatccctgtagtggaagagacaaaaccactcatatgcggaatcactgaaatggatgatggccttttcaaggacaagcaactttccactaaggagattgcaacgtatggattgtatctttgccccttatggtttgtgacagagtatttatcgaatgcagcgcttgcaagaactagtgttgccagtaccacagtgctgtcttcaacttcaggactcttcactcttttcattggtgttttacttggccaagactccataaatgctgcgaaaattattgctgttttcattagcatggctggcgttgtaatgacaactgtgggccagacttgggcatctgatgaatcagaagcaggcaaatctggttttacacagaggactcttctaggtgatatgtttggtcttatgtcagcaatcgcctatggtctatttactgtgctgcttaaaaaattttgtggagaggaaggagaaaaggttgatgtccaaaaactgtttggttatcttgggctttttacccttgttgctctatggtggattgtctggccattaaccgcactaggcgttgagccaaagttttcaatgccccactcagctaaagtggatgaagtggtggtggcaaatagcctaatcggaagtgtattatcagactacttctgggctctttctgttgtttggactactcccttggtggccactctaggcatgtctctcacaattccaatagcaatggttgctgatatgatcattcacggccgtcactattcagcagtatatattcttggttctgtccaggtattttcaggctttgttatcgcgaaccttgcagatcgcttttctcgttctctagggctatcatagtctcataaaacagaacaggcccttattagagcgtgcatcaggaagctccaaggtcgggttggttaggccaatacttcagaaaacctggatcgggagataccaggaattattttccctttgcttctttaaacatagtggaggtgaattttgccgtggtgaatagtgaaaggcagcagatgaagaagaaaacatatgttatagcaaccctttgcaactgtaaattctcttactacaaattgcgcgacagtgtagactgcggccgttctcggcccatgtcaacaggcttgctcgatttcaaatttgcaatgtccttttatccgtgtt

SEQ ID NO: 101820 - DNA, 2295 bp, Zea Mays
acccaaactcgccgtccgcctccgccaccacccccgcccgcgcccatagcaagctcgccttccacgcgcgcggccgcgccagcgcaccacgcctcgcttcgttttcccgttgcttgacgctgaatccattccaccaccacccaggcacggccaggccagcgccagcgcgtcgtccccggcccccgctccgcctctccggtcgcgcccgcctcggggcgaccaccaccaaaatagaaacttccgtgtgtaggtgacccccggctttacccccgcccgaccgcccccaccccaccccgcccacgcctccctccctcccgccgggacaaaaccgccgctcctcctcctccgcccctccccgctctttctgtgaggcgggaagcgaggcggatgccgaggcgacggggctcgcgcaccgcacgcgtgtgcccgccgcccgggggccaggcgaggtggtgaggtgaggccgagcgcggttttaaattgttcacccggccgcccttctcgccgtagttttcagtggtacaagcaagggaggaacgaacgtgagggctgcctgcctgcctgcggacatgggctccagcctcaagtaccgatctggcctgtgcctcatcgtcgccgtcgtgctgatctgggtcatctctgccgaggtcacgcagggttgtctgcaatagaaaatttctcaggggaatgttatgcatctggcaccattctgtcttgaaaagaacatctggcatcattctgaatccagccgaggcttcaccactggacctggactttatttataccataaagaaacaaagaaaagtcaattcttatgccttctactgtataattctggagttaatgagccaaaaactacatgggatattcacaaagtacagacatccatttgcagttacttacttgggggcctcccttatggtcatatacctccctttgtcatttctaaaagattttatatacaattcgttgagaaggcattctagaaacactagtgcttccaaaattgcaagcaaatcttcctttggtggtagtgcccctttgaagaatggtgaatttcagaagatgttggaaatggaatcacagaaaactatagtggtaaattgccctgatgtgagcatccctgtagtggaagagacaaaaccactcatatgcggaatcactgaaatggatgatggccttttcaaggacaagcaactttccactaaggagattgcaacgtatggattgtatctttgccccttatggtttgtgacagagtatttatcgaatgcagcgcttgcaagaactagtgttgccagtaccacagtgctgtcttcaacttcaggactcttcactcttttcattggtgttttacttggccaagactccataaatgctgcgaaaattattgctgttttcattagcatggctggcgttgtaatgacaactgtgggccagacttgggcatctgatgaatcagaagcaggcaaatctggttttacacagaggactcttctaggtgatatgtttggtcttatgtcagcaatcgcctatggtctatttactgtgctgcttaaaaaattttgtggagaggaaggagaaaaggttgatgtccaaaaactgtttggttatcttgggctttttacccttgttgctctatggtggattgtctggccattaaccgcactaggcgttgagccaaagttttcaatgccccactcagctaaagtggatgaagtggtggtggcaaatagcctaatcggaagtgtattatcagactacttctgggctctttctgttgtttggactactcccttggtggccactctaggcatgtctctcacaattccaatagcaatggttgctgatatgatcattcacggccgtcactattcagcagtatatattcttggttctgtccaggtattttcaggctttgttatcgcgaaccttgcagatcgcttttctcgttctctagggctatcatagtctcataaaacagaacaggcccttattagagcgtgcatcaggaagctccaaggtcgggttggttaggccaatacttcagaaaacctggatcgggagataccaggaattattttccctttgcttctttaaacatagtggaggtgaattttgccgtggtgaatagtgaaaggcagcagatgaagaagaaaacatatgttatagcaaccctttgcaactgtaaattctcttactacaaattgcgcgacagtgtagactgcggccgttctcggcccatgtcaacaggcttgctcgatttcaaatttgcaatgtccttttatccgtgtt

SEQ ID NO: 101821 - DNA, 879 bp, Zea Mays
gccttggatcgatcggtcacgcttcctttccttgctcagctagcttgtgctcctaaagctttgtcatggcggcgtcccgctcgcccaaggccgcgagggaggcggccgccgtggacgccaacaccacgttcgtgcaggccgaccccgcgacgttccgcgcgctcgtgcagaagctcacgggcgccgcgccagcagcaggcgggacgacgacagcgacagcgccgaagcaggaggacgacgacgacgcggctgcggtgaccgtcgcgcacgcgccgaggcggccgaagctgcaggagaggcggcgcgcggcgccggccaggctggagctgtcgccggcgtcgttgtactgctaccaccaccaccacgcccactcccgctacggccacgggctcatcatgcactcgccagtgtcgcccatggacgcctacatggtgctggcggcctccgcgtcgccgtcgccgtcgccgtcgccgtcgagcggcggcgcggtggtgacgataagcagggaggaggaggagcgggaggagaaggccatcgcctccaagggcttctacctgcacgcgtcgccaaggggtggtgacggcgaccggcccaggctgctgccgctgttccccgtccaatcacccaggatcagtgaactccggcgaggctagcaagctagtcatgtgtggctaattcaccgttagtgacatatatatatgcatgtaccgcctatatatatatttgcgctagaacttgatggtgttaaaatttcatggttgcaacgtacgtactacgccttgttagtttttgtagccggtaaatctctagctaattaatcctctgccacatctgaatctggatctaatatataatcacgcatgcaatgtctctcccgta

SEQ ID NO: 101822 - DNA, 1188 bp, Zea Mays
agtactagtactatggaatctgcacatgggaaccatgaagcggcgacggcgagcaaggacaaggtggagtagcaaccatggcacggtcgtcagtaatccgtacggaggaagcaagcttggcagcgaataaagaagaaaggggaagggctcctctctcggcgatcttcttctcaccctttccttttttttgtcgttcacatgcaaagtagggaaaactggaatcacgcaagtgctaccgcgggatgctcgtcggtgttgtcaagagcgacaagccccgccgcgatgcggtgcggtgcggtgcgttgttgaaggcgaggagggctcctcccgacccgacgccgcagcatgcgggggtcgtacgtacatgcacacaaacacaacgaggaaggagcaagcgcggcgcggatacggtcatacggatgtggagtacctttctcttccttcttcctcttgtcgcctttgccgcccctgcccttgccacggccggccttgggggccattggctggctggctggcttctgcctcttccgcccgatcgaccagcgacggccttggagcgagctcgagggtttaagtcgccgccgccgcagccgcagttcccggttgccgcagcagagaaggaggcgcgcggtgcagagcggaggagaggaggcgagcgagaaggaaggaacagggagggggcacacgagggtggagaggatggatataggatgtgaggcctgcgtgggatctcatcagacccacgggtttcagagccccatcctggtcatggcctggcctggactctcgtccgatgcgagggcccacgctggcagccaccgtgacgagggtgttgcgtcgtggcctcatcgacggacgacggctgaggttgccctcgcctcgccccgcagcagctgaaacgggaacggaaagaggcgggagacgtgagcgagacatccatctctcagaggcgtggacgacagacagaggggcatacaatacaatacaattggactcgacggacggcacggcggacgggtggctagcttgtcgtgtccaggccaggccagatggcttacgtagctgggccacggccaggccaggccgccaggggccggagccgtttaattgggcgtcccgttggcctgccagctttggacgctacccacccttgcggccttggccttggccttgccaggggtttgtttt

SEQ ID NO: 101823 - DNA, 3371 bp, Zea Mays
gggtcgcttgatgttcgagtagtactatataaaagacaaacacttgtgtaataggggcatgaacaatttagctatcaaatatcagacaaactcgtcttcctcccagctattcccttctccaagtcttattctcctctgagctcttcctcatcgatcccccttatcaggtgtcgctaacatttggtatcagactaggactcaatctcgatggaggccacgatgcaggatattctagacgcactggcgcgcatggaggcacgcttgaccgatgcgctgatgggtcgctgcggcgagcagtacgcacgcgagcacacttcccccttcgacggatccgcgcctccttcttccatcgtcaacacacagtaccgcgacgaggcaatccttccgcctctcgtccacgacgacgctgcgaaggtggcgtccttggattcgggaaacgactttggcctgcagcagaccgccacggtgcttgcgtccctagggtccgacgagatgtcttcgtcgaccatgcccctcgccggctccatatccgaccgctacattccgccgctctacgacgacgactgctacaccatgccacagccgtttgtcgatactctcgccaaccccgacgatgacctcctccaggagctcgacgtgttggacgaggatgccacgagcgccaacgcggctgacgacgattcaggcgctgtcctcgtctatgcgccgctcgactcgaacatcgacagcagcggatcaccgcgctacccgtgcctccccgagggcgcggtgttgttccatcgggacccggacgagaaggtcctcatcggcgggacggagttgtccggcgaagtccgccgcctccgtttctccttgtcgtcaccagaccaggcgatgaaccccgcgctcgtccccaacaccgacgcagaggaggaggaggttctcaccatcacgcccaccaagtgttcgacaatatacctcaaccgcggcatttactccgtccccaacccgttcctccatcgtcagcacctactccgggactgcgacgacaaccacgtcggagtcgacgtcgacatccttcctacctccgagttcgacgagggtcccatcttcgacgaggagccctgcttccaccgtagcctcctggattcagatccagactctccctacgactgggtcgtccccgtcatcgccgtccacggcagcggcgacactgagctgtcccacagcgaagtcgacaaggtccccgcgaccgccgcgctacccaacctgcgcgagaagatctgctgtcggttcgtcgacaggacgaagctgtcccgccacgtccgcctcatccacttctccctaccgttgccggaccaggtgctcggcatccccaccggcacgcatgtcttcgactgcaccagcgttgacgggaagccgtgtatgcgatcgtacacgccgacgagcaaggaggacgaggttctcgccactacgcccaacgggtgtttgatgaattgcttcatcctcacacagagttgtttctcgcctccggtcagttgcagctgggatgcagtgatgcagagacaaccatggccaccacctatgcaatccaaccgtgttgtgagcatcaccgaccgccacaccgaggagaccagccccgtgcgcaaactggttgccgagatcattggtgtgcttgggtcaaaacacatgagaactgtcacgccgcttcctgacaccggtcaatggctgcttctatcattgatcgagaagctccctcaaagcgtggttgatctactgagagctcatgttatcaatctccatcattatctgatgttgtttagcttgctgggattttcagttctgttcgactgtatcaaagcacctgactcgaatgctatctgtagaggcataacacaggatatgacatatgctgctgttcaagcttacacagatgcatataagcctgattgggaacgtatcaacttcattgtagacattttgagatcgactcctggagaagggccttcgtggtaccatcttttgaagaaagttagtggcggctgcaatgatcttaagaacaacgaacacatgcttgttgttgtccttaccaaacagcaagctattaagataggaggcaacttccagatcgtggagtatttcctggttgaggcaatccaaatccagtcatatggagcagagggcaataccgagctcaacctttcaactggtgactacatagtggtaggggtgtcagatgtccaggtctggtgtggctgcgatctgctattccgcattacagactggcacattccatggcatatcatcttggcggtatcaaaattttccatcggcttgggagccggccgaagctcaagaatgaagaaatgtcagccatatgtccagtcgtcagtcacttcctgtgacaagcaaaagttgtttgtccgattctttggtgtgctctacatagtgttcaacaagatgaacttcatgctgctgttggacgacgattgggagccactgatggataattaccgacctttgggaataaaatctctgaggttcagcacattttctcttggaaatatgtcaccaaagatagaagagcaaaaaattcagtacatcattcataccattggaggaagcttaactgcagttcatggattttttgtccaacttggtgtcaatgtggatacgagtgactgggagcttcaaactctgggaagactttcggttactgtggcaaagcaagccaagctcgaccgcttccccatcaccattagtgatccaatctcagctacgttcggtgaaccatttgagaaagccaacccaagccattcctccacagcaatcgtttgtcgagctggttcaggaattggtatggctgtttgccttgtttcttctagtctaggtgttgttgctagtggccaaggcaatttcaaagtcttagtttgggatcctggtggttatgcatatcacagcttggggacaagctgtatttcaagcggtggggaatgtcagcatctcagacaggagcaatgagcagacaacgagaacaagccacgacatgcgagagtccatcgtccaaacgccaaggttactgagccaatatgggctaagtagtgggtcagctatctatgggtcgcttgatgttcgagtagtactatataaaagacaaacacttgtgtaataggggcatgaacaatttagctatcaaatatcagacaaactcgtcttcctcccagctattcccttctccaagtcttattctcctctgagctcttcctcatcgatcccccttatcaggtgtcgctaacacaaggaccctagattgtttttgtgtgtgtgtgtgcgttacaaaaagacttgctaccagctcgaacctagcagcagcttcgagaacctgtttgttt

SEQ ID NO: 101824 - DNA, 105 bp, Zea Mays
aaaagagagagagagatagtcaggaggggcggccagggcccctgctatgtgtgcgacaccgacaataatcatacaaaaagcttctgtaaaacatgctagaaacgg

SEQ ID NO: 101825 - DNA, 756 bp, Zea Mays
aaggttataaaaagagcacgagatgcgtagtcgcgctcgtaacgtgcataccatttgaacgccgagcgatcgagcacgttagagggtagaaccgtaggagtaatggcaacccgccgccgacaagccaccgcggccgccactctcgcgttcctcctcctcctctcggtctcggccgcgtcgccgtcgtcctcgccgccggccgtgctgacggcggcggcgacgtcgcgcaaggtgctgcactggaagcagctgggctaccccgccaccagcctgttctgcccctggaacgcggtcaagttcggggcctgcgtcggcgtgctgggcgccgcggggctgcagggcggcgcgcagctcgggagcaagtgctgcgacgtcgtgcaggggctcgcggcggccgaggcgggcgcctgcttctgcaccaccgtcaaggaggccgtgctgggagtccccacggagtgggacgtcggcgtcggcgtcctcgccagcgcctgcaagacggagttgcccgacgggttcaagtgtgtttgatctgatgatggcctggccgccatgcatgcgcgagtgcagtgcatgcgtcaggctccggcctgtgccggtgcacttgctgccactgccattgcggaaccccgaatgtttactgtacgtgttaccgaatgagttgtaaatttgtttgaattgttctgcatcaggtaaagtgtctagttaacttgttgtagaacgtatgtgcaccgaatcaatttggttggcaatctggtc

SEQ ID NO: 101826 - DNA, 96 bp, Zea Mays
ctgatcaaaaaaaatttgacatgatttgccttttattatctccgatctttatgtgcgattctgatcagtattttttaggaaaaaaatagcaaacgg

SEQ ID NO: 101827 - DNA, 1852 bp, Zea Mays
gccacacacagtacgtacaagcctcatcagctcgctagcatagcagcaaccagcaatggactccaccaagttatccgcgctgctggcgctcgccatgctcgcgctctcctcgtcgccgctcgctctcgcgtgggagaaggcggagccggaatgccactcgtgcgagtccggctcgccgccctcgaccggcgtccccctgcccccaatcagcataccgtcagtcccactgccccctgtcagtataccgtcggtccccatcccaccggtcacccagctgcccccagtcgtcggactgccgccggtgacccttcctcccattccgatcatcggaggaagcccgccgaagaagggccaccggaaggcgtgcccgccgcctccgtctcccccgacgcccacgcccacgcccacgccgtcctcggacaagtgccccatcgacgcgctgaagctcggcgcgtgcgtggacattctcgggaacgaggtgcacatcggcgacgccaacgtcaagtgctgcccgctcgtgaagggcatcgccgggctctccgcggcggcgtgcctgtgcaccgccatcaaggccaaggtgctggacatttccgtctacgtgcccatcgcgctggaggtgctcgtcaactgcggctgcgaggtcccgccaggctacaaatgcacttaaacgactccattccatttcatcccatctcaccatgcgtgcacagcgaggtctccttttgccctcccgaatgcaaagtttgaaaggctcgtcgacggatttgggtctccttttgcccacccgaatgcaaagtttcgaaggctcgtcgacggattgggctcttcggctactgcattcttccttatttcattcttccttagtgtcttctcaaatgtcactttgtactttgtgtgaacctgtatcaaactttttttagttggattcgattattgtttgaagtgttaaattaaggcgcattgtcatcatcatttattcaaatcttgtgcgaaaggatctctagctaagttgttaggtgcatgtggtctaagtagcacttcttaggtcttagttgtttttatgggttgggaattcggatgcggctgtatatgaatggagcgaaaccggggcgcttgatgattcaattcagaacaccgctacaagcgatgtagttctgaactttcgtatccagcaaacgtgtcagagcccccacgtaactgtgtatgcagcgcaagagacttcttcgacacaacgttaagaaatttctaagcatcatatatataatccataagggtagcattatttatgtacaaatcgattgaaaccacctgtattttatccttctaaagtcggagatacctatcgagcactgtagatctttgcaatctaagaactgctaggagcagcctccagtaagctcaagtactctgcgatagcctgtccttcgttactgacatcaatatcgtagtcatccaaggcatcccccttcagttcattggcaagctcactttccatcgacgcatccctggctggaactggatgagagtttgcgtcttcatcttcatcatctacagctacttcaccaatcataatttcatcttggtttgcaatttcttcattgttcattggaggagcatctccatctgcagcatgtggaggagcacctccatcggcagcatgtggaggggcatctccatcagcaggatgtggaggagcattatcaagagtctgagaattgttgattgctggagcagccctggcaacagctgccctggaacgcgaggatcctgcaccaaaccctggcaagaaagaagataacagataagggagtgggaattcattactccaattgatttgaggccacaaagtttt

SEQ ID NO: 101828 - DNA, 2178 bp, Zea Mays
gccacacacagtacgtacaagcctcatcagctcgctagcatagcagcaaccagcaatggactccaccaagttatccgcgctgctggcgctcgccatgctcgcgctctcctcgtcgccgctcgctctcgcgtgggagaaggcggagccggaatgccactcgtgcgagtccggctcgccgccctcgaccggcgtccccctgcccccaatcagcataccgtcagtcccactgccccctgtcagtataccgtcggtccccatcccaccggtcacccagctgcccccagtcgtcggactgccgccggtgacccttcctcccattccgatcatcggaggaagcccgccgaagaagggccaccggaaggcgtgcccgccgcctccgtctcccccgacgcccacgcccacgcccacgccgtcctcggacaagtgccccatcgacgcgctgaagctcggcgcgtgcgtggacattctcgggaacgaggtgcacatcggcgacgccaacgtcaagtgctgcccgctcgtgaagggcatcgccgggctctccgcggcggcgtgcctgtgcaccgccatcaaggccaaggtgctggacatttccgtctacgtgcccatcgcgctggaggtgctcgtcaactgcggctgcgaggtcccgccaggctacaaatgcacttaaacgactccattccatttcatcccatctcaccatgcgtgcacagcgaggtctccttttgccctcccgaatgcaaagtttgaaaggctcgtcgacggatttgggtctccttttgcccacccgaatgcaaagtttcgaaggctcgtcgacggattgggctcttcggctactgcattcttccttatttcattcttccttagtgtcttctcaaatgtcactttgtactttgtgtgaacctgtatcaaactttttttagttggattcgattattgtttgaagtgttaaattaaggcgcattgtcatcatcatttattcaaatcttgtgcgaaaggatctctagctaagttgttaggtgcatgtggtctaagtagcacttcttaggtcttagttgtttttatgggttgggaattcggatgcggctgtatatgaatggagcgaaaccggggcgcttgatgattcaattcagaacaccgctacaagcgatgtagttctgaactttcgtatccagcaaacgtgtcagagcccccacgtaactgtgtatgcagcgcaagagacttcttcgacacaacgttaagaaatttctaagcatcatatatataatccataagggtagcattatttatgtacaaatcgattgaaaccacctgtattttatccttctaaagtcggagatacctatcgagcactgtagatctttgcaatctaagaactgctaggagcagcctccagtaagctcaagtactctgcgatagcctgtccttcgttactgacatcaatatcgtagtcatccaaggcatcccccttcagttcattggcaagctcactttccatcgacgcatccctggctggaactggatgagagtttgcgtcttcatcttcatcatctacagctacttcaccaatcataatttcatcttggtttgcaatttcttcattgttcattggaggagcatctccatctgcagcatgtggaggagcacctccatcggcagcatgtggaggggcatctccatcagcaggatgtggaggagcattatcaagagtctgagaattgttgattgctggagcagccctggcaacagctgccctggaacgcgaggatcctgcaccaaaccctggcaagaaagaagataacagataagggagtgggaattcattactccaattgatttgaggccacaaagtttttggagatctgtgttgacccatacataccacaagatgcccggcttctccttgcctgaattttactctgcgattaaacataatgtgttagcaactgtggagtagcttgttacgagtaaaagaacaacgggggtgcagagaaggcatacttgtaggatacagttttgttcaggatttgtcaaaaggtctaatgctttgtcagcatcattttcatttatgcgcagtgcttctgcagcaagatacttctcaaatcttgaaggttgaaacaatcggtcagtaatagacaggaaatacaggcagtacaaatcatcgcccatgtaaagaaaaat

SEQ ID NO: 101829 - DNA, 2450 bp, Zea Mays
gaaagcgccctatcgggcgctcaaccattcaaatatatatcaagatcgataaaatcatattatacaacgaacatgtcaaactctctaatacaacgaatatgtcaaatactctacatgtcagatgagaggggagtaattacaaataggtaaatagagcattctgaagaaaaggcaatgaccattatttggatgaagtgactttcccctattgcttgcaatctatgaatgacgatcagctgtcgccttcagtgaatacccctaaagaaacctggagatagtttaaacaacttcaaaaaaataatatcaccacataaaatgaataaatctttatgagcttatgtttcagtacatatgaactcctgcacattcttagcactataatcttccttgaagaacacataatatatagtaaacaatccccaactactaatgaacagccagaagaatattgaacaatgcaaggaatcaatctattagttccaaacacaagcttatggtttcccaatctatgataatcataggaggcagctgaagcttatggtttagggtttaggaatcaatctatagtaaacaatccccaatctattaggaatcaacctaaaggcaattatggtactatggtaaaaactaatggtttgatttgaaatcaacaccgaaaataggcctttgaattcttgtcttacattcttttaaagacctgatgctcctcaattagttatgcaaattgagaatcataggaggcagctgaagcagtcagtaacaaaatacaaaaccaaaaaaaatccagaacacaatgattcatccaagacatcataatcatcgttctcacatgcataagtataattgtatgatcaatgccttcaacggtctcgagaagagggtcacttttttgttgctggatggccaggttcaacacatgcccattttcggggttctgggacggggatggaggcggcggctaggtttttgggacgagtgggatcctaggaggagacaggagcagtggcggaggacaggccaaaatttagctgttgataacgcaacaatgaaaaaaatttacaacacagtctaaacatagctacaaaacaagtgaaggaaattaaaaaaaatcttattcataatagcgaataaaatctaagaaagagaaaatgagttaataatcacaaaataaagtaaaaagtttgttaaacaagtgaaataaaaaagagtctagtgaaataaagacttgctcaaaatccagacacacacgcatcaattagatttttattcagcttttccctccccctctctatctctgtgtatgtgtgtgtctcagacaattttttgcttggcttttgtatattacagaagcagcactcacgctcatctctctcgggtatgactcagcagtaagcaccacatcccttaatgcgatgtgaagccgcatcccctatctctctctcctccgtcggacacagagccataacctccaattcaccatacgagttagccattgcctcatctgtttcggtactcggtaggggcggaacgtggcagggcttgggcgctcgacctaggcaggggacagggcacatctcagcgtggcagagccggccgctcggcagacctcgggacgtggcgtcggggaggagctcaatggtgttgtgcggcgcgaaagcagaacagacggagctcagctaacttgggcagcgctggtgactcgggaggctagagatggatgtgacgacaccacaacggtgctgagtcttggcgtctcaacggaggcattttaacaattaaacatgatagaaaaaacttgttctagctcacaatcacggcaccacatagagaccatcatcaccaaatgtaactcatgaattcactccccactaacagacaaatgggaagaggaggtgtgcgaaaagggatcagcaggaggaggccttaccacgtggcagttggtctcaaacttgtcgaggagatctgacgcctgcgcgggagagacaacacaaggccagtcccgtccgcgagcaggaaggcagatcgagatcaaaagggaggcgaagaggggaggattgggggaactgatttcctggtagaagaggtggcggtggaagttgagcgccgtgtggtaaagcaggtgcacccacttcttctgcgccgcccgccgagccaggccaggtacgctgccatcgatgccatagacctcgtcgccactgctcctttctctctctcctctcgctacagcggtcgagctggagaataggaatcagattcggacgggatccctccaccaagttggtctacgcggcggtggcgtggcagatctgctccaagccgtgaaaaccggcggagctgcgtgctgcggcgacgggaggagggagggggaggcagagggagctggcgaggtagtttgggctggtgtctggtggtggaggaggcgagcgaagcaatcacaaagaagaaagcgc

SEQ ID NO: 101830 - DNA, 198 bp, Zea Mays
atgaatgacgatcagctgtcgccttcagtgaatacccctaaagaaacctggtggcagttggtctcaaacttgtcgaggagatctgacgcctgcgcgggagagacaacacaaggccagtcccgtccgcgagcaggaaggcagatcgagatcaaaagggaggcgaagaggggaggattgggggaactgatttcctggtag

SEQ ID NO: 101831 - DNA, 876 bp, Zea Mays
atggcggctagcggcgagctccccgtggtggacctggcgcctttcttcaccgaagacggcaagggctgcatcgccggcgccagcgaggccgtgctccaggcatgccagacgcacggcttcttcagcgtcgtcaaccaccgcgtgccggttgagctcatggcgcgcgcgctggagctgtcggccgcgttcttcgcgctgccgaacgaggagaaggccaaggtccgggcggccgaagggtccaaggtgcctctcccaggcggttacggacggcagccggcgcacgtggccgacaagaacgagtacctggtggtatttgacccgaagctcgggctcaacgcgtaccccgctggtcctgctggattcagagagacagtggaggagtgctacagcaagttcaccgaactgggattgctcatccaagagatcctgaacgggtgcatgggcctcccaccgggcttcctcaagaactacaacgatgaccgcagcttcgacctcatgacggtgaggcgctacttcccggcggcggcggaggagagcacgagcatcggcttcagcgagcacgaggatgccagctgcatcactctcatcttgcaggacgatgtcgggggcctcgaggtgctgagcaacaacagtctgaagagcgcgacgcaccgggtggtgaggaagcccgcgcacaggcactccttctccttcttcttcaacccgcacggagataggtgggtcgaaccgctgccggagttcacggccaatatcggcgaggcgccgctgtacagggggttcctgtacaaggagtaccagcagctgcgcgtgaggaacaagacacatccgccgaccaggcccgaggacgtcgtcgacatcgcccactatgcgatctag

SEQ ID NO: 101832 - DNA, 1880 bp, Zea Mays
ggccactcctcatcagccatccccaaaaggccaaaacccgcgcacaccggcgacggcaggagaacctcccgccggccgccgccatgccgccgcctctacaggcccaccgcctactcatctcccaccgccgcctacccactccagctcgccgccggttcaccgccgcctcttccgtccaatccgctcccgccacaaccttggccccgggccccgccacatcctccatcctctccatccgcgagtcgctcctctcaggcgagaggaccgcggcggacatcacctccgagtacctctcccgcctccgccgtaccgagccgaccttgcgcagcttcatccacgtcgcggacgccgccgccgagcgggaggcggaggaactcgaccggaggattgcctccggggagaaggatgcggtgggtccgctcgctggagtgctggtgggagtgaaggacaatctttgcacagccaacatgccctccacgggcgggtcgcggatactggacgggtaccggccggcgtacgacgccactgccgtgcggcggctgcgggaggccggcgctattgtgttggggaagacgaacctcgacgaattcggaatggggagcaccaccgagggctccgcgtttcaggtgacaacgaacccgtgggatgattcacgtgtgcctgggggatcctctggtggttctgctgctgcagtatctgctaggcaatgcgtagtgtcactaggtagtgacacaggtggaagtgtgagacaaccagcgtcgttttgcggtgtagtgggattgaagccaacttatggccgggtttctcgttttggtctcatggcctacgcttcatcgctggatgttgtgggatgctttggttcgtcggtttttgacactgcaaccatcttatctgttgttgctggccatgacaagatggacgcaaccagcagttcacaggttgttccagagtacgcatcggagttggtctccctagatttactagaatcgaaaccattaaatggtgtgagaattgggattatacaagaaactcttggagaaggtgttgccagtggagtcgtatcatcaatcaagggtgctgcttcacacctggagcagttgggatctgtggtggaagaggtttcactgccttcattttctcttggcttaccagcatattacatactagcctcatctgaagcttcttctaatctatcacgctatgatggtatcaggtatggaggacaggtctcggcggatgacttgaatgagctttatggagagtcccgggctaatggttttggtcatgaggtcaaaatgagaattttgatgggaacctatgctctttctgctgggtactatgatgcatactacaaacgagcacaacaggtcaggacactggttaagcaaagcttcaaagatgctttggaaagatacgacattctaatctcaccagctgcgccatcagcagcctacaagataggtgaaaagataaatgacccgttagccatgtatgcaggagatatcatgacggtgaatgttaatttggccgggcttcctgcattggttgtgccttgtggatttgttgaaggtggagctgcagggctcccagtgggactccagatgatgggatctccattctgtgaggtaaaagttatggtgctgattacatttagaactggagattgctccacgtttctgcagggctcctcattgaattcaggggtagcgagtagataatccactgaataacttctgccattttaaccaggggaatttgctgagagtaggccacatctttgagcagactctccagaatctcagctttgttccaccgttgttggcagagggccagttgtaacagataatccactcgctgctcaacaagcaattacctgagtt

SEQ ID NO: 101833 - DNA, 2011 bp, Zea Mays
ggccactcctcatcagccatccccaaaaggccaaaacccgcgcacaccggcgacggcaggagaacctcccgccggccgccgccatgccgccgcctctacaggcccaccgcctactcatctcccaccgccgcctacccactccagctcgccgccggttcaccgccgcctcttccgtccaatccgctcccgccacaaccttggccccgggccccgccacatcctccatcctctccatccgcgagtcgctcctctcaggcgagaggaccgcggcggacatcacctccgagtacctctcccgcctccgccgtaccgagccgaccttgcgcagcttcatccacgtcgcggacgccgccgccgagcgggaggcggaggaactcgaccggaggattgcctccggggagaaggatgcggtgggtccgctcgctggagtgctggtgggagtgaaggacaatctttgcacagccaacatgccctccacgggcgggtcgcggatactggacgggtaccggccggcgtacgacgccactgccgtgcggcggctgcgggaggccggcgctattgtgttggggaagacgaacctcgacgaattcggaatggggagcaccaccgagggctccgcgtttcaggtgacaacgaacccgtgggatgattcacgtgtgcctgggggatcctctggtggttctgctgctgcagtatctgctaggcaatgcgtagtgtcactaggtagtgacacaggtggaagtgtgagacaaccagcgtcgttttgcggtgtagtgggattgaagccaacttatggccgggtttctcgttttggtctcatggcctacgcttcatcgctggatgttgtgggatgctttggttcgtcggtttttgacactgcaaccatcttatctgttgttgctggccatgacaagatggacgcaaccagcagttcacaggttgttccagagtacgcatcggagttggtctccctagatttactagaatcgaaaccattaaatggtgtgagaattgggattatacaagaaactcttggagaaggtgttgccagtggagtcgtatcatcaatcaagggtgctgcttcacacctggagcagttgggatctgtggtggaagaggtttcactgccttcattttctcttggcttaccagcatattacatactagcctcatctgaagcttcttctaatctatcacgctatgatggtatcaggtatggaggacaggtctcggcggatgacttgaatgagctttatggagagtcccgggctaatggttttggtcatgaggtcaaaatgagaattttgatgggaacctatgctctttctgctgggtactatgatgcatactacaaacgagcacaacaggtcaggacactggttaagcaaagcttcaaagatgctttggaaagatacgacattctaatctcaccagctgcgccatcagcagcctacaagataggtgaaaagataaatgacccgttagccatgtatgcaggagatatcatgacggtgaatgttaatttggccgggcttcctgcattggttgtgccttgtggatttgttgaaggtggagctgcagggctcccagtgggactccagatgatgggatctccattctgtgaggggaatttgctgagagtaggccacatctttgagcagactctccagaatctcagctttgttccaccgttgttggcagagggccagttgtaacagataatccactcgctgctcaacaagcaattacctgagttacgggttttggggtggctttctgtcattcgcatgcggaggaaattggtagcacgcatgacgcatttagaaaatagaatgttttgctcgtggggtcgctgataattgtgagagagcaacgacacccatgtgatgtacaccagcaaccagcacattgcataccacacagcattttacatgccttcagaatgattgatgattttgtatcaatgctggttttctcaagtgtcaaattttgcatagaaaatattagtgtc

SEQ ID NO: 101834 - DNA, 2014 bp, Zea Mays
ggccactcctcatcagccatccccaaaaggccaaaacccgcgcacaccggcgacggcaggagaacctcccgccggccgccgccatgccgccgcctctacaggcccaccgcctactcatctcccaccgccgcctacccactccagctcgccgccggttcaccgccgcctcttccgtccaatccgctcccgccacaaccttggccccgggccccgccacatcctccatcctctccatccgcgagtcgctcctctcaggcgagaggaccgcggcggacatcacctccgagtacctctcccgcctccgccgtaccgagccgaccttgcgcagcttcatccacgtcgcggacgccgccgccgagcgggaggcggaggaactcgaccggaggattgcctccggggagaaggatgcggtgggtccgctcgctggagtgctggtgggagtgaaggacaatctttgcacagccaacatgccctccacgggcgggtcgcggatactggacgggtaccggccggcgtacgacgccactgccgtgcggcggctgcgggaggccggcgctattgtgttggggaagacgaacctcgacgaattcggaatggggagcaccaccgagggctccgcgtttcaggtgacaacgaacccgtgggatgattcacgtgtgcctgggggatcctctggtggttctgctgctgcagtatctgctaggcaatgcgtagtgtcactaggtagtgacacaggtggaagtgtgagacaaccagcgtcgttttgcggtgtagtgggattgaagccaacttatggccgggtttctcgttttggtctcatggcctacgcttcatcgctggatgttgtgggatgctttggttcgtcggtttttgacactgcaaccatcttatctgttgttgctggccatgacaagatggacgcaaccagcagttcacaggttgttccagagtacgcatcggagttggtctccctagatttactagaatcgaaaccattaaatggtgtgagaattgggattatacaagaaactcttggagaaggtgttgccagtggagtcgtatcatcaatcaagggtgctgcttcacacctggagcagttgggatctgtggtggaagaggtttcactgccttcattttctcttggcttaccagcatattacatactagcctcatctgaagcttcttctaatctatcacgctatgatggtatcaggtatggaggacaggtctcggcggatgacttgaatgagctttatggagagtcccgggctaatggttttggtcatgaggtcaaaatgagaattttgatgggaacctatgctctttctgctgggtactatgatgcatactacaaacgagcacaacagtaggtcaggacactggttaagcaaagcttcaaagatgctttggaaagatacgacattctaatctcaccagctgcgccatcagcagcctacaagataggtgaaaagataaatgacccgttagccatgtatgcaggagatatcatgacggtgaatgttaatttggccgggcttcctgcattggttgtgccttgtggatttgttgaaggtggagctgcagggctcccagtgggactccagatgatgggatctccattctgtgaggggaatttgctgagagtaggccacatctttgagcagactctccagaatctcagctttgttccaccgttgttggcagagggccagttgtaacagataatccactcgctgctcaacaagcaattacctgagttacgggttttggggtggctttctgtcattcgcatgcggaggaaattggtagcacgcatgacgcatttagaaaatagaatgttttgctcgtggggtcgctgataattgtgagagagcaacgacacccatgtgatgtacaccagcaaccagcacattgcataccacacagcattttacatgccttcagaatgattgatgattttgtatcaatgctggttttctcaagtgtcaaattttgcatagaaaatattagtgtc

SEQ ID NO: 101835 - DNA, 489 bp, Zea Mays
atgagcgcacctaaccttggtcctggatctgacgatgagcgcaccatgcagttccccaggacggtgcccgtggtggggaagttgagggaggtcgtcgacgctgccaaggtcgtggccgcgacgggggcgacaaggcacgcacgctgggcgtggggatggagcatggagcaagaggtggagggaggagggtgcgggaatggggatgatggtgttggacgagttgccatggatagaggagcgtgtggggatgaggacggctctcatcgcagacaagctcgccggctgcatcaccggccgcacgggggcatcggtggcggtattctcgttcggcgagttacgggcgggcgatgcgaggagggtgaggcgatgcgaggaggacgacatcgtgggtggccaaggaggactgaggcagtgtcggttgcagctgcgagggaggcggggaggggagggcggtcgagcaaacgaacggtgcagcgggcgcgagggtga

SEQ ID NO: 101836 - DNA, 179 bp, Zea Mays
attctttcattttttatctcacttatcatatttctttcaggaatcataaaagcatatggaggaactatgtataggctacaaagaagcataagaagcatttttatagcagaagccaagtgttctgatgattttgttttttcaattgtgttttctgttattggttcagcatgcgcatatat

SEQ ID NO: 101837 - DNA, 772 bp, Zea Mays
cgcgtctctgccgccatgcccgctctccatcgaaggaaggcgccattccagggattatcgcaccattctcgccctcgtccgctctccggcaccattctagcattccagggattaccgcctccccctcgatccgcggcactctcccccgtccttctcgagtatggcaccgccagtccgcctcgcgacccctgcctcctcccccctcgctctcttgttcccccagccaccgcgaggaactctgaaccccattccccaccaccgtaccaatccccgcatctacgccgctccccccgccccctgtcaactacgccaggtcctcgccatcgatgtcgcccaagcgcgtcgtcctcgcccccgacctcggcgtgcgggattcggtaccgaaagaagagacaggaggagaatacaagccctcagcctcggtgttccccattcaccgctcaggcgcagtccatcgctccttcgacgagggctccagcgactacggctccatcgctcctcatggtgatgccgccgagggttgtcctacgaagccgtccgcgatgccgagggttgtcctacgaagcagacacgccctgcggctgcccacacaaagggtttggttcttgttcctccaagctactgcgcgtgtgctttcacattcggcacagtgggagccctcatggcagcagacgacgtgtgactccagactcggcgtagacgacccacaaggagctgctaatggcggaggctgagcgccgccatggatctgacacggtgtggaatgggagga

SEQ ID NO: 101838 - DNA, 708 bp, Zea Mays
atggctttcccaaatcaatcaggactaaagctgagtaccgtgacaaccagcggggtgaatttatcccgcacctggcaggaagtaaaaggcagcgacgatgcctggttttacaccgtttttcagcttagtggtcaggcaataatggagcaggatgagcgtcaggtgcagattggcgctggcgatattacgttactcgatgcctcacgcccctgttcgctttactggcaggagtcttctaaacagatttcattacttttgccacgcactctgctggaacaatattttccccatcaaaaacctatctgcgcagaaagactggacgctgacttacccatggtgcaactcagtcatcgcctgttacaggagagcatgaataatccggcactttctgaaacagaaagtgaagctgcgctacaggcgatggtgtgtctgctgcgcccggtacttcatcagcgggaatctgttcaacctcgtcgtgaacgtcagtttcaaaaagtggttacgttgatagacgataatattcgcgaagagatattacgcccggagtggatagccggagagacagatgcgattcgccatgccgcagatgatgaaaaactggcaggcatcggctttcattggggattttctgaccagagtcatttttcaacggtatttaagcaacgctttgggatgacgccaggcgagtatcgacgtaaattccgctaa

SEQ ID NO: 101839 - DNA, 4308 bp, Zea Mays
ctgaccaccgcagtgcggaacacaaaagctcaccagtcacccctgcggcgccacccccacaaacctcgcctgcacgtcaccaataccgaggctatccccggcaggcgcttccggattcccccctttcttcctttgcagcctgccaggcaccgctggccaagagacaagcaaaaacggcgacaccttcaccaatgccgcagggcgccgctgctgcggcctgagagtgcgagccccgctaccgaggtccgggtcaggcggggggtgtggggggggggggggggggggggagcgcattgcgatggcggagtcggcggcggctgacgggaagtcggacaaggtggcgaacggaggagggggaggcggcgatgcagcgggggaggggaagaagcggggggaccaggccgtggcgttccacgagctcttctcgtttgccgacaagtgggacctgatgctcatggcggcgggcagcatgggtgcactggcgcacggcgccgccatgccgttcttcttcctgctcttcggggacctcatcaacggcttcggcaagaatcagaccgacctccgcaccatgaccgatgaggtcgcaaagtacgcgctctacttcgtctacctggggctggtggtctgcgtctcctcctacgcagagatcgcgtgctggatgtacaccggggagcggcaggtgatcgcgctccggaaggcttacctggacgccgtgctgcggcaggacgtgggtttcttcgatacggacgcgcgcacgggcgacatcgtcttcggcgtctccaccgacacgctgctcgtgcaggatggcatcggcgagaaggtcggcaacttcatgcactacatcgccaccttcctggcggggctcgtcgtcgggttcgtctcggcatggcggcttgcgctgctcagtgtggccgtcatcccggccatcgccttcgccggcggcctgtacgcgtacacgctcaccgggctcacttccaaaagccgggagtcgtatgctaatgccggcgtcgtcgcggagcaggcaattggacaagtaagaacagtgtactcttttgtcggagagagcaaagcgctcaattcatattctgaagcaatccagaacacactgaagcttggttacaaagctgggatggccaaaggtcttggaattggatgtacttatgggatagcttgcatgtcatgggcactggtattttggtatgctggggtcttcatcaggaatgggcagactgatggtggaaaggcttttaccgcgatcttttctgcaattgtcggtggcatgagtcttggtcaggctttctcaaaccttggagccttcagtaagggaaagattgctggttacaaactgttggaggtcattcgccagaaaccctccatagtcaatgatcataaggatggaaaatggttggcagaggtccatggaaacatagaattcaaggaagttactttcagttatccatcaaggcctgatgttataatcttccgggatttctctcttttcttccctgctggtaaaacagttgcagttgttggagggagtgggtctggaaagagcactgttgtggctttgatagaaaggttctatgatcctaatgaaggccaggttttgctagacaatgttgacataaagacactccagctgaggtggcttagagaacagattggtctggtaaaccaagaacctgctctttttgcaacaacgatcctcgagaatatactgtatggaaagccagatgcaactattgcagaagttgaggctgcagcgactgcatccaatgcacatagtttcatatctcttcttccgaatggttacaacacaatggcaggtgagagaggaatccagctctctggtggtcagaaacaacgtatagcaatagctcgtgctatgctgaaaaacccaaagatcctgctcctggatgaggctaccagtgcattagatgcagactcggaaagcattgtgcaagaagctttagaccgtttgatggttgggaggacgactgtagttgttgcccaccgtctgtcgacgataagaaacgttaacatgatcgctgtgatccaacaaggccaagttgttgagactgggacgcatgatgaactcattgcaaaaggaacctctggagcatatgcctcccttgttcgttttcaggaaacggcacggaacagggatcttggaggtgcatctagccgcaggtcacggtcaattcacttgacaagctcactttccaccaaatctctcagcctcaggtctggaagtctaaagaacctcagctatcagtacagtactggagcagatggtcgcattgagatgatttctaatgctgataatgaccgcaaatacccagcgccacgtggctacttcttcaagcttctgaaactgaacgcacctgaatggccatatgcagtgttgggggccattggttctgtcctctccggatttattggcccaacttttgccattgttatgggtgaaatgcttgatgtgttctactacagggaccccaatgaaattgagaagaaaaccaagctatatgtgttcatttatattggcacaggcatatatgccgttgttgcttatcttgtgcagcattacttcttcagcatcatgggggaaaatcttacaaccagggttcggaggatgatgttgtccgcaatacttaggaatgaagttggttggtttgacgaagaagaaaacaactctagtcttgtggctgcgcgtctaggtgttgatgcagctgatgtgaagtcggctatagccgagagaatttcagtcatcctgcagaacatgacttctcttatgacttctttcgtcgttggatttatcatcgagtggagagtggcaatacttattctggccactttccctctgcttgtgcttgccaactttgctcagcaactttcaatgaagggctttgctggtgatacggcaaaggcacatgccaggagcagtatggttgcaggtgaagcagtgagcaatatccgcaccgtagcggcgttcaacgctcaaagcaagatcctgtcactcttcagccatgaactgcgtgtgccagagcagcaaatcctccgccgcagccagacatctggtcttctgtttggcctgtcacagctctgcttatactcctcagaagcgctcatcctctggtatggttctcatctcgtgcggtcacatgggtccaccttctccaaggtcatcaaggtttttgttgtcctggtggtgactgccaactcggtagccgagacggtgagcctggccccagagatcatccgcggaggtgagtccatccgatccatcttcggcatcctcaacagagcaacgagaatcgagcctgacgatccagagtcagagcgtgtcaccaccatccgaggggacatcgagctgcggcatgtagacttctcgtatccagcacgcccagacattcaaatcttcaaggacttcaacctgaaaatccaagctgggcgcagccaggcactagtcggagccagcggttcaggcaagagcaccgtcattgctctcatcgagcggttctatgatccatgcgggggcaaagtggccatcgacggcaaggacatccggacgctgaacctgaagtccttgcggctcaagatcggactcgtgcagcaggagccggtcctcttcgcatcgagcatcctagagaacattgcgtacggcaaggaaggcgcgagcgaggaggaggtggtggaggcggcgaagacggcgaacgtgcacggcttcgtcagccagctgcccgacggctacaggacggcggtcggcgagcaggggatgcagctgtcaggcgggcagaagcaacggatcgccatcgccagggcggtgctcaaggacccggccatcctgctgctggacgaggcgacgagcgcgctggacgcggagtccgagtgcgtgctgcaggaggcgctggagcggctgatgaaggggcggaccaccgtgctggtggcgcaccggctgtctacgatccgaggggtggaccgcatcgcggtggtgcaggacgggcgggtcgtggagcacggcagccactccgacctcctggcccggccggagggcgcctacttgcggctgctgcagttgcagcaccatcgtgtctgacggcgccgtgcatcctctgatgatgtatattaattacacgatgacatcttagtttcggaggtctggggcggtggcggcttccttttcggtttcttgggttggcggtggccggtggtcgtgcatggggatgttgatactagggcaaaacgtgttgcgttcttatgcataaacttggaacatgtgatctgtatcttcacctcttctcgtcc

SEQ ID NO: 101840 - DNA, 3191 bp, Zea Mays
acaatctataagtcactatgttgtaattttaagaattagtttcatgcaattctacttatttggtgactgaattaattctggaacaggcaattggacaagtaagaacagtgtactcttttgtcggagagagcaaagcgctcaattcatattctgaagcaatccagaacacactgaagcttggttacaaagctgggatggccaaaggtcttggaattggatgtacttatgggatagcttgcatgtcatgggcactggtattttggtatgctggggtcttcatcaggaatgggcagactgatggtggaaaggcttttaccgcgatcttttctgcaattgtcggtggcatgagtcttggtcaggctttctcaaaccttggagccttcagtaagggaaagattgctggttacaaactgttggaggtcattcgccagaaaccctccatagtcaatgatcataaggatggaaaatggttggcagaggtccatggaaacatagaattcaaggaagttactttcagttatccatcaaggcctgatgttataatcttccgggatttctctcttttcttccctgctggtaaaacagttgcagttgttggagggagtgggtctggaaagagcactgttgtggctttgatagaaaggttctatgatcctaatgaaggccaggttttgctagacaatgttgacataaagacactccagctgaggtggcttagagaacagattggtctggtaaaccaagaacctgctctttttgcaacaacgatcctcgagaatatactgtatggaaagccagatgcaactattgcagaagttgaggctgcagcgactgcatccaatgcacatagtttcatatctcttcttccgaatggttacaacacaatggcaggtgagagaggaatccagctctctggtggtcagaaacaacgtatagcaatagctcgtgctatgctgaaaaacccaaagatcctgctcctggatgaggctaccagtgcattagatgcagactcggaaagcattgtgcaagaagctttagaccgtttgatggttgggaggacgactgtagttgttgcccaccgtctgtcgacgataagaaacgttaacatgatcgctgtgatccaacaaggccaagttgttgagactgggacgcatgatgaactcattgcaaaaggaacctctggagcatatgcctcccttgttcgttttcaggaaacggcacggaacagggatcttggaggtgcatctagccgcaggtcacggtcaattcacttgacaagctcactttccaccaaatctctcagcctcaggtctggaagtctaaagaacctcagctatcagtacagtactggagcagatggtcgcattgagatgatttctaatgctgataatgaccgcaaatacccagcgccacgtggctacttcttcaagcttctgaaactgaacgcacctgaatggccatatgcagtgttgggggccattggttctgtcctctccggatttattggcccaacttttgccattgttatgggtgaaatgcttgatgtgttctactacagggaccccaatgaaattgagaagaaaaccaagctatatgtgttcatttatattggcacaggcatatatgccgttgttgcttatcttgtgcagcattacttcttcagcatcatgggggaaaatcttacaaccagggttcggaggatgatgttgtccgcaatacttaggaatgaagttggttggtttgacgaagaagaaaacaactctagtcttgtggctgcgcgtctaggtgttgatgcagctgatgtgaagtcggctatagccgagagaatttcagtcatcctgcagaacatgacttctcttatgacttctttcgtcgttggatttatcatcgagtggagagtggcaatacttattctggccactttccctctgcttgtgcttgccaactttgctcagcaactttcaatgaagggctttgctggtgatacggcaaaggcacatgccaggagcagtatggttgcaggtgaagcagtgagcaatatccgcaccgtagcggcgttcaacgctcaaagcaagatcctgtcactcttcagccatgaactgcgtgtgccagagcagcaaatcctccgccgcagccagacatctggtcttctgtttggcctgtcacagctctgcttatactcctcagaagcgctcatcctctggtatggttctcatctcgtgcggtcacatgggtccaccttctccaaggtcatcaaggtttttgttgtcctggtggtgactgccaactcggtagccgagacggtgagcctggccccagagatcatccgcggaggtgagtccatccgatccatcttcggcatcctcaacagagcaacgagaatcgagcctgacgatccagagtcagagcgtgtcaccaccatccgaggggacatcgagctgcggcatgtagacttctcgtatccagcacgcccagacattcaaatcttcaaggacttcaacctgaaaatccaagctgggcgcagccaggcactagtcggagccagcggttcaggcaagagcaccgtcattgctctcatcgagcggttctatgatccatgcgggggcaaagtggccatcgacggcaaggacatccggacgctgaacctgaagtccttgcggctcaagatcggactcgtgcagcaggagccggtcctcttcgcatcgagcatcctagagaacattgcgtacggcaaggaaggcgcgagcgaggaggaggtggtggaggcggcgaagacggcgaacgtgcacggcttcgtcagccagctgcccgacggctacaggacggcggtcggcgagcaggggatgcagctgtcaggcgggcagaagcaacggatcgccatcgccagggcggtgctcaaggacccggccatcctgctgctggacgaggcgacgagcgcgctggacgcggagtccgagtgcgtgctgcaggaggcgctggagcggctgatgaaggggcggaccaccgtgctggtggcgcaccggctgtctacgatccgaggggtggaccgcatcgcggtggtgcaggacgggcgggtcgtggagcacggcagccactccgacctcctggcccggccggagggcgcctacttgcggctgctgcagttgcagcaccatcgtgtctgacggcgccgtgcatcctctgatgatgta

SEQ ID NO: 101841 - DNA, 959 bp, Zea Mays
gccttaaagcagtctattttgtctactcgccgagctctctcgctcttcttctagctaccgcatgcgtaccacctgcaagctctgctactcgatcagctaggcagctaggtagctagctccgatccacatatataaaaatcagatcgcacagctactagcggcaaccgacatgtccagcggccggaggtcgtcacgcacgcggcgtgcggggagcagctcgctgtcgtcgtcgacgtcgaggtccatctcggaggaccagatctccgagctcctgtccaagcttcaggcgctgctcccggagtctcaagctcgcaatggcggcgcacatagggggtcggcggcgagggtgctgcaggacacgtgcagctacatcaggagcctgcaccaggaggtggacaacctcagcgagacgctggccgagctgctcgcctccgccgatgtcaccagcgaccaggccgccgtcatcaggagcctgctcatgtgaccaacgcaccccggccggaaaagaagagagagagagagagagagagagagatagagaggcaagcttccggtgagagcgcatgcgtgcgtgcacggctgttaattagatctcaggcgtgctgcatgcctagcttaattatctatactatacccgtactttgatttgcaactgctcattagctgccctgccgctgtctgtctagtagtactagtactgtgcccaaggattattagtagctggtgagctagctatatatgcatgcttagtagcagccgtagtagtgactagtgagcaaattcttgtactttgatgtaagcttgcactgtgtggtcatcgtctctgctctgctttgtttgcgatcggtgtttggctgttaatccaagctagctagctggatgtgtgtgagaggtttttgcaaataatggtgggagatggatggatggatggatgggcagacaaagcatcagaggttcaa

SEQ ID NO: 101842 - DNA, 1551 bp, Zea Mays
actgctacccgaggcgccgacaccgcccgtacccgaccaaagcgcttgggagtctgacccgtggcccaatagtccactaacctgtcccacggtcccacccagtcgcaacctgatccctattccgatctcgaggacgccacgccacgccacgccacgctcccgtcctctccgctggcctcgtgccccctcgtcccaactcccaactgccgatggggaaggagcaatccggtgtgcgcgcgcgggcgcggaagtgaaccccggttgagtagtaggtgggagatcgaggtcgcgcccttgccccacacgccactaaaggccgcgccgacgggctcatcagacgctttggagtttggacgggctcgcctcggccgctctggcgcttgtgcggtgggtgaagcgcgggtgctggtgcgggaagcctcgccagacctagcgctgccgactgccgagctgggtgcgggcgcgaggagtcgacgggaagacaagggtgagggttcgtccgttcgtgtatatatgacgctaagtttagttgctgaggatacgaagcctgctggatgaatgagtaagggctttgtgaacaaacatatgaattatgagtgaaacagggcacactgtacaagtcactaacctctcgagcagagtatctgaaagtgatcttcatgagttcttttcgttctctggtcctattgagcatatagaacttatcagatcagaaggatacggtgccactgcttatgtgacattcaaggaacgctttgccttggaaactgcagtattgctcagtggggctactattgtggatcagccagtatgcataacctattggggacaacctgagggaacttttaatttctgggacaggccaacttgggaggttgaagaggaaatcgaatacaggaactaccaaacatgccagtacaacactactccgcaggaagcttttacagtggctcaagatatcatgaagacgatgctagaaaaggggtacgtgctcagcaaggatgctttggctaaggctagagcctttgatgagtcctatggattaacagctgcagcagcagccagggctgcagagctgagcaagagaattggtttaactgatagggtcaatgctggtgttggtgcaatgcgatcagtcgatgagacatatcgcgtaagagagacaaccaagacggttgctactgccactggaagaacggcagcaaaggtggtaaatggcatcgtcaccagcagctacttctctgcaggagccatgatcttgtctgatgctcttactagggctgccaaggccgcggcagatctggccgctcatggtaggcagaattaagtgaaaaatagacataaagttcatccttgcagttactaaacatgaggacgaacaccttcaagtgatgttgcttgatgtatatttatgacacaacagtgtcgtaaattaaaaggagacgatcactgcgtttggaacaaattgtttgctctgataagtttgattattgcaaatgtagtcaagtgatcgtgcagtcatgtttcggacttcctgcgcatttcatattc

SEQ ID NO: 101843 - DNA, 1690 bp, Zea Mays
actgctacccgaggcgccgacaccgcccgtacccgaccaaagcgcttgggagtctgacccgtggcccaatagtccactaacctgtcccacggtcccacccagtcgcaacctgatccctattccgatctcgaggacgccacgccacgccacgccacgctcccgtcctctccgctggcctcgtgccccctcgtcccaactcccaactgccgatggggaaggagcaatccggtgtgcgcgcgcgggcgcggaagtgaaccccggttgagtagtaggtgggagatcgaggtcgcgcccttgccccacacgccactaaaggccgcgccgacgggctcatcagacgctttggagtttggacgggctcgcctcggccgctctggcgcttgtgcggtgggtgaagcgcgggtgctggtgcgggaagcctcgccagacctagcgctgccgactgccgagctgggtgcgggcgcgaggagtcgacgggaagacaagggtgagggaaaattgtgattatttaaaggttcgtccgttcgtgtatatatgacgctaagtttagttgctgaggatacgaagcctgctggatgaatgagtaagggctttgtgaacaaacatatgaattatgagtgaaacagggcacactgtacaagtcactaacctctcgagcagagtatctgaaagtgatcttcatgagttcttttcgttctctggtcctattgagcatatagaacttatcagatcagaaggatacggtgccactgcttatgtgacattcaaggaacgctttgccttggaaactgcagtattgctcagtggggctactattgtggatcagccagtatgcataacctattggggacaacctgagggaacttttaatttctgggacaggccaacttgggaggttgaagaggaaatcgaatacaggaactaccaaacatgccagtacaacactactccgcaggaagcttttacagtggctcaagatatcatgaagacgatgctagaaaaggggtacgtgctcagcaaggatgctttggctaaggctagagcctttgatgagtcctatggattaacagctgcagcagcagccagggctgcagagctgagcaagagaattggtttaactgatagggtcaatgctggtgttggtgcaatgcgatcagtcgatgagacatatcgcgtaagagagacaaccaagacggttgctactgccactggaagaacggcagcaaaggtggtaaatggcatcgtcaccagcagctacttctctgcaggagccatgatcttgtctgatgctcttactagggctgccaaggccgcggcagatctggccgctcatggtaggcagaattaagtgaaaaatagacataaagttcatccttgcagttactaaacatgaggacgaacaccttcaagtgatgttgcttgatgtatatttatgacacaacagtgtcgtaaattaaaaggagacgatcactgcgtttggaacaaattgtttgctctgataagtttgattattgcaaatgtagtcaagtgatcgtgcagtcatgtttcggacttcctgcgcatttcatattcgcgcattgctgttgagtatctggagaatcaaagcaactgttctcccctagacaagtgttgtattacgaatataatatccctgattccagagcaaaaaaaaaatcatccttttttcaac

SEQ ID NO: 101844 - DNA, 1574 bp, Zea Mays
actgctacccgaggcgccgacaccgcccgtacccgaccaaagcgcttgggagtctgacccgtggcccaatagtccactaacctgtcccacggtcccacccagtcgcaacctgatccctattccgatctcgaggacgccacgccacgccacgccacgctcccgtcctctccgctggcctcgtgccccctcgtcccaactcccaactgccgatggggaaggagcaatccggtgtgcgcgcgcgggcgcggaagtgaaccccggttgagtagtaggtgggagatcgaggtcgcgcccttgccccacacgccactaaaggccgcgccgacgggctcatcagacgctttggagtttggacgggctcgcctcggccgctctggcgcttgtgcggtgggtgaagcgcgggtgctggtgcgggaagcctcgccagacctagcgctgccgactgccgagctgggtgcgggcgcgaggagtcgacgggaagacaagggtgaggaattatgagtgaaacagggcacactgtacaagtcactaacctctcgagcagagtatctgaaagtgatcttcatgagttcttttcgttctctggtcctattgagcatatagaacttatcagatcagaaggatacggtgccactgcttatgtgacattcaaggaacgctttgccttggaaactgcagtattgctcagtggggctactattgtggatcagccagtatgcataacctattggggacaacctgagggaacttttaatttctgggacaggccaacttgggaggttgaagaggaaatcgaatacaggaactaccaaacatgccagtacaacactactccgcaggaagcttttacagtggctcaagatatcatgaagacgatgctagaaaaggggtacgtgctcagcaaggatgctttggctaaggctagagcctttgatgagtcctatggattaacagctgcagcagcagccagggctgcagagctgagcaagagaattggtttaactgatagggtcaatgctggtgttggtgcaatgcgatcagtcgatgagacatatcgcgtaagagagacaaccaagacggttgctactgccactggaagaacggcagcaaaggtggtaaatggcatcgtcaccagcagctacttctctgcaggagccatgatcttgtctgatgctcttactagggctgccaaggccgcggcagatctggccgctcatggtaggcagaattaagtgaaaaatagacataaagttcatccttgcagttactaaacatgaggacgaacaccttcaagtgatgttgcttgatgtatatttatgacacaacagtgtcgtaaattaaaaggagacgatcactgcgtttggaacaaattgtttgctctgataagtttgattattgcaaatgtagtcaagtgatcgtgcagtcatgtttcggacttcctgcgcatttcatattcgcgcattgctgttgagtatctggagaatcaaagcaactgttctcccctagacaagtgttgtattacgaatataatatccctgattccagagcaaaaaaaaaatcatccttttttcaac

SEQ ID NO: 101845 - DNA, 1568 bp, Zea Mays
actgctacccgaggcgccgacaccgcccgtacccgaccaaagcgcttgggagtctgacccgtggcccaatagtccactaacctgtcccacggtcccacccagtcgcaacctgatccctattccgatctcgaggacgccacgccacgccacgccacgctcccgtcctctccgctggcctcgtgccccctcgtcccaactcccaactgccgatggggaaggagcaatccggtgtgcgcgcgcgggcgcggaagtgaaccccggttgagtagtaggtgggagatcgaggtcgcgcccttgccccacacgccactaaaggccgcgccgacgggctcatcagacgctttggagtttggacgggctcgcctcggccgctctggcgcttgtgcggtgggtgaagcgcgggtgctggtgcgggaagcctcgccagacctagcgctgccgactgccgagctgggtgcgggcgcgaggagtcgacgggaagacaaggaattatgagtgaaacagggcacactgtacaagtcactaacctctcgagcagagtatctgaaagtgatcttcatgagttcttttcgttctctggtcctattgagcatatagaacttatcagatcagaaggatacggtgccactgcttatgtgacattcaaggaacgctttgccttggaaactgcagtattgctcagtggggctactattgtggatcagccagtatgcataacctattggggacaacctgagggaacttttaatttctgggacaggccaacttgggaggttgaagaggaaatcgaatacaggaactaccaaacatgccagtacaacactactccgcaggaagcttttacagtggctcaagatatcatgaagacgatgctagaaaaggggtacgtgctcagcaaggatgctttggctaaggctagagcctttgatgagtcctatggattaacagctgcagcagcagccagggctgcagagctgagcaagagaattggtttaactgatagggtcaatgctggtgttggtgcaatgcgatcagtcgatgagacatatcgcgtaagagagacaaccaagacggttgctactgccactggaagaacggcagcaaaggtggtaaatggcatcgtcaccagcagctacttctctgcaggagccatgatcttgtctgatgctcttactagggctgccaaggccgcggcagatctggccgctcatggtaggcagaattaagtgaaaaatagacataaagttcatccttgcagttactaaacatgaggacgaacaccttcaagtgatgttgcttgatgtatatttatgacacaacagtgtcgtaaattaaaaggagacgatcactgcgtttggaacaaattgtttgctctgataagtttgattattgcaaatgtagtcaagtgatcgtgcagtcatgtttcggacttcctgcgcatttcatattcgcgcattgctgttgagtatctggagaatcaaagcaactgttctcccctagacaagtgttgtattacgaatataatatccctgattccagagcaaaaaaaaaatcatccttttttcaac

SEQ ID NO: 101846 - DNA, 1557 bp, Zea Mays
actgctacccgaggcgccgacaccgcccgtacccgaccaaagcgcttgggagtctgacccgtggcccaatagtccactaacctgtcccacggtcccacccagtcgcaacctgatccctattccgatctcgaggacgccacgccacgccacgccacgctcccgtcctctccgctggcctcgtgccccctcgtcccaactcccaactgccgatggggaaggagcaatccggtgtgcgcgcgcgggcgcggaagtgaaccccggttgagtagtaggtgggagatcgaggtcgcgcccttgccccacacgccactaaaggccgcgccgacgggctcatcagacgctttggagtttggacgggctcgcctcggccgctctggcgcttgtgcggtgggtgaagcgcgggtgctggtgcgggaagcctcgccagacctagcgctgccgactgccgagctgggtgcgggcgcgaggagtcgacgggaagacaagggtgaggggcacactgtacaagtcactaacctctcgagcagagtatctgaaagtgatcttcatgagttcttttcgttctctggtcctattgagcatatagaacttatcagatcagaaggatacggtgccactgcttatgtgacattcaaggaacgctttgccttggaaactgcagtattgctcagtggggctactattgtggatcagccagtatgcataacctattggggacaacctgagggaacttttaatttctgggacaggccaacttgggaggttgaagaggaaatcgaatacaggaactaccaaacatgccagtacaacactactccgcaggaagcttttacagtggctcaagatatcatgaagacgatgctagaaaaggggtacgtgctcagcaaggatgctttggctaaggctagagcctttgatgagtcctatggattaacagctgcagcagcagccagggctgcagagctgagcaagagaattggtttaactgatagggtcaatgctggtgttggtgcaatgcgatcagtcgatgagacatatcgcgtaagagagacaaccaagacggttgctactgccactggaagaacggcagcaaaggtggtaaatggcatcgtcaccagcagctacttctctgcaggagccatgatcttgtctgatgctcttactagggctgccaaggccgcggcagatctggccgctcatggtaggcagaattaagtgaaaaatagacataaagttcatccttgcagttactaaacatgaggacgaacaccttcaagtgatgttgcttgatgtatatttatgacacaacagtgtcgtaaattaaaaggagacgatcactgcgtttggaacaaattgtttgctctgataagtttgattattgcaaatgtagtcaagtgatcgtgcagtcatgtttcggacttcctgcgcatttcatattcgcgcattgctgttgagtatctggagaatcaaagcaactgttctcccctagacaagtgttgtattacgaatataatatccctgattccagagcaaaaaaaaaatcatccttttttcaac

SEQ ID NO: 101847 - DNA, 1454 bp, Zea Mays
actgctacccgaggcgccgacaccgcccgtacccgaccaaagcgcttgggagtctgacccgtggcccaatagtccactaacctgtcccacggtcccacccagtcgcaacctgatccctattccgatctcgaggacgccacgccacgccacgccacgctcccgtcctctccgctggcctcgtgccccctcgtcccaactcccaactgccgatggggaaggagcaatccggtgtgcgcgcgcgggcgcggaagtgaaccccggttgagtagtaggtgggagatcgaggtcgcgcccttgccccacacgccactaaaggccgcgccgacgggctcatcagacgctttggagtttggacgggctcgcctcggccgctctggcgcttgtgcggtgggtgaagcgcgggtgctggtgcgggaagcctcgccagacctagcgctgccgactgccgagctgggtgcgggcgcgaggagtcgacgggaagacaagggtgaggatcagaaggatacggtgccactgcttatgtgacattcaaggaacgctttgccttggaaactgcagtattgctcagtggggctactattgtggatcagccagtatgcataacctattggggacaacctgagggaacttttaatttctgggacaggccaacttgggaggttgaagaggaaatcgaatacaggaactaccaaacatgccagtacaacactactccgcaggaagcttttacagtggctcaagatatcatgaagacgatgctagaaaaggggtacgtgctcagcaaggatgctttggctaaggctagagcctttgatgagtcctatggattaacagctgcagcagcagccagggctgcagagctgagcaagagaattggtttaactgatagggtcaatgctggtgttggtgcaatgcgatcagtcgatgagacatatcgcgtaagagagacaaccaagacggttgctactgccactggaagaacggcagcaaaggtggtaaatggcatcgtcaccagcagctacttctctgcaggagccatgatcttgtctgatgctcttactagggctgccaaggccgcggcagatctggccgctcatggtaggcagaattaagtgaaaaatagacataaagttcatccttgcagttactaaacatgaggacgaacaccttcaagtgatgttgcttgatgtatatttatgacacaacagtgtcgtaaattaaaaggagacgatcactgcgtttggaacaaattgtttgctctgataagtttgattattgcaaatgtagtcaagtgatcgtgcagtcatgtttcggacttcctgcgcatttcatattcgcgcattgctgttgagtatctggagaatcaaagcaactgttctcccctagacaagtgttgtattacgaatataatatccctgattccagagcaaaaaaaaaatcatccttttttcaac

SEQ ID NO: 101848 - DNA, 1037 bp, Zea Mays
tgtgcctgtccaatttcacacgtatatcacaggaaatacttaaattttgaccttttctgtttgatgacttccagaattatgagtgaaacagggcacactgtacaagtcactaacctctcgagcagagtatctgaaagtgatcttcatgagttcttttcgttctctggtcctattgagcatatagaacttatcagatcagaaggatacggtgccactgcttatgtgacattcaaggaacgctttgccttggaaactgcagtattgctcagtggggctactattgtggatcagccagtatgcataacctattggggacaacctgagggaacttttaatttctgggacaggccaacttgggaggttgaagaggaaatcgaatacaggaactaccaaacatgccagtacaacactactccgcaggaagcttttacagtggctcaagatatcatgaagacgatgctagaaaaggggtacgtgctcagcaaggatgctttggctaaggctagagcctttgatgagtcctatggattaacagctgcagcagcagccagggctgcagagctgagcaagagaattggtttaactgatagggtcaatgctggtgttggtgcaatgcgatcagtcgatgagacatatcgcgtaagagagacaaccaagacggttgctactgccactggaagaacggcagcaaaggtggtaaatggcatcgtcaccagcagctacttctctgcaggagccatgatcttgtctgatgctcttactagggctgccaaggccgcggcagatctggccgctcatggtaggcagaattaagtgaaaaatagacataaagttcatccttgcagttactaaacatgaggacgaacaccttcaagtgatgttgcttgatgtatatttatgacacaacagtgtcgtaaattaaaaggagacgatcactgcgtttggaacaaattgtttgctctgataagtttgattattgcaaatgtagtcaagtgatcgtgcagtcatgtttcggacttcctgcgcatttcatattc

SEQ ID NO: 101849 - DNA, 1701 bp, Zea Mays
cctcgaacgacatgacatttcatttaagaaagaggaaacattacagcacgagggtaggcatgaagtcctccctctccaatccactaatgtagattacatacggccacacgtcaaaaaaaaatgcttgcacggaattattataaggatcatgttcctaccaaaaatatgctataatgctctccattctgtacaaactacaaagtacataccaaaaacaactaatctaccattgcgcacgcggtagtacaagcatcagcagcaacaaacggggcatcttacgaggccattttcattacaatcgggacaccgccggaactcgccgacgtcgtgatactgatacatgtcgtccgcgtcgtcgtcctcgacgaagaccttgcagcttccgtagcacgtctcgcacggcacgaaccggacgtcgccgcaggcggcgcacgcctccatgtacccgagcttccgcgagggcgcggcctcgcacccctccagcactcgcccgagctcgcccgcctcgtgcaggaagtgcacgtcttcggcgccgccgaggtaccggccgtcgacgaacacgcgcgggagcgcggcggctgcgaacccgggcccgaggagctccgcgagctcggccttgaagacggcgtgcatggagacgtcgcgctcgtccaggcgcacgccgtagctgcgcaggatgctgcgcacggcgcaacagtccacgaacgtcttgcgcacgccgcggaggctcgtgtagtacaccaccgccttccgctcgcctcccggcggccaccgggacgacaccttggcgtcgcggcccttgcttcccctccgttcgatcttctcttggaacgcgatgatgcgggcacggacaaggccggaaagctccggcatgttgccggtggccggcgacgttggcatgtcacatgcatccgcgcccttccgctcctgctccctgggcgtctcggtatcggcttcggcggacgagacaacatgctctggcgatggcgccgtggcctctagagcatcccggaatccggacagtacctcagggtcgaagtctaaggcgacgggcatgtccatgtcggcctgcatccactccggcagcggcggcgcctccaagcccaactcctgcggcaactcattgagtagcgaacacctgtacgtggcgcgcggtgtcggcgcgtcgtcctcgagccccgccatgagctcccatgcgttgatcacctcgggctcgttgggcggcgtcagcgtcggcgtgcggggcttcagggaccgcttcgccgcgtcgtcgccgaggagcaccgcgtccgcggcatggtcgttgtcgctcttcatcaaatcctccaccgacagcgtcgcgtgcctgcacgagctggagtgacgggcgctgctgccggcgaggccgaggttgccgagcatcgacacggtcttcagccgcagccgctggcggtcgacagagggtagcgagaagctccggcgcgggggggcgccggcgccggtccgcaccatgtcgcggcgcgcctcggtggaggttgcgcaccccatcgccgggtcacgtcgcgacggcgcgggtgtgcgctagcctgccgcctgcgtccccgcgtgttcaactgctcaagcctcaagcacgcgtggctcgatcaacggcaccaaaaatccacaatgcagttggaaccaaaggatccagtgctctcgaagctggataatggcgaggccaag

SEQ ID NO: 101850 - DNA, 453 bp, Zea Mays
atggatggagtctgcaggggattcggccgggctgggcaagcggcgcagctgtcaagcagggagcgcaagtcgtggattccacgagcagggcgcgtcgccgtcagtgagtcaccgccaccaacaccaacccaccaccaccgcgcgccatggaagacagggcagggcggcggccatgaaagctccaggccggcgcggcactggaggagctcaggacgcgcagacgactcggcaacgcgcggcagagagagaaatccaagcgcagcggagttgggggagcagagctctagccgagagccatgggaaggccttggctgggggcgagcagagctgggacagggaccagctcggccggcgcggggaagaagacgagggcgctggagaatcgacgtgcaggctgccgagatgagggagagagaagtggctgaagaagataaggccgagggagagttctag

SEQ ID NO: 101851 - DNA, 299 bp, Zea Mays
gagggcgacctgtccgccgaggcatatcggccgtccgtggtgcgctgcaagacatccaacggcggaacgagcctcttcgcggggatcaaggaaagcaagaacagcgtgtgatgtgatcttctgtgcgcgattacggttcatcacaggtttcgataaccaacggcgacaagaaaagggaaacgatcaaacggcaaaacgggaagccctcgttaggctagatgaaatgctcgtgttttgtactcggttcggtttgtggtcagcttgactcaactcggatcgatttatttaaatttttttat

SEQ ID NO: 101852 - DNA, 570 bp, Zea Mays
acagcagcaccaccacaccacacgatcgccctcaacacgggagctagaagctacacggattaagtaaggtctgtgcttaaagactcgattggttaggacttgggagtaagctactagctagaagctccagtagtcgatcgacaacaatggccaacttcgctgctcagattaaggacaagttcctcggcctcgtcgaccgtgtcgccggccgcggccgcgccggaggcggcaaggacgacgtacaggagcccactactaagctgcacaccgtccagcgtgtcgaggttaggtcgcgaggccgagcagcagagcccgtcgtggacggaggatcgacggcggggcccaactaatgccgcgcgcccggttcgtagcgcagcagactgcgcgatagatgagactgctagtgttctgaaatctgaatgttttggttgaaagacatctcttttatctggtagctggtgcaactagctgttatggacttatgggtacgagtagttttcgtggtaacatgtgtaaccgcgtgagattaataaaagcatatcaataaatttgtgctttcgatttgtcact

SEQ ID NO: 101853 - DNA, 1696 bp, Zea Mays
gaaaggaatagataccagagaaattcctggcgtgaaccacgggtgttgttcacatttggtaccagagccaatactggatcctccacacgggtactggacgagatcgcaatcgaagttgggcggcatggcgccagcgaagacggacgatcctttgtcccagcttctggcgaagatcgaggagggaaacaaggagactcaccgacgcatggaggcgattcagggggcggtgggaaatatggaggcggcggtcaaggtggtgatgacggagcacggagatcttcagaagtggaaaccggaggtggaagcgaaagtgacggagatttctgatgctctaaaggcgatccagatccagatgggaaagatggagaagaagccgctcggtttcgggtcgagacaggaagaagaaggagaagacggatttctgaagccgccaccatctgattcttcgaatttggagtttcgtcgtgaagaagggcggacccaattctcgcatggagatatctttactgggttgcaggtgccggaggaagttctggagtccaggcttcttcgtaaagggggtaaggtgatttcgcagttgctcattaagtggtccaattggccggtgtcactgtcaacctgggaggatgaagaggccattaagcagaaatttccacaagcaccagcttggggtcaagctgtcgttaaagaagggggaaatgtcagcagagcagatcacatggaccatgcagaggagcggactcaagcagtgcaacagaaggcacagacagagggagtcaaggaagacaatcagagcccgcgcagccgtcgtgtaccaaagccaaataccaagtacatcggtgcagagtggcgcgtataggtatacggagttatacgtattgatgagggcaggtgtgccggtataaataatattgtaatcgtttctaaactcagtctggaacatgttattgccgagtcggcaagaaaggaatagataccagagaaattcctggcgtgaaccacgggtgttgttcacactcgctgtccctgcctgactcttaaaaagggcggcgtgtcaccgcctggttactcacagtcatagattcacgccgcggaacgcggattccaagaacccaagtgaatcgcggctcctcgagtccggcggtgccgtccggagaggtagagctagactgctagagcacagccccgccatggcggccgcggcgcgcgcgatcatctgcgagctggcgccgcagaaggtgtcgtcgacggcgtcggggcccgcggcgccgaagaagcgtgacgccgggacgaaggtggtgctgcagccccgcctctgcacgctccggtcgtacggcgccggcagcggcgtggtgacgcggaggattctggccggggaggaggacggcagcggggccgccgactcgggcggctccgcggcgttgccgttcttcgcctcgctcgctgactacatcgagagctcccgcaagagccaggacttcgagaccatctccggccgcctcgccatggtgagtgactgatgagggcccgctctgctctgctctgctctgctgtctgctctactcctccctgtacacagagtacacgtcggatccacggcacggctgaattaaacctcgcgctgccggtgctgctacgtacgtacgtacatgcaggtggcgttcgcggcggcggtggccgtggagacgacgacggg

SEQ ID NO: 101854 - DNA, 1240 bp, Zea Mays
cactcgctgtccctgcctgactcttaaaaagggcggcgtgtcaccgcctggttactcacagtcatagattcacgccgcggaacgcggattccaagaacccaagtgaatcgcggctcctcgagtccggcggtgccgtccggagaggtagagctagactgctagagcacagccccgccatggcggccgcggcgcgcgcgatcatctgcgagctggcgccgcagaaggtgtcgtcgacggcgtcggggcccgcggcgccgaagaagcgtgacgccgggacgaaggtggtgctgcagccccgcctctgcacgctccggtcgtacggcgccggcagcggcgtggtgacgcggaggattctggccggggaggaggacggcagcggggccgccgactcgggcggctccgcggcgttgccgttcttcgcctcgctcgctgactacatcgagagctcccgcaagagccaggacttcgagaccatctccggccgcctcgccatggtggcgttcgcggcggcggtggccgtggagacgacgacgggcagctccctgttcaagaagctggacaccatggagatcgaggaggcggcgggggtgtgcgtggcggtggtcgccagcgccgcggcgttcgcatgggcctccagcgcgcgcaataggatcgggcagatgttcacgctgggctgcaacgccttcgtcgactccctgatcgacaatatcgtcgaggcgctcttctccgagggcgagctgcaggactggtccgatgacatatgaacatgcacatgcatatatagagactaatagtagacagacagtaatacagtatacgtacatacatagagtcaactattaacagtaagacactaggtagatgaagttgttaagtgagttccatgcattttcgcaagcttcgtcatcgctgcacaacggcaaggctgaatatttcagagatggatcgttgattagagctccgcattctgcgtaggaacacacaagcagggatgtctttcagaagtgaggcggctcttaaagccttcaaggttgtgaaatatgtagatctcttctcttgggagaaatagtggtatcctactatcctaggctctggaaagattggcccccagaattaactgtacctgctactagtactactagctataccgagtgtatttagagaatgaatcatgtaatcaaatccatgtaatatatgccaagtgtagtcagagtcaaatctggagtattgattcttgaca

SEQ ID NO: 101855 - DNA, 372 bp, Zea Mays
atgagtaatattggggcacacgtgtatgatagtaaatggcagcagattaggctattgtttttgtcatcgtgtgaatttccttccctttggagtttcgagcacttgacttccctgtggcctgagtttttgatgtctacagaagtacaggaatcgacggtgatgattagggtttctccttcctacgcctcgatcctctcctccacccgattcctcaggctcaacgaaccaacagcagtagtaatcagaagcggtgaaacaatatcgagtccagtgatgctagtacactactcaggttacattttgatcaggatgcattctcaattgcttcaatgcaccccaacacgcttgccttttgggacatcgctgacataa

SEQ ID NO: 101856 - DNA, 2508 bp, Zea Mays
ctactactccatttggcgcctatgcctatcccatccgtttctccagtttcgtcttccccgctcgctgcagctccactcagagcctccgttcccaactcgaatctccccagatcctccgcatcatctgaaaacccagatgcttctcctccagcccagtgcagtccctgcgcctgctctgcgggggaggcctcggccacgtcggcggctggtgccgcctcccctcgcctccgcgcccgcttccatcgtcgtcagctccgacgaggacgcattcaccaggtgctccgggtacctgttcgaggagggcgcggccaccgagtcggagctccccaccgcgtacgacctccccggcatcgcggccgtgtaccgccgccgcccgctcctcgtgctccgccgctccctgcagatcggcacctccttcggccggtggttcgcgctgcggtacctcgatcgcgtcaacgagcgcgccgacgacatgttcgagcttcgggcggctcagctcaggaggatactcttggagcttggcccggcatttgtgaagatcgcacaagcagtttcgtcacggccggatgttgttccacctgcataccttgatgagctctcactacttcaggaccgcatagcaccattttcaaacgatgttgcttttaatattatagagaaagagcttgggcttccactggatatggttttctctgagataacaccagagcctgttgctgctgcatctcttgggcaggtttaccaggctaggctccgctccagtgggaagattgttgctgtcaaagtacaaagacctggagttcaagcagcaatttcattagacatatatatcttgaggttcctagctagtcttgcaaggaaggctgccaagttgaacacagaccttccagctgtgcttgacgaatgggcatcaagcctattccgggagatggattatagagaagaagcaagaaatggacttaagttcagagaattgtttgggaaatttagagatgtgtcggttcctgaaatgtatctggaacagacaagaaggcgagtccttatcatggaatggatcgagggggaaaagttatcagaagtcagagatcaatatttggttgaggttggagtatattgttcactttcacagctattagaatatggattctatcatgcagatccacaccctggaaatcttttgcgtacagttgatgggaaattagcctacttagattttgggatgatgggagaattccgacaagaacttcgtgatggatttattgaagcttgtcttcatcttgttaaccgtgattttgatgctttagcaaaagactttgtaacccttggtttacttcctccaactgcccagaaaggtgaagtcacaaaggcattgacaggtgtatttgagaatgctgttaacagaggagttcagaatataagctttggagatctgtcaggaaatcttggacgaacaatgtataaattcaagttccagataccgtcttacttttcccttgtaattcgaagccttgctgttttagaaggtatcgcaatcagcttcaatccaaagtataaagttctggggagttcatatccatggattgcaagaaaagttctcactgacagttcaccaaagcttcgatcaactttgcagactcttctttataaggatggcactttccaaattgatcgcctggaatctttgttaactgagtcacttcgtgcaagaacagagcaatcattggtcagaaatgaacaagatgtcgacagtacgagatatgcaattaagcaagtcttgtcattcacactcgctgaccagggtgcctttgtgaaggacttacttcttcaggagattgctaagggaatagatgcacttggtgtagccacattaagttctgcaacgtctgcagcagcctccagattgccattcggtggtggaccatccccattgacctcactagatgacgaagatgccacaaacttaagaaatctgtatcgcctgctcctacttttatctaaggtttctcagaaggaaaatccatctccaattcctgaatataacagtgccatagagaaggaaggtggtagcacggatgaacttgctcttgcgctgtatggaatgacctctctgccagaatttcttccagttctttctgtcattcctgagcttccaccggagtcccaacagcagttgcttcttctgccagcggatttaaccaatcgtattttatctcgggctctcgcgagaaccattagaagactcatgtaaagccataggtgcagaaattttcggtccctgcttaatttttattttactattctttttggttcactgctagaagatggggatttttttagcatctcatctacaacccaagatcaatcccttttttgttatctacgattactatgtacatattgttcaaactaaagcaggcattgtaaatggcccatgttgttatgcacatatggtgtaactgataaactttaaatatatgtgaacatagaaataattctgtaatgcaattt

SEQ ID NO: 101857 - DNA, 2577 bp, Zea Mays
ctactactccatttggcgcctatgcctatcccatccgtttctccagtttcgtcttccccgctcgctgcagctccactcagagcctccgttcccaactcgaatctccccagatcctccgcatcatctgaaaacccagatgcttctcctccagcccagtgcagtccctgcgcctgctctgcgggggaggcctcggccacgtcggcggctggtgccgcctcccctcgcctccgcgcccgcttccatcgtcgtcagctccgacgaggacgcattcaccaggtgctccgggtacctgttcgaggagggcgcggccaccgagtcggagctccccaccgcgtacgacctccccggcatcgcggccgtgtaccgccgccgcccgctcctcgtgctccgccgctccctgcagatcggcacctccttcggccggtggttcgcgctgcggtacctcgatcgcgtcaacgagcgcgccgacgacatgttcgagcttcgggcggctcagctcaggaggatactcttggagcttggcccggtatgtctcatttcctattgccttatctgatgatcataaagtttattgatgttccttttttaatcacaggcatttgtgaagatcgcacaagcagtttcgtcacggccggatgttgttccacctgcataccttgatgagctctcactacttcaggaccgcatagcaccattttcaaacgatgttgcttttaatattatagagaaagagcttgggcttccactggatatggttttctctgagataacaccagagcctgttgctgctgcatctcttgggcaggtttaccaggctaggctccgctccagtgggaagattgttgctgtcaaagtacaaagacctggagttcaagcagcaatttcattagacatatatatcttgaggttcctagctagtcttgcaaggaaggctgccaagttgaacacagaccttccagctgtgcttgacgaatgggcatcaagcctattccgggagatggattatagagaagaagcaagaaatggacttaagttcagagaattgtttgggaaatttagagatgtgtcggttcctgaaatgtatctggaacagacaagaaggcgagtccttatcatggaatggatcgagggggaaaagttatcagaagtcagagatcaatatttggttgaggttggagtatattgttcactttcacagctattagaatatggattctatcatgcagatccacaccctggaaatcttttgcgtacagttgatgggaaattagcctacttagattttgggatgatgggagaattccgacaagaacttcgtgatggatttattgaagcttgtcttcatcttgttaaccgtgattttgatgctttagcaaaagactttgtaacccttggtttacttcctccaactgcccagaaaggtgaagtcacaaaggcattgacaggtgtatttgagaatgctgttaacagaggagttcagaatataagctttggagatctgtcaggaaatcttggacgaacaatgtataaattcaagttccagataccgtcttacttttcccttgtaattcgaagccttgctgttttagaaggtatcgcaatcagcttcaatccaaagtataaagttctggggagttcatatccatggattgcaagaaaagttctcactgacagttcaccaaagcttcgatcaactttgcagactcttctttataaggatggcactttccaaattgatcgcctggaatctttgttaactgagtcacttcgtgcaagaacagagcaatcattggtcagaaatgaacaagatgtcgacagtacgagatatgcaattaagcaagtcttgtcattcacactcgctgaccagggtgcctttgtgaaggacttacttcttcaggagattgctaagggaatagatgcacttggtgtagccacattaagttctgcaacgtctgcagcagcctccagattgccattcggtggtggaccatccccattgacctcactagatgacgaagatgccacaaacttaagaaatctgtatcgcctgctcctacttttatctaaggtttctcagaaggaaaatccatctccaattcctgaatataacagtgccatagagaaggaaggtggtagcacggatgaacttgctcttgcgctgtatggaatgacctctctgccagaatttcttccagttctttctgtcattcctgagcttccaccggagtcccaacagcagttgcttcttctgccagcggatttaaccaatcgtattttatctcgggctctcgcgagaaccattagaagactcatgtaaagccataggtgcagaaattttcggtccctgcttaatttttattttactattctttttggttcactgctagaagatggggatttttttagcatctcatctacaacccaagatcaatcccttttttgttatctacgattactatgtacatattgttcaaactaaagcaggcattgtaaatggcccatgttgttatgcacatatggtgtaactgataaactttaaatatatgtgaacatagaaataattctgtaatgcaattt

SEQ ID NO: 101858 - DNA, 2218 bp, Zea Mays
atttatttcagttcacttcaacacatttcaatttggttatagcatttgtaggcattggcatgagataaaattagactgtagtatgaaaagtaaccattaacttgaggcttagaatagtattcctatgcggacccttaagaatgatttcaatgggctatgtggatagtgacagtttgctagaaaaaaaaacaatctaggaaaaattatgggaggtggaggtcaacatccaaaatgtggtattggttgcgggatccaaatgaacatttaaatttgttaattatttttttgttctatgatcctattcatagttcactatgctcaagtaattttgaggctgcaagttatggacacatgttaccatatatccaaggaggaacataaatatcaatctttttcaatgtgatagtggtttgaaaccattgcatttgtacttttaccgtgagagtccatagcttttgtgataaacatgttttcagaagcctggccaagaaaagttgatattattctagtattctagcaggactgtgctagcagtattctaggctattgcagattctgactaaaacattaggtgtatatccttagatattcacattgaatacaggtaaatcacatttgatgcaggagatggattatagagaagaagcaagaaatggacttaagttcagagaattgtttgggaaatttagagatgtgtcggttcctgaaatgtatctggaacagacaagaaggcgagtccttatcatggaatggatcgagggggaaaagttatcagaagtcagagatcaatatttggttgaggttggagtatattgttcactttcacagctattagaatatggattctatcatgcagatccacaccctggaaatcttttgcgtacagttgatgggaaattagcctacttagattttgggatgatgggagaattccgacaagaacttcgtgatggatttattgaagcttgtcttcatcttgttaaccgtgattttgatgctttagcaaaagactttgtaacccttggtttacttcctccaactgcccagaaaggtgaagtcacaaaggcattgacaggtgtatttgagaatgctgttaacagaggagttcagaatataagctttggagatctgtcaggaaatcttggacgaacaatgtataaattcaagttccagataccgtcttacttttcccttgtaattcgaagccttgctgttttagaaggtatcgcaatcagcttcaatccaaagtataaagttctggggagttcatatccatggattgcaagaaaagttctcactgacagttcaccaaagcttcgatcaactttgcagactcttctttataaggatggcactttccaaattgatcgcctggaatctttgttaactgagtcacttcgtgcaagaacagagcaatcattggtcagaaatgaacaagatgtcgacagtacgagatatgcaattaagcaagtcttgtcattcacactcgctgaccagggtgcctttgtgaaggacttacttcttcaggagattgctaagggaatagatgcacttggtgtagccacattaagttctgcaacgtctgcagcagcctccagattgccattcggtggtggaccatccccattgacctcactagatgacgaagatgccacaaacttaagaaatctgtatcgcctgctcctacttttatctaaggtttctcagaaggaaaatccatctccaattcctgaatataacagtgccatagagaaggaaggtggtagcacggatgaacttgctcttgcgctgtatggaatgacctctctgccagaatttcttccagttctttctgtcattcctgagcttccaccggagtcccaacagcagttgcttcttctgccagcggatttaaccaatcgtattttatctcgggctctcgcgagaaccattagaagactcatgtaaagccataggtgcagaaattttcggtccctgcttaatttttattttactattctttttggttcactgctagaagatggggatttttttagcatctcatctacaacccaagatcaatcccttttttgttatctacgattactatgtacatattgttcaaactaaagcaggcattgtaaatggcccatgttgttatgcacatatggtgtaactgataaactttaaatatatgtgaacatagaaataattctgtaatgcaatttgcctcgaaagc

SEQ ID NO: 101859 - DNA, 2419 bp, Zea Mays
atttatttcagttcacttcaacacatttcaatttggttatagcatttgtaggcattggcatgagataaaattagactgtagtatgaaaagtaaccattaacttgaggcttagaatagtattcctatgcggacccttaagaatgatttcaatgggctatgtggatagtgacagtttgctagaaaaaaaaacaatctaggaaaaattatgggaggtggaggtcaacatccaaaatgtggtattggttgcgggatccaaatgaacatttaaatttgttaattatttttttgttctatgatcctattcatagttcactatgctcaagtaattttgaggctgcaagttatggacacatgttaccatatatccaaggaggaacataaatatcaatctttttcaatgtgatagtggtttgaaaccattgcatttgtacttttaccgtgagagtccatagcttttgtgataaacatgttttcagaagcctggccaagaaaagttgatattattctagtattctagcaggactgtgctagcagtattctaggctattgcagattctgactaaaacattaggtgtatatccttagatattcacattgaatacaggtaaatcacatttgatgcaggagatggattatagagaagaagcaagaaatggacttaagttcagagaattgtttgggaaatttagagatgtgtcggttcctgaaatgtatctggaacagacaagaaggcgagtccttatcatggaatggatcgagggggaaaagttatcagaagtcagagatcaatatttggttgaggttggagtatattgttcactttcacagctattagaatatggattctatcatgcagatccacaccctggaaatcttttgcgtacagttgatgggaaattagcctacttagattttgggatgatgggagaattccgacaagaacttcgtgatggatttattgaagcttgtcttcatcttgttaaccgtgattttgatgctttagcaaaagactttgtaacccttggtttacttcctccaactgcccagaaaggtgaagtcacaaaggcattgacaggtgtatttgagaatgctgttaacagaggagttcagaatataagctttggagatctgtcaggaaatcttggacgaacaatgtataaattcaagttccagataccgtcttacttttcccttgtaattcgaagccttgctgttttagaaggtatcgcaatcagcttcaatccaaagtataaagttctggggagttcatatccatggattgcaagaaaagttctcactgacagttcaccaaagcttcgatcaactttgcagactcttctttataaggatggcactttccaaattgatcgcctggaatctttgttaactgagtcacttcgtgcaagaacagagcaatcattggtcagaaatgaacaagatgtcgacagtacgagatatgcaattaagcaagtcttgtcattcacactcgctgaccaggttggaccgaaaccaaactgggcaaataatttttgaatactgaaccataaccaaacaagatagaacttggcagataaatatttgaagctctatgctctcttgcagggtgcctttgtgaaggacttacttcttcaggagattgctaagggaatagatgcacttggtgtagccacattaagttctgcaacgtctgcagcagcctccagattgccattcggtggtggaccatccccattgacctcactagatgacgaagatgccacaaacttaagaaatctgtatcgcctgctcctacttttatctaaggtttctcagaaggaaaatccatctccaattcctgaatataacagtgccatagagaaggaaggtggtagcacggatgaacttgctcttgcgctgtatggaatgacctctctgccagaatttcttccagttctttctgtcattcctgaggtaagttggacataagttacgtgagaccatatatgtcaaaatccacatggcacatggctcatttgtgtatacccttctccatcgaagcttccaccggagtcccaacagcagttgcttcttctgccagcggatttaaccaatcgtattttatctcgggctctcgcgagaaccattagaagactcatgtaaagccataggtgcagaaattttcggtccctgcttaatttttattttactattctttttggttcactgctagaagatggggatttttttagcatctcatctacaacccaagatcaatcccttttttgttatctacgattactatgtacatattgttcaaactaaagcaggcattgtaaatggcccatgttgttatgcacatatggtgtaactgataaactttaaatatatgtgaacatagaaataattctgtaatgcaatttgcctcgaaagcatggattca

SEQ ID NO: 101860 - DNA, 1339 bp, Zea Mays
atcctgtctgctgtctctcccgagtgacctcaaagtcagcgagcgccacatccgactccgagggccaccggtggccggttgcccgttgacgccgcggcacgcgattccgatcctgggttttacctaagaaataaacaactctgaatttcccaagacctgaagaccagccagcgcaagcctgtggctgccacggtgccaccatgtcccgcggcagtgccgcctccgtattcctcggcgtcgacgttggtactggcagcgctcgtgcaggactcttcgatgaaaacggcaaattgctggggtcagcaagcagccctatacagatatggaaagagaaagactgtatcgagcaatcatcaaccgatatctggcatgcggtctgtgctgcggtgaaatctgcgtgctcactggcaaatgttgctcctgaggacgttgctggccttggctttgccgccacttgctcccttgttgctgtcgatgctgatggttcccctgtttcggtttctttgagtggtgatacaaggaggaatatcattgtgtggatggaccatagagctgtgaatcaggcagagcgaatcaatgctaccaattcgccagtactgcaatactgcggtgggggtgtttccccagaaatgcaggctccaaagctcctatggatgaaggaaaatcttctagattcgtggtctatggtatgtaggtggatggacctaagtgactggttagcatatagagcaacaggtgacgacactcgcagcttatgcacaactgtctgcaaatggacatatcttggacatgcacacatgaaacagtggaaggaatctgattcacgtgatatggaggcatgcggatgggacaatgttttttgggaagaaatagggttgggagacctcctcgaaggaaattgtgcaaaaataggacgcagtgtcgcttttcctggtcatgctcttggttctggtttgacgcctactgctgcaaaggagttaggcttacttcctggtactcctgttggaacctcacttattgatgctcatgctggtggagttggagtcatggaaagcattcctgatgcaggatctaaagctggttgtcagtgatgagtaattttgtgttttgctagagaaattgttttcaaaacattgtgtatgttgtatatattctaatatgtttttaacagtgtctgatgaacatgcaatatgtcaccgtatggtattggtatgtgggacatcaacctgccacatggctgtttcaaaggacagattgtttatacctggtgtctgggggccgttttggtctggtacagctgccttctcaaatatatattttaatttcccttaaaaacaaa

SEQ ID NO: 101861 - DNA, 210 bp, Zea Mays
tctgggggccgttttggtctgcgatgatccctgagttttggctcacagaaggtggccaaagtgcaactggcgctctgctcgattacattattgaaaaccatgttgcttctcctcttctttctaaccatgctgcttctcaaagtatatccatatttgagctactgaacaagatgttgctttctatgtcacaagagcagaatagtccgtttc

SEQ ID NO: 101862 - DNA, 737 bp, Zea Mays
actgcctcacttcagcctcggacctgaacagacctcaggaaaggggagacctggaacgaccgtcgagctagagcggctgcgcgctgcgccgagagctggggagtggggactggggaccgaattgaaggcaagaaagtagaaacgaaccaccacaggcggcgcggcaatggatgagcgcggggagaaggaggaggagcacggagtagtggaggaggagacggcggcggttgtgctcaaggaggtggaggtggagatggagatggtcggcggctctgaagaagcctcggcggcgccgctcctcctcgcgcacccgtgctcgctgctgcagctcctgctccgcgcctgcgccggctgcctggtgcgcctgctgcacggccactgcagcgacggcgccaacgacgacccaaaagctgctgccgacgacgacgacgctgcgcctgaagctgctgctgctgcggcggcggcggcgggcgatggcggcgacaaggcagccacctacttgtacatgcaggaggtgtgggcagtgaggaggaggccgacgacgcccggccgtccgagagaaggttccggtggcaatggagggaaccaccactagctagctagctctctagcgcgacgccgctgcaacgtacgtacggtgaccctagcttgttcgcttgcgcgtgatcagagtgcgtagcttcttgtaagttgtaacttacttggtactcgtactagatttcgaaagtaacgtcgtt

SEQ ID NO: 101863 - DNA, 614 bp, Zea Mays
acaaatgttcccatgaacacatcatcggcatcctctcggtctcgtctcaggagcctccctgccggaaactaaagagtagtgtcacttacgagttagagacaccgtccccactccgctctccagaaactcccccgtcgtctagctaggcctaggcgcctagccacctcccaggaatggatcagcgcgtctcccaggaatcgtcgtcggatcgtcggcgcaagcgcaaagacgtcgcggcggcggtgccggagggcgtccacggagagtccacggacaacggcgggtacgacgatactgatgagaccgcgggtgtgctgaccaaggagcagcaggcggtggatgtggtcgaagaacaagcctcggcgccgctccagctcctgctccgcgcctgcgccggctgcctggtgggccttctgcgcggctaccgcagcgacccgaagccggccgccgccgccgctgctgcttctgtggccgcagaatcgccgcaggaaggagacaagccgtttggcagcgaggaggtgggcactcaggtgttggcggcgacgaggacgccgccgtggccgccgtgccctcctgaagaaggttccggtggcaatggaggcagccacaactag

SEQ ID NO: 101864 - DNA, 1557 bp, Zea Mays
cacttaagactcgagggcaaccaaacaccagcgccaatgcaagctacacacggttctagattgataaattctaatccggcacagttcttgctcaggcaagcagtcaagcatcgcccatcggaacccatggcaactcctgttgtgtctgtcaccgacgtcagctatgtcgctgcgccggctagcgcgctgccacccgaacctgtcatcaagctcaacgccatggaggcgcagtgggtcgtggttccgctgctgcagcacctcctgctcttcgagggcgacgatctgccgcccttcgacgccgtcctccggtccctcagatcctccctcgcggcgaccctagccacccacgccccgctcgccggcaagctccactacctcgcggacaccggcgacgtcgccatctgccgctccaccggcggccgcggcgtcaggttcgtcgccgcggagtgcgacgccgacgtccgccgcctcgcgggcgacgaggaccacgacgtgctcacgttcgagcgcctcgttccggagctcgacatgaccctgctgccggcgccggtgctggcggtgcaggcaacacgtctcgcgggcggcggggtcgccctcggtgtcagcgtgcaccacggcgtcgccgacggccgcgccctgtggaggttcgtcgaggcgtgggccgcggcgtgccgtggggacacgccgcccgcgccgccggtgttcgaccgctcccgtgtcagaatgcccggcggggaggagctggcccggagcatcctgcggaagtacgcgccagatttgccacgggctagcatgcccgcgattatgcaagaagaccgcctgcggttcacccgccggacgttcaccctggacgcccagcacatggagcagctgaagcagcgcatcgtacgcctcggcgaagcccacagcgcgcagctgagccgctccccgtccagcttcgtggccgtcgtcgcgctcgcctggacgtgcttcgtccgcggcaggggtttcgcggcggacgaggacgtgttcctcttcttcttcgccgacgcccgcgaccggctcgaccctcccgccggagcggactacttcggcgcgtgcctgagcggatgcctcgcgaggctgcccgcgcgggagctccacggcgagggcgcgctggcggccgcggcgtcggcggtgcagcgcgcggtgcaggagatggtggaggacccgctcggttgctggcccgggtgggagttcttcaggatggccggcgacccgacggttcggcctgaacggttgatgaacgtgtcggggtcgccgggcttcagggcgtacgaggtcgccgacttcgggtgggggaggccgaggcggacggagcccatcaggatgaaccacgacgggcagctggcactggtgcgcggcagggacggcgacggggtgcaggcgtcggtgtccatgctccggcggaagcacgtggacgctttcaaatcagagttcctcaagctactcggttgatgacgttgcaacgtagtagcagtacgatttgttggtcgtgttgcatcattgcaacttcctaatttcatcacattgaacaca

SEQ ID NO: 101865 - DNA, 1851 bp, Zea Mays
aactggtagtgagtgtcctttgaagctgggctagacgctagagcacatcctgtgctgtgagaaacgtaacctaataaaccttgtgttcagcgatttgacggcctccgttatccgaagaaacaacttcaaccagacatgtggcgagcgaggtgattagctagtgacaagtgttgatctaagggagatcgttttgagcatgctatgatggagctctactccggatatcttgaagatcatttcaacctccacaagctaagctccgcctcgccgccgcagtacatgacgccggcggcgtcgcccgcgcagttcgcgccggcgcccctcaggatggggtacgggcggccggcgcccgtgatgggcatgtggagcagcgagccgttcaaggtcgacagcggcgggcacgccacctgcagcgcgtccaccgtcatggaggcggacaccaagctcgagacaagcaggctacaagatgttccacaggtagcactcgagccagagaggagtacggatcaggaaacgagcaggccgccagagagggtacgtacggtcatgagaaggctcgcgcagaacagggaggctgctcggaagagtcgcctgcggaaaaaggcctacatccagcagctagagacaagccggatgaagctggcccagctagagctggagcttcaacgggctcgacggcagcagggcgcgtacgcaaatgggagcatgggagacccagctctcggatacacagggtcgatcgatccaggcgtcgccgcgttcgagatcgaatacaggcactgggtggacgagcagaagcggcacacggcggagctgatgtcggcgctccaggggcagcagacgtcggagctggagctccgcttgctggtggagacggggctcagcaactacgagcacctcttcaggatcaaggcgctggccgccaacgcggacgtgttccacgtcatgtcgggcgtgtggaagacccccgccgagaggttcttcctctggatcggcgggttcaggccgtcggaggtcctaaagattctgagcccgcagctggagccgctggcggaggcgcagcgcatgctcgtgggcggcctccagcacacgtcaacgcaggcggaggacgcgctgtcgcagggcatggagaagctacagcagaacctcgccgagatcctgaccgccgaggctgaccccttcggggcccccgacgcctacatgctgcagatggccactgcggtggagaagctgaaagagctcgtcaacttcgtcacccaggcggaccatctccggctgatgacgctgcaacagatgcacaagatcctgacgacgcggcaggcggccaggggcctgctggcgctcggcgactacttccagcgcctccgcacgctgagctcgctgtgggcggcgcgcccgcgggaggcggcgattagctagatgcccgcggtgtgggtgtggccagccaaaggcccaccaaagaacacgacgacgacgaatagtagcagttcgctgtatactttcccaagctgtaaagtccagtggaggacgaaaaaagcgacctcacagtcactggggttcggttccgacgaaaggatgcaaggcttttaagtcaatggcggtgtctccgcagcagcagcagcagcagcaagcggtgtgcgtttgtcaagcgaagcgactagagaataaaacggaaatggattgaggccttctctatttgacgggcggaagacgtgtacatatattgttttgccacccggccgtggccttctagagaggcgtatgattcatgatgcaggccatactaggatcatatttgtacgtggtggaaccgagagcaaaacaatattacaatagtttaaattagggtat

SEQ ID NO: 101866 - DNA, 1842 bp, Zea Mays
aactggtagtgagtgtcctttgaagctgggctagacgctagagcacatcctgtgctgtgagaaacgtaacctaataaaccttgtgttcagcgatttgacggcctccgttatccgaagaaacaacttcaaccagacatgtggcgagcgaggtgattagctagtgacaagtgttgatctaagggagatcgttttgagcatgctatgatggagctctactccggatatcttgaagatcatttcaacctccacaagctaagctccgcctcgccgccgcagtacatgacgccggcggcgtcgcccgcgcagttcgcgccggcgcccctcaggatggggtacgggcggccggcgcccgtgatgggcatgtggagcagcgagccgttcaaggtcgacagcggcgggcacgccacctgcagcgcgtccaccgtcatggaggcggacaccaagctcgagacaagcaggctacaagatgttccacaggtagcactcgagccagagaggagtacggatcaggaaacgagcaggccgccagagagggtcatgagaaggctcgcgcagaacagggaggctgctcggaagagtcgcctgcggaaaaaggcctacatccagcagctagagacaagccggatgaagctggcccagctagagctggagcttcaacgggctcgacggcagcagggcgcgtacgcaaatgggagcatgggagacccagctctcggatacacagggtcgatcgatccaggcgtcgccgcgttcgagatcgaatacaggcactgggtggacgagcagaagcggcacacggcggagctgatgtcggcgctccaggggcagcagacgtcggagctggagctccgcttgctggtggagacggggctcagcaactacgagcacctcttcaggatcaaggcgctggccgccaacgcggacgtgttccacgtcatgtcgggcgtgtggaagacccccgccgagaggttcttcctctggatcggcgggttcaggccgtcggaggtcctaaagattctgagcccgcagctggagccgctggcggaggcgcagcgcatgctcgtgggcggcctccagcacacgtcaacgcaggcggaggacgcgctgtcgcagggcatggagaagctacagcagaacctcgccgagatcctgaccgccgaggctgaccccttcggggcccccgacgcctacatgctgcagatggccactgcggtggagaagctgaaagagctcgtcaacttcgtcacccaggcggaccatctccggctgatgacgctgcaacagatgcacaagatcctgacgacgcggcaggcggccaggggcctgctggcgctcggcgactacttccagcgcctccgcacgctgagctcgctgtgggcggcgcgcccgcgggaggcggcgattagctagatgcccgcggtgtgggtgtggccagccaaaggcccaccaaagaacacgacgacgacgaatagtagcagttcgctgtatactttcccaagctgtaaagtccagtggaggacgaaaaaagcgacctcacagtcactggggttcggttccgacgaaaggatgcaaggcttttaagtcaatggcggtgtctccgcagcagcagcagcagcagcaagcggtgtgcgtttgtcaagcgaagcgactagagaataaaacggaaatggattgaggccttctctatttgacgggcggaagacgtgtacatatattgttttgccacccggccgtggccttctagagaggcgtatgattcatgatgcaggccatactaggatcatatttgtacgtggtggaaccgagagcaaaacaatattacaatagtttaaattagggtat

SEQ ID NO: 101867 - DNA, 1640 bp, Zea Mays
aactggtagtgagtgtcctttgaagctgggctagacgctagagcacatcctgtgctgtgagaaacgtaacctaataaaccttgtgttcagcgatttgacggcctccgttatccgaagaaacaacttcaaccagacatgtggcgagcgaggtgattagctagtgacaagtgttgatctaagggagatcgttttgagcatgctatgatggagctctactccggatatcttgaagatcatttcaacctccacaagctaagctacaagatgttccacaggtagcactcgagccagagaggagtacggatcaggaaacgagcaggccgccagagagggtcatgagaaggctcgcgcagaacagggaggctgctcggaagagtcgcctgcggaaaaaggcctacatccagcagctagagacaagccggatgaagctggcccagctagagctggagcttcaacgggctcgacggcagcagggcgcgtacgcaaatgggagcatgggagacccagctctcggatacacagggtcgatcgatccaggcgtcgccgcgttcgagatcgaatacaggcactgggtggacgagcagaagcggcacacggcggagctgatgtcggcgctccaggggcagcagacgtcggagctggagctccgcttgctggtggagacggggctcagcaactacgagcacctcttcaggatcaaggcgctggccgccaacgcggacgtgttccacgtcatgtcgggcgtgtggaagacccccgccgagaggttcttcctctggatcggcgggttcaggccgtcggaggtcctaaagattctgagcccgcagctggagccgctggcggaggcgcagcgcatgctcgtgggcggcctccagcacacgtcaacgcaggcggaggacgcgctgtcgcagggcatggagaagctacagcagaacctcgccgagatcctgaccgccgaggctgaccccttcggggcccccgacgcctacatgctgcagatggccactgcggtggagaagctgaaagagctcgtcaacttcgtcacccaggcggaccatctccggctgatgacgctgcaacagatgcacaagatcctgacgacgcggcaggcggccaggggcctgctggcgctcggcgactacttccagcgcctccgcacgctgagctcgctgtgggcggcgcgcccgcgggaggcggcgattagctagatgcccgcggtgtgggtgtggccagccaaaggcccaccaaagaacacgacgacgacgaatagtagcagttcgctgtatactttcccaagctgtaaagtccagtggaggacgaaaaaagcgacctcacagtcactggggttcggttccgacgaaaggatgcaaggcttttaagtcaatggcggtgtctccgcagcagcagcagcagcagcaagcggtgtgcgtttgtcaagcgaagcgactagagaataaaacggaaatggattgaggccttctctatttgacgggcggaagacgtgtacatatattgttttgccacccggccgtggccttctagagaggcgtatgattcatgatgcaggccatactaggatcatatttgtacgtggtggaaccgagagcaaaacaatattacaatagtttaaattagggtat

SEQ ID NO: 101868 - DNA, 1565 bp, Zea Mays
aactggtagtgagtgtcctttgaagctgggctagacgctagagcacatcctgtgctgtgagaaacgtaacctaataaaccttgtgttcagcgatttgacggcctccgttatccgaagaaacaacttcaaccagacatgtggcgagcgaggtgattagctagtgacaagtgttgatctaagggagatcgttttgagcatgctatgatggagctctactccggatatcttgaagatcatttcaacctccacaagctaaggtcatgagaaggctcgcgcagaacagggaggctgctcggaagagtcgcctgcggaaaaaggcctacatccagcagctagagacaagccggatgaagctggcccagctagagctggagcttcaacgggctcgacggcagcagggcgcgtacgcaaatgggagcatgggagacccagctctcggatacacagggtcgatcgatccaggcgtcgccgcgttcgagatcgaatacaggcactgggtggacgagcagaagcggcacacggcggagctgatgtcggcgctccaggggcagcagacgtcggagctggagctccgcttgctggtggagacggggctcagcaactacgagcacctcttcaggatcaaggcgctggccgccaacgcggacgtgttccacgtcatgtcgggcgtgtggaagacccccgccgagaggttcttcctctggatcggcgggttcaggccgtcggaggtcctaaagattctgagcccgcagctggagccgctggcggaggcgcagcgcatgctcgtgggcggcctccagcacacgtcaacgcaggcggaggacgcgctgtcgcagggcatggagaagctacagcagaacctcgccgagatcctgaccgccgaggctgaccccttcggggcccccgacgcctacatgctgcagatggccactgcggtggagaagctgaaagagctcgtcaacttcgtcacccaggcggaccatctccggctgatgacgctgcaacagatgcacaagatcctgacgacgcggcaggcggccaggggcctgctggcgctcggcgactacttccagcgcctccgcacgctgagctcgctgtgggcggcgcgcccgcgggaggcggcgattagctagatgcccgcggtgtgggtgtggccagccaaaggcccaccaaagaacacgacgacgacgaatagtagcagttcgctgtatactttcccaagctgtaaagtccagtggaggacgaaaaaagcgacctcacagtcactggggttcggttccgacgaaaggatgcaaggcttttaagtcaatggcggtgtctccgcagcagcagcagcagcagcaagcggtgtgcgtttgtcaagcgaagcgactagagaataaaacggaaatggattgaggccttctctatttgacgggcggaagacgtgtacatatattgttttgccacccggccgtggccttctagagaggcgtatgattcatgatgcaggccatactaggatcatatttgtacgtggtggaaccgagagcaaaacaatattacaatagtttaaattagggtat

SEQ ID NO: 101869 - DNA, 1791 bp, Zea Mays
cattccattccgagttggaaagaaagaaagcctagcctgctgccttttccttccttttttcccccaccctccttcttttccatactctactattgcatagtagccttcaacaacggtgctggtgctctgtcggtccgtctgtcgttactcacagcgcttcccggcccgccggctcttgttcttgtctctgtttgccccgtggccagctccgcctcgccgccgcagtacatgacgccggcggcgtcgcccgcgcagttcgcgccggcgcccctcaggatggggtacgggcggccggcgcccgtgatgggcatgtggagcagcgagccgttcaaggtcgacagcggcgggcacgccacctgcagcgcgtccaccgtcatggaggcggacaccaagctcgagacaagcaggctacaagatgttccacaggtagcactcgagccagagaggagtacggatcaggaaacgagcaggccgccagagagggtcatgagaaggctcgcgcagaacagggaggctgctcggaagagtcgcctgcggaaaaaggcctacatccagcagctagagacaagccggatgaagctggcccagctagagctggagcttcaacgggctcgacggcagcagggcgcgtacgcaaatgggagcatgggagacccagctctcggatacacagggtcgatcgatccaggcgtcgccgcgttcgagatcgaatacaggcactgggtggacgagcagaagcggcacacggcggagctgatgtcggcgctccaggggcagcagacgtcggagctggagctccgcttgctggtggagacggggctcagcaactacgagcacctcttcaggatcaaggcgctggccgccaacgcggacgtgttccacgtcatgtcgggcgtgtggaagacccccgccgagaggttcttcctctggatcggcgggttcaggccgtcggaggtcctaaagattctgagcccgcagctggagccgctggcggaggcgcagcgcatgctcgtgggcggcctccagcacacgtcaacgcaggcggaggacgcgctgtcgcagggcatggagaagctacagcagaacctcgccgagatcctgaccgccgaggctgaccccttcggggcccccgacgcctacatgctgcagatggccactgcggtggagaagctgaaagagctcgtcaacttcgtcacccaggcggaccatctccggctgatgacgctgcaacagatgcacaagatcctgacgacgcggcaggcggccaggggcctgctggcgctcggcgactacttccagcgcctccgcacgctgagctcgctgtgggcggcgcgcccgcgggaggcggcgattagctagatgcccgcggtgtgggtgtggccagccaaaggcccaccaaagaacacgacgacgacgaatagtagcagttcgctgtatactttcccaagctgtaaagtccagtggaggacgaaaaaagcgacctcacagtcactggggttcggttccgacgaaaggatgcaaggcttttaagtcaatggcggtgtctccgcagcagcagcagcagcagcaagcggtgtgcgtttgtcaagcgaagcgactagagaataaaacggaaatggattgaggccttctctatttgacgggcggaagacgtgtacatatattgttttgccacccggccgtggccttctagagaggcgtatgattcatgatgcaggccatactaggatcatatttgtacgtggtggaaccgagagcaaaacaatattacaatagtttaaattagggtat

SEQ ID NO: 101870 - DNA, 402 bp, Zea Mays
atggggaggcacgctggcggcgtccttctcgctctgacggtggtgctgctgctcgccgccgcgagtggtggcgtcagaccagctgatcctgctgctggggccaataataacggactggcgcatggatcaacggcggcggcggagatggtcgtagctgcgccgtcagctgcacagcagctgcaggggaggagaagcaaggacgacgacggcgtgcttctgcgggaggaggtggtgcgcgcgacggggtcgagcctcccggactgctcgcacgcgtgcggggcgtgctcgccgtgcagccgcgtcatggtcagcttcaagtgctccgcggccgagccgctgccgtgccccatggtgtaccgctgcatgtgcaggggcaagtgctacccggtgccctccagctga

SEQ ID NO: 101871 - DNA, 1869 bp, Zea Mays
aggtgcatgcgggatctgcgcccgctgcggtctctcgcgagggtccccagaccgatcttcggcgagagtccaacatttcttaaatgtagaagcaactcaacaaaggcatctccaaagagttctacacagaatgctgccccaggtcctcaaggacaaccttctcagtcgggaagtaatgtttcaaagcttgctcttggaactcttgtggtcggtgcagcagctataggtgcacatcaacttggttatatagatcttcaatttaaggacaagacattgccttttagcttaaagaaggaagatgtcggaaaggtggtatatgaagatctgaagattccttctgaacagaaggttgaccagacacaaaacatgtcaggaccaaacactgagattgttcaagagaacaataatgagactcatacttcaaaggactttcgaaatggtggggtgggggcaccagagcttccaatcaatggggatcagcttgttcctgcagaagaaaagaaatcagaaaccctagcccatgagacaaatccagttccagatgaacctggatctgatactgaaatgccatctgaagattctccagctgttgatataaggacagttgccatcgatgctactgaatctagtgaagttcctcatgaacagcaaactgataagatagacggcacagttactcctgtacagtcaaccccaacaacagttagtacttacgatcaccccacagatccagactcaccaaaggatctcacaatagctggtgctgttgagcagaaatctcttgctgagacttatttactgcaagatgaacctggtctttcgaaagacgcaaccattaaagagaaaagaagcgatgaagttgttcgagaaaaaaattctgaagatggtaagattgtacttgatatcattgaggctattcatgctgccgaaaagaagcaggcagatgtagatgcatacatgtattcagaagagagaagaaagttgaaggagaagtatgaaaaggagctgaaagacaccagggccagggaactgatgtatgcagaggaggcagcaattctagataaggagctaaagaaagaaaaactgaagaatgctgctgccataaaggaactgcaagagaaggctgaacaaacgttgcaggatgagctgcagaggaagggtgaagaaacaatccaacagattgagaaggctcaagagatagcaaaagctgaactggctgcagctgttgcaaaagagaaagcatcccagattgaacagattgctgaagcaaatctcaatattgatgctctgtgtatggcattctatgcgcgatctgaagaagctaggcagagccattcagttcataaacttgctctgggcactcttgctttagaacacgctttatccagtggatcaccaatccgatcagaagtggggctattgcgaaaatctgttgaaggcattgacaaagattcactgttagaattggctttttcatcactcccagaagatgttttagattatggatcagataccaggatggggttgaagcaacagtttaactccttgaaggaaactatcagacatctcagccttctaccagcaggtggtggtggaatcctggcacacgctgttgcacgtgttgcttcttcaatcaagattaaaggcgataactctggagatggcattgagtcccttataaacaaagtagaaagcatgattgtcaatggagacttgagtacagcggccgatgccttggagcaagggctacatggaactgaagcagaggagatagctaccgagtgggtgaagcaagccaggaaacgcgctcttgcagagcagacacttgctctccttcgcgcttgtgcttcttcgaccacgttctcgtga

SEQ ID NO: 101872 - DNA, 1113 bp, Zea Mays
atggctgtgattattcaatctagaaaacgaaaacggtgtggaaggagggtgggtattacctatgggcctatggagcaaagggataggatgagattagagtatctaaatgacaaaatttggaaggatgacacaacttgcttgaacatgctaagacttaatagatctaagttctttcggttttgcaatttttttagagagcgtggttttctaaaggatacatgtcacttgtgtgttgagcaacaagtgggtatgtttctaaatacagtgggacataaccttaggaataggttagttggaactaattttgatagatccggagaaacagttagccgctatttcaacaaagtactccatgctattggtgagctgcgaggggaactaattaggcccccatctttggacactccaagcaaaatagcagggaacaacagatgggatccttactttaaggattgtattggagctattgatggtactcatgtaagagcatctgttccaaataatattgagcatgcctttcgtggtaggaaatcattttgcacatagaatgtaatggccgctgtagattttgatctacgattcacctatgtgttggctggttgggaaggtactgcacatgatgctctcgttttacgagatgctttagaacgtgagaatggacttcgtgttccacaaggaaaattctacctagtcgatgcgggatatggagccaaaccaggatttttgcccccctttcgtggtgttcgatatcacttaaatgaatggggaagtaatccagtgcaaaacgagaaggaacttttcagccttaggcactcatccctacgtgtcacagtagagagggcatttggggcactaaagaggagattcaaaattcttgatgatgctactccattgttcccttttgcaacacaagttgatattgtttgtgcttgctgcattattcacaattgggtcatacaagatgggcatgacgagttctttacagaggagagtaactatccaagctacaaccatgctaccacaagaattgggcaagcaaatgagcatgctgctatggttacttttaggcaacaaatagcagatcagatgtgggcagatcgtcaatccaacaat

SEQ ID NO: 101873 - DNA, 2042 bp, Zea Mays
atggaccaaggagcgccggaggcggacaataatgccatgccagcaccatctgacggcaattcgaacggaggtccttttcttctttctcgtctgcttcctccttccctcgtcgtcctcgcgtcgcctccttcggccctccctattaatacctgcctcctcacaaccaggtcctgtcctcggggagccgaatccacacggaccacaccagaggacgcgggggacgccccggattcttcggattccaggatggaactacacagaaatagcactaatggttcctgcctcagtgcatgtgggccactgacagactactacattcctgattacatactgaagccggcctatgaaccggtcactgttgataatgtgccatgttgtcctgtggtagtcttcatcaactctagaagtggtggccaactgggaagcagtctgataaaaacataccgtgaacttctcaatgaagcgcaggtttttgatctctcagaagagtctcctgataaggttctacatagattatacagcaactttgaaaggctcaagtctagtggtgaccatgttgctactcaaattcagaagagcttaaggctaattgttgctggtggtgacggtacagcaagttggctgcttggagtagttagtgacctgaaactatcacatccacctcctgttgctaccgtacctcttgggactggaaacaacctccctttttcatttggatgggggaaaaagaatcccgctactgaccaggcagcagtgaaatcattcctggatcaagtaaaaggagcaagagaaatgaatatcgatagctggcatatcatcatgaggatgcgaattccacaggaaggcccatgtgatcctattgctcccttagatcttccacattcgttgcatgctttccaccgcgtatcagcttgtgactctctcaatttggagggataccacacattccgtggaggattctggaattattttagcttgggaatggatgcacaagtatcctatgaattccactctgaaaggaagagaaatccagagaagttcagacaccagctaagaaatcagggtacatatgctaagcttggatttaagcattccctaaaccatctttcatcgaggaacatttctcaacttgcaaaggtgaagatcatgaaaagacctggttcccagtgggaagagctaaagattcctcgcagcattcaatcagttatctgcctgaacctgccaagcttctctggaggattgaatccatggggaacacctggcacaaggaaagcacaagacagagacctgactgcaccttacgttgacgatgggcttatcgaggttgtcggcttccgtgatgcctggcatgggctcatcttgctggctcctaatggccatggaactcgtctagcgcaggcccaccgaatccgtttcgagttccacaagggagcagccgagcacacgttcatgaggatcgacggggagccatggaagcagcctctccccaaggaggacgacaccgtggtggtggagatctccaacctccgtcaggtggccatgctggccaacgacccgtgcaggtccaagagcgtgaacgagccgtcctccccgtcgtgccacggccatgaggacgacgacagcaacagcctggaggacgaggacgaggacgagtgggaggacgggaggaagaagttcggtgcggcggccaccttcaagatccccgacgaggtggacatcgctcatctcagttagaacctagaaaccccgccggctgcttctgcgtcggttggtggtgctgactgctgagtctgtgcatttcagagtgtttgctgcttgctacagcctacagtgctactgctccctttttttttgttgttttttttttggttgcctccacgagctcagatttcagaagctaaccactgctgttggtgaaactgctcgttatgatcccccattgttctgtaaattttcaagttttagcagccatgtgtatttcactggctgataatttttttgtgtgctacgtaatttgaaacgtggaaacgacttgtaccaaa

SEQ ID NO: 101874 - DNA, 1882 bp, Zea Mays
atgccatgccagcaccatctgacggcaattcgaacggaggtcctgtcctcggggagccgaatccacacggaccacaccagaggacgcgggggacgccccggattcttcggattccaggatggaactacacagaaatagcactaatggttcctgcctcagtgcatgtgggccactgacagactactacattcctgattacatactgaagccggcctatgaaccggtcactgttgataatgtgccatgttgtcctgtggtagtcttcatcaactctagaagtggtggccaactgggaagcagtctgataaaaacataccgtgaacttctcaatgaagcgcaggtttttgatctctcagaagagtctcctgataaggttctacatagattatacagcaactttgaaaggctcaagtctagtggtgaccatgttgctactcaaattcagaagagcttaaggctaattgttgctggtggtgacggtacagcaagttggctgcttggagtagttagtgacctgaaactatcacatccacctcctgttgctaccgtacctcttgggactggaaacaacctccctttttcatttggatgggggaaaaagaatcccgctactgaccaggcagcagtgaaatcattcctggatcaagtaaaaggagcaagagaaatgaatatcgatagctggcatatcatcatgaggatgcgaattccacaggaaggcccatgtgatcctattgctcccttagatcttccacattcgttgcatgctttccaccgcgtatcagcttgtgactctctcaatttggagggataccacacattccgtggaggattctggaattattttagcttgggaatggatgcacaagtatcctatgaattccactctgaaaggaagagaaatccagagaagttcagacaccagctaagaaatcagggtacatatgctaagcttggatttaagcattccctaaaccatctttcatcgaggaacatttctcaacttgcaaaggtgaagatcatgaaaagacctggttcccagtgggaagagctaaagattcctcgcagcattcaatcagttatctgcctgaacctgccaagcttctctggaggattgaatccatggggaacacctggcacaaggaaagcacaagacagagacctgactgcaccttacgttgacgatgggcttatcgaggttgtcggcttccgtgatgcctggcatgggctcatcttgctggctcctaatggccatggaactcgtctagcgcaggcccaccgaatccgtttcgagttccacaagggagcagccgagcacacgttcatgaggatcgacggggagccatggaagcagcctctccccaaggaggacgacaccgtggtggtggagatctccaacctccgtcaggtggccatgctggccaacgacccgtgcaggtccaagagcgtgaacgagccgtcctccccgtcgtgccacggccatgaggacgacgacagcaacagcctggaggacgaggacgaggacgagtgggaggacgggaggaagaagttcggtgcggcggccaccttcaagatccccgacgaggtggacatcgctcatctcagttagaacctagaaaccccgccggctgcttctgcgtcggttggtggtgctgactgctgagtctgtgcatttcagagtgtttgctgcttgctacagcctacagtgctactgctccctttttttttgttgttttttttttggttgcctccacgagctcagatttcagaagctaaccactgctgttggtgaaactgctcgttatgatcccccattgttctgtaaattttcaagttttagcagccatgtgtatttcactggctgataatttttttgtgtgctacg

SEQ ID NO: 101875 - DNA, 487 bp, Zea Mays
cctctccgcactccacgtcaatccaatccaggacacaaagttgcggtgagcaattgcaaggcgatgagcttgaggtacatgagccgtgtgggcgcgcgggtggtgcgggagagcacgggcaggtcggtcaaggcgcaggcgcaggcggcgtccatggcgaggagcggcggcagcagggcgccggccgccgggtcggtggagtcggggagagcgagcgccgtggcggcggcggcggcggccaggaggaaggcggaggaggagaagcggcggcgcgccgagcaggcgctgcgcaccgtcatgttcctctccgtctggggccccaacacctaggcctagtaggaatcaaggagtgttagcatcatcatgtgtagcgttctgtgcacgtttgtttgtttgtttgtttgtttgtttgaggttcagaaaacaaagtgtatattacttacagtggtataatctttgaagacatcacatccctacgttgattctt

SEQ ID NO: 101876 - DNA, 2179 bp, Zea Mays
caaagaagagtggaaggcagactgagaagccaatcgcccaaaccgcccggccgctcatttcgtcgaacacctgttgcgcgccacctcgtcaccgacgcactcgatgcgtcgctactgccacgtccctcgcggccggcgtccggccgccgctcccaacgaccaccagacgctcccgccgccggagtggatcgagccgtacccggacctcgcggacccgagcccgtacgcctccgcgtcggcggccacgcccgcgccgtcgccgtggctgccccgcgtgatctcccttgtcctccgctccccgcccgccgccctcgccgccgacctccgcgccttctgcaggaccttcctcctccgcctctccccggccttcgtcgccgccgcgctccgctccccgcagctcgccccgcacccgctcccgtcgctccacttcttccgctccctgcccaacgccaccgacctccgcgcccacccgcagcacctcctcagctgctacgtctccctcctccactccttcgcgcgctccagggagaccgacgcggccggccaggcgcggcagctcgtcgcggagctgcgcgcgcacggggacgccgtcctcagccacctcacgccggcgtcgtcggcctcgttgatccgcagcctcgcggcgttcggcctctccgaggagctgctatgggcgtggcaggccatgcgcctcgccggcgtcgagccgtccaggctcacctacaactgcctgctggacggccttgtcaacgctgacctcctcgacactgccatcaacgtgttcgacgcaatgtccacggaacatcgagtgcgtcccgacgtggtttcctacaacattctcatcaaggggtactgccgcgcggggaggacacaggatgcaatggcgcggcttgcggatatgagggaacatgcagagctcgcgccagacaaggtgacatacctcactctcatgcagcgccactacagcgaggccacgttcccacaatgcatagcactgttccaagagatggaagagaggggaatggggaaggaaatacctcaacatgcctatgtcctggtgatcggcgcgctcagcaaggacgggaaaccatttgaggcactggctgtgtttgagaggatgtcgaagcgaggctgtccagccaatgcagccatgtacaccgcgctcattgactcgatgggtaaattcgggagggagaaagaggcaatggcactctttgagaggatgaaggccactggaattgagcttgatgcggtcacgtatggtgtggttgttaattgcttgtgccggtttggcaatttggaggaggcacttgcgtgcttcaggagctgtgtagagaagggcgttgcagtgaatgccattttctatacaagcctgatcgacggttttggaaaaactgggatggttgaccaagcgaaggagctcttcgaggagatggttgctaaaggatttgtgcctgactcgtattgctacaatgttctgatcgacgcattagtgaaagcaggacggacagacgatgcgtgtgctttctacaagagaatggaagacgatggctgtgatcaaacagtctacacatataccattctcatcgatggtttgttcaaggaacacaagaatgaggaggcactgaagttctgggacagcatgattgacaagggaatcaccccaacagctgcagctttcagggccctctccaatggactctgcctttctggtaaattcagccgtgcatggaggatattggatgaactggctccaatgggggtgattcctgagacggctcacgaggatatgatcaacgtgttgtgtaagactggcagattcaagcaggcctgcaaattggcagatggcattgtgcagaagggacgtgagatacctgggagggttcgaacgatgatgatcaatgctctaaggaaagcgggaaataccgatctggcatttaaattggtgcatagtaagataggcattgggtatgaaagatctggcagcgtcaaaagaagagtgaaatttcaaacactgtttgaatgatgatcaatgcactagggaggaaagcaggaaatacccatctggcatttaaactggtgcatagtaagattggctttgggtatgaaagatctggcggcatcgactgaagagtgaaattcgaaacactagttgaatgaggatccgatattctttatg

SEQ ID NO: 101877 - DNA, 2599 bp, Zea Mays
atgactgccgtgcctctgcacacctacaataaccagaacgggatgtatgcggttaagatcagcacattgcatggagcatcatcagctaccgatgcacatcactcaaatgacataggaatgaccgagtacaaagctggaaagagactacccaaggactacctaggactccaccaaacagtaaccaatagtgcattagatttacagcaacggattggtttggccaacacgttgagttcaggttcaatgtctgaaccagcacaacctagtggaggggaaggtgatgtcaacacgctccgaatacttgtagcaaccgactgccatctaggctacatggagaaagatgagatacgtaggtttgattcctttcaagcatttgaggagatttgcgcattggcagataaaaataaggtggattttatacttctcggtggtgatctattccatgagaacaagccgtcacgctcaaccctggtaaaaacgattgagattctacggcgctactgcctaaatgatcaacctgtgaagttccaggttgtcagtgatcagacagttaactttccaaacaggtttggtaaggtaaattatgaagacccaaactttaacgttggtctgcctgtgttcaccattcatggaaatcatgatgaccctgctggagtggataatctctctgctatcgatattctttcggcttgcaatcttgtaaattattttggaaagatggaccttggtggctctggcgttggtcagatagcagtttatcctgtacttgtaaaaaagggcatgacttcagttgcactgtatggtcttggaaacattagagatgaacgactaaatagaatgtttcagacgcctcattcagtacagtggatgcgacctggaactcaagatggggagtcagcgtctgactggttcaatatattggtacttcatcagaataggataaagacaaaccctaaaagtgccatcaatgagcatttcttaccaggttcatcagtcgcgacgtccctgattgatggtgaagcaaaaccaaagcatgttcttttgttagaaatcaagggaaatcagtacaggccaaccaaaatacctctgagatctgtcagaccttttgaatatgctgaggttgtgttgaaagatgaagcagatgttaactcaaatgatcaggactctgtgcttgaacatttggataaaattgtaagaaatctgattgagaagagtagccaaccaactgccagcagatcagagcccaaacttccattagttagaatcaaggtagattactctgggttttcaacaataaacccacaacgttttggtcagaagtatgttggaaaggtcgcaaaccctcaagatattctcattttctcaaaatcagcaaagaagcgccagactacaggagatcacattgatgattctgagaaacttcgtcctgaggaactaaaccaacaaacaatcgaagctctggtcgcagagagtaacttgaaaatggagattcttccggttgatgatttggacattgcgttgcatgattttgtgaacaaggatgacaagatggcattttattcatgtttgcagagaaaccttgaagaaaccaggaataagttgagttctgaagcagataaatccaaatttgaggaagaagatataatagtcaaagttggcgagtgcatgcaggaacgcgttaaggaaaggtctctgcactctaaggacggcacacgtttgacaacaggctctcacaacttggtgtttaattatctgagccttaatatcttttctttttgtatttttcctggggctggatactggacagctagtaactcttacaacctttaactaggatactggaggtaaatcttttacagctcaaagcaaccagaactccttcagtgatgatgaagacaccagggagatgcttcttggtgcaagatcaactgatgttggacgaaaatcatctggatttactagaccctccaaagatactgctgatgttgctaaacgtggtacttccaaaagaggcaggggaagaggcaccagttcaatgaagcagaccactcttagtttcagccagtcaaggtcagctaccgttattcgtagtgaggatgtggcttcctctgaggaggaagcagatgcaaatgaagttgttgaaaattcagaagaggagagtgcgcaacaagttggacgtaaaagagcagctcctaggggtagaggtagaggtagaggcggaggttccactgcaaagagggggcgaaaaacagatattgcttccatgcaaaatatgatgagcaaagatgatgatgattcagaagatgaaccgccaaagaaaactcctcgggtcaccaggaactatggcgctgtcaggaggagatgaccctttaaggagttcttgctcatgagagttataggctaggtgttttgtcttgtaaagttggaagagccgacgtgtttttatcaaccttgacgtcgaccagtttgcgttgccgtgaactgactgtaccttgtacacgcccgaatgtaacggatttttgggatttatacatccttgtagctgcttaaattccagcgattgctgtcaaatgaacttcgagaagccacggtgttcgtc

SEQ ID NO: 101878 - DNA, 2538 bp, Zea Mays
cacaggaccacccctgcctgcgtcgtctcctcccgttcacccctgtctcgtcgtggcgacgattggggaccctagcctcctacgcccaataccctaaacccttcccttgcagcacctgccactgccagtgcattagatttacagcaacggattggtttggccaacacgttgagttcaggttcaatgtctgaaccagcacaacctagtggaggggaaggtgatgtcaacacgctccgaatacttgtagcaaccgactgccatctaggctacatggagaaagatgagatacgtaggtttgattcctttcaagcatttgaggagatttgcgcattggcagataaaaataaggtggattttatacttctcggtggtgatctattccatgagaacaagccgtcacgctcaaccctggtaaaaacgattgagattctacggcgctactgcctaaatgatcaacctgtgaagttccaggttgtcagtgatcagacagttaactttccaaacaggtttggtaaggtaaattatgaagacccaaactttaacgttggtctgcctgtgttcaccattcatggaaatcatgatgaccctgctggagtggataatctctctgctatcgatattctttcggcttgcaatcttgtaaattattttggaaagatggaccttggtggctctggcgttggtcagatagcagtttatcctgtacttgtaaaaaagggcatgacttcagttgcactgtatggtcttggaaacattagagatgaacgactaaatagaatgtttcagacgcctcattcagtacagtggatgcgacctggaactcaagatggggagtcagcgtctgactggttcaatatattggtacttcatcagaataggataaagacaaaccctaaaagtgccatcaatgagcatttcttaccacgtttcctggattttattgtatggggccatgagcatgaatgtcttattgatcctcaggaggtccctggaatgggtttccacatcacacaaccaggttcatcagtcgcgacgtccctgattgatggtgaagcaaaaccaaagcatgttcttttgttagaaatcaagggaaatcagtacaggccaaccaaaatacctctgagatctgtcagaccttttgaatatgctgaggttgtgttgaaagatgaagcagatgttaactcaaatgatcaggactctgtgcttgaacatttggataaaattgtaagaaatctgattgagaagagtagccaaccaactgccagcagatcagagcccaaacttccattagttagaatcaaggtagattactctgggttttcaacaataaacccacaacgttttggtcagaagtatgttggaaaggtcgcaaaccctcaagatattctcattttctcaaaatcagcaaagaagcgccagactacaggagatcacattgatgattctgagaaacttcgtcctgaggaactaaaccaacaaacaatcgaagctctggtcgcagagagtaacttgaaaatggagattcttccggttgatgatttggacattgcgttgcatgattttgtgaacaaggatgacaagatggcattttattcatgtttgcagagaaaccttgaagaaaccaggaataagttgagttctgaagcagataaatccaaatttgaggaagaagatataatagtcaaagttggcgagtgcatgcaggaacgcgttaaggaaaggtctctgcactctaaggacggcacacgtttgacaacaggctctcacaacttggatactggaggtaaatcttttacagctcaaagcaaccagaactccttcagtgatgatgaagacaccagggagatgcttcttggtgcaagatcaactgatgttggacgaaaatcatctggatttactagaccctccaaagatactgctgatgttgctaaacgtggtacttccaaaagaggcaggggaagaggcaccagttcaatgaagcagaccactcttagtttcagccagtcaaggtcagctaccgttattcgtagtgaggatgtggcttcctctgaggaggaagcagatgcaaatgaagttgttgaaaattcagaagaggagagtgcgcaacaagttggacgtaaaagagcagctcctaggggtagaggtagaggtagaggcggaggttccactgcaaagagggggcgaaaaacagatattgcttccatgcaaaatatgatgagcaaagatgatgatgattcagaagatgaaccgccaaagaaaactcctcgggtcaccaggaactatggcgctgtcaggaggagatgaccctttaaggagttcttgctcatgagagttataggctaggtgttttgtcttgtaaagttggaagagccgacgtgtttttatcaaccttgacgtcgaccagtttgcgttgccgtgaactgactgtaccttgtacacgcccgaatgtaacggatttttgggatttatacatccttgtagctgcttaaattccagcgattgctgtcaaatgaacttcgagaagccacggtgttcgtc

SEQ ID NO: 101879 - DNA, 2479 bp, Zea Mays
cacaggaccacccctgcctgcgtcgtctcctcccgttcacccctgtctcgtcgtggcgacgattggggaccctagcctcctacgcccaataccctaaacccttcccttgcagcacctgccactgccagtgcattagatttacagcaacggattggtttggccaacacgttgagttcaggttcaatgtctgaaccagcacaacctagtggaggggaaggtgatgtcaacacgctccgaatacttgtagcaaccgactgccatctaggctacatggagaaagatgagatacgtggattttatacttctcggtggtgatctattccatgagaacaagccgtcacgctcaaccctggtaaaaacgattgagattctacggcgctactgcctaaatgatcaacctgtgaagttccaggttgtcagtgatcagacagttaactttccaaacaggtttggtaaggtaaattatgaagacccaaactttaacgttggtctgcctgtgttcaccattcatggaaatcatgatgaccctgctggagtggataatctctctgctatcgatattctttcggcttgcaatcttgtaaattattttggaaagatggaccttggtggctctggcgttggtcagatagcagtttatcctgtacttgtaaaaaagggcatgacttcagttgcactgtatggtcttggaaacattagagatgaacgactaaatagaatgtttcagacgcctcattcagtacagtggatgcgacctggaactcaagatggggagtcagcgtctgactggttcaatatattggtacttcatcagaataggataaagacaaaccctaaaagtgccatcaatgagcatttcttaccacgtttcctggattttattgtatggggccatgagcatgaatgtcttattgatcctcaggaggtccctggaatgggtttccacatcacacaaccaggttcatcagtcgcgacgtccctgattgatggtgaagcaaaaccaaagcatgttcttttgttagaaatcaagggaaatcagtacaggccaaccaaaatacctctgagatctgtcagaccttttgaatatgctgaggttgtgttgaaagatgaagcagatgttaactcaaatgatcaggactctgtgcttgaacatttggataaaattgtaagaaatctgattgagaagagtagccaaccaactgccagcagatcagagcccaaacttccattagttagaatcaaggtagattactctgggttttcaacaataaacccacaacgttttggtcagaagtatgttggaaaggtcgcaaaccctcaagatattctcattttctcaaaatcagcaaagaagcgccagactacaggagatcacattgatgattctgagaaacttcgtcctgaggaactaaaccaacaaacaatcgaagctctggtcgcagagagtaacttgaaaatggagattcttccggttgatgatttggacattgcgttgcatgattttgtgaacaaggatgacaagatggcattttattcatgtttgcagagaaaccttgaagaaaccaggaataagttgagttctgaagcagataaatccaaatttgaggaagaagatataatagtcaaagttggcgagtgcatgcaggaacgcgttaaggaaaggtctctgcactctaaggacggcacacgtttgacaacaggctctcacaacttggatactggaggtaaatcttttacagctcaaagcaaccagaactccttcagtgatgatgaagacaccagggagatgcttcttggtgcaagatcaactgatgttggacgaaaatcatctggatttactagaccctccaaagatactgctgatgttgctaaacgtggtacttccaaaagaggcaggggaagaggcaccagttcaatgaagcagaccactcttagtttcagccagtcaaggtcagctaccgttattcgtagtgaggatgtggcttcctctgaggaggaagcagatgcaaatgaagttgttgaaaattcagaagaggagagtgcgcaacaagttggacgtaaaagagcagctcctaggggtagaggtagaggtagaggcggaggttccactgcaaagagggggcgaaaaacagatattgcttccatgcaaaatatgatgagcaaagatgatgatgattcagaagatgaaccgccaaagaaaactcctcgggtcaccaggaactatggcgctgtcaggaggagatgaccctttaaggagttcttgctcatgagagttataggctaggtgttttgtcttgtaaagttggaagagccgacgtgtttttatcaaccttgacgtcgaccagtttgcgttgccgtgaactgactgtaccttgtacacgcccgaatgtaacggatttttgggatttatacatccttgtagctgcttaaattccagcgattgctgtcaaatgaacttcgagaagccacggtgttcgtc

SEQ ID NO: 101880 - DNA, 1197 bp, Zea Mays
atggcaggcgacgacgacggtgctccgtgcccgggccccggcccagtcatcgggcgggtcctgcaagcgccgaagctgagggagttcacgctcgccgagctgtgggccgccacgcgcgggttcaagctggagatggtgctcggggagggcggcttcggtttctcatgcagtgaaaaagctattgttgcaccacggtgtaaaaccatcgagaagaggaagctggtcatcgacgtcaagggcgtctactgcgccatgcaccctcctcaccttgcctacattgatggtgagaaccaggatgctataaatctattttggggtattttcaaccacaagatggaaaaccaactcttctattggcccctgccaagtgatgatgcctccctgataccacttgaggcaagttttagtggttctttggttcacttaagatgtgaggctggcgggcgggcgggtgcggcatgcaaggaccggatgggtccaggatgcgtggagcacgattgggcatcgggtcggtgcacgttaaaacataatgcaaataatttagtgtttaggaaaattttatggatgccatctttacgtgcatgctttggagcacttttcgatgatgacccaaagaagtggaggatgtatgcatattttattgtaagtgctggaagcatatttgagctcatcactacactgtatcaggttacttccttccacttcaccattgggaatcttgcaaagggggctcttggggaatcgaagaagagtgataatgccttgatgaatgtcaaaattgatgatcagaaacttgccattggaaccctctctgttgataagaacccacacatacaatttgatctggttttcgataaagagtttgagctgtcgcacacatcaaaaactaccagcgtcttcttcactggctacaagatttttacagatctttttaataatgacctcggtggaccctatgcatttcttgaggcatgtgttggcctcaatgggatgatgcttggtggacgtgtacatactgctgtgcatgtgtttcctaattctcctgtggagcatgaggcaggcaagaagagagccgctgaaagttccatgctgaaaactcctctatctgataagaaagcaaaagttgccacaccgtcagctcagaagacaactgtgccattgaacagactaacaaaactgtcgtcaaagattgtatag

SEQ ID NO: 101881 - DNA, 2376 bp, Zea Mays
gatcaacaagtcgcagcgcagtccaactgtccaagcaaggcacgtcggtccaagagcgacgctgccggcccggccgcgctgctcctccgagtccgagatctgaaggcgcgggaggaaggaaacgggcgaaaggatccagcagcaccccgcgcgcgcggcggttaacttgtcccaggtctcggcgtggcgcggcgcctccctcccggccctgccggtgagagcgcggtccgatgaggcggcggccgttcctggaccagcgacggccgtcgttcaagcgccggtggcagcagcggccgtggtgggtgcgcctcttgctctccctcctcctcgccctcgcatgcgtcctcctcctcgctgtcctcctcggctcccccgaccccgacacctcgccgtccacctccgccgcgtcctccggatccgaggccacctcctcccctctcctcagtcagagaacttacttggagggaatcacggatgcgctcaacatgactgacgaaatgctgagcgcaggctcgttctcgaggcagctgatggaccagatttatctagccaaaatgtatgtcgtcgttgccaaggaggcaaacaacctgcagtttgtggtggagcttagtgcccaggtacggcgggcacagagcatcctagcccacgctgcagcccatggtggcacggtgatggaacaggaagcagagaaggcgatcagggatatgtcggtgctgctcttccaggcacagcagcttcggtatgacatcagtatcacgatcatgaagttgaaaggccagattcagtccttagaggacaagtcgaaagctgaggcagagaagagcacaaaatatggccagattgccgctgaggagctcccgaagggactttactgccttggcgttcgattgaccatggaatggttcaagaatcctgaccttcagaggaagttttcagataggagcccagcagcgcagagcaatctaagggataacggcctttatcatttctgtgtcttctcagacaacatccttgctgtttcagttgttgttaattctacggctataaactcgaggcaccctgacaaggttgtttttcacctagtgactgatgatttgaactatgctccgatgaaggcgtggtttgccatgaataactacagaggggtcactgtggagatacaaaaggtggaggactttacctggctcaatgcatcgtatgttcccgttcttaaacagctacaaaacgctgctacccagaagttctatttctctggcagtggtaatcgtggaacaccaattaaattcaggaacccaaagtacttatcaatgcttaaccacttgaggttctacattccagaaatatatcctgaattgcagaaggtggtatttcttgatgatgatattgttgttcagaaggacttgtcagaattgttcactatcaacctcaatggtaatgtgatgggtgctgtagagacttgcatggagacattccacagatttcataagtatcttaaccattcccaccctctaatccgtgctcattttgaccctgatgcatgcggctgggcatttggtatgaacgtgcttgatctggttgaatggaggaacaagaatgtgacaggcatatatcattattggcaggagcgcaatgctgatcataccctatggaagcttgggtctttaccacctggacttcttgctttctatggcttggttgaagcattggatcccaaatggcatgttttgggacttggctacacaactgttgatcttgctactatcaaggaaggggcagtactgcactacaatggaaatatgaagccatggctcaaaataggaatggagaagtacaagagcttttgggataactatgtggactattcacatcctttgattcagcagtgcttcatgcgttgattgatgtgtatcgacattataaatttttgtaagctctgtggtagatatgttccaagcgcatgctccaactgccacacggaaacattgtaattaaatcagtgggcttcgctctcaagttataatctctgacaaaacatcagtggctgtctatagtatctgtatttgatgaaatacagcaatcacatatctccagagtccagccacaggtaaacaacacatgagctaagaccgcgatgtagtaggctgctacttgaatacatccattacatacattcattacttgtgaccattgatgtaattttccattttttatttattgggtgagacaaccacagaatggagataatgtagaattgattttaaattattgacttgttacaagttttcagttatgtatccatatttattggatgctgaagacttacgacagctaagcctttctgtttattttatttattatttatacatgttgagaagt

SEQ ID NO: 101882 - DNA, 1201 bp, Zea Mays
gggaacacttcaagtcttcatgatacatgctcactagttttttagtttttacggatatccatgggtaacccgcgggcgacaaaaaatatccgtacccgacccgattttatcacgggtcgggcacaggcaagacccgcgggtacaaattcgtacccgaacccgcgggtaaaattgccatccctcttcatcgcatttggttgaactttagatgagctacaacacaggcaagtgtttacaggaaataaagtgtaaatacagtacataatcaagtccacagaaggaaaccatttataatatgaaaataactgttacttatgcagccatcatctacaaaatgacaaatgtagttgcatatatgttattctcttttttctctacttctgtttggagtatgccttttccaatccaaagttcatgtgtttgctgcggcatctacctcaacagcggccttcctattccttctagatctggaccttctccttctacgtctcttccttgtttctcttctctcctcgttatttgtggatgtgctggggtttacatctgttgggtcgacaacaggttccactgcttgtgttttgttttggttggcttcgctcaaggtgtccactgagctcgtgccctcaggatttctttctttctcattttccttctcgagcactttactttctctgccgtggttgctggcctcgccttgaggatcttccacctgtcttgtgccatccggttcttctttgctggcttcctggttgtctatcagtttttggttcccccgctgaagctcagatctatctaaatggcttccctctgaagcatcatctgattgctcattggcatcacctttgttctgttgaaactggccatcttctatgttggttgttaactttaagaactgttcttgtgaggaactgttatcttgttggttgctctcccatgcagtggtgttgtaggaattttgttcttctgcagtaacaggtacagaaccattggtgctttcagatttgtcgagtaccacaaggcatggaatcgttggagttttcagatttgtctaccacggtttcagaagttgcattttcagtgtttgctcccactacaatgctctcatcattgtggctgctctctgatattgtagtattgttggaattatcttctactgtagcaggaatgggatcactggaattttcggatttgtcaagatcag

SEQ ID NO: 101883 - DNA, 516 bp, Zea Mays
atgggcgcggcggaggtgaagggcaagagggtggtggatctcaagatgggatccatcaggcgggacaaggtgcaggacaaggacaagcagtactggtccttcttccgccgccccaaggagacgaccaccaaggcggcttcggcggagaaggtgccggccgtcgtcgacaccttttacaacctcgtggccgaaggcaggaggtgggttgggctcgaggtggcgacacgacagtcgtgggacggaggtgaggagggtgagcgtggcggacgaacgaaggtgcatcaggcggtggctggaggggcggggaccgtgaggcgggcaggggatggggtggcggggatcgcgccatggatggaagggcgcggtaggggaggcacagattgcggctctcgcgcggtggggaggcaattgagagcggctgtggtgtggtggccgtgcgatgaggaacggatggagaggattgcgcggcagaaccatggtgcacgggttgtgaacgtctacactacactcttatag

SEQ ID NO: 101884 - DNA, 1354 bp, Zea Mays
taaggtactaccttcctgattagcatcatgtacttctgcgtgtttggtttcctaaagaggcacatcatcaagcaaataggctcacggaggatacggaaaccgtttcagattgttggagaagatagatcaacagcagctgcagacgactacatatatgaagatgattctgtgaaaagatcaatcttgagctcacctttagttgagttcagcagtgtttattcagcaacaaacaatttcagcgaaaagcttggcgaaggtggatttggcccagttttcaaggggatactacctgacggccaagagatcgctattaagaggctatctaagacctccgcgcagggactggaggagttcaagaacgaggtgacggtgctatccaagctgcagcaccggaacttggtgaggcttttcggttgttgtgttcatggagaggagaagatgatggtgtacgaatacatgcccaacaagagtctggactcatttattttcaacgaaagtaagaggctcgtgttaggctggagtctgcgatacaagatcattcagggaatcgggagagggttactgtacctccaccaggattccaggctgaaaattattcacagggatctcaaggcgagcaacgttctgctagacgatgatttcagccccaagatctcggactttggcatggctaggattttcggtgaacaccagcttcaagaccttacccgtcgaatcgtcggaacctatggctacatctccccggagtacgcaatggagggcaaattctctgacaaatctgacgtattcagtttcggcgtgctggtcctagagatcgtgagtggccgcaggaacagctccctcctcgacgatgagtggtcaatgaacctcttgggctatcgtctcggagctcatcgacccgctcatgggagcaacgtacgcttacgatgaagcctgcagatgcgttcaggtgggtctcctgtgcgtgcaggaggtaccagccgagaggccagccatgcccctggtgctcaggatgctgagtggtgacgccgcgatcccgtccccgaagcaagctgcgtttttcgttgggagggcacctcgtcttcctcctgcggatgacagtagtaatactgaatcggggaatcaattgacgtgcacggatcttcagggcagatagtctcagtctcagtctcagggtgcacaagcttattcacgccgtatgtcgtagccgtacgtggacatggccttgtgttacacagattatattgctgctagtgctcgtgttgtaatttcgctgtatatatatcgtacccgtatgtgtgttgtcgtttgacactgtaaattgtaaatgtgatgctagaactgttcttcctca

SEQ ID NO: 101885 - DNA, 2965 bp, Zea Mays
atggcatcccgtttctggggacagggggacagtgagtctgaggaggaggaggtggaagaagttgagtcagaacagggcagtgatagtgatgatgatggaggtcgaggtggtgcgggacgcggtgcccaaaaccgatacttgaagaatcaagaagatgacagcgatgagtctgatacaggtcaccgtgtgatccgctccctgagggacaagcgcaacgaggagatgagatctattgttgatcagatgcgtaatgcaatgaagatcaatgactgggtgagcttgcaggagagttttgagaagcttaacaaacatcttgagaaggttgttcgtgtcaatgaatctactgaggtaccaaaaatgtatatcaaagctcttgtgttgctggaggacttccttgctgaagcccttgcaaacaaggaggccaagaagaagatgagcagcagcaattcgaaggcattcaatgcgatgaggcaaaaactcaagaagaacaacaagcagtatgaagagcagatccagaagtgcagggagcatccagagagttttgaagatgaagctgcagatgataaagatacggatgatgacgatgttgatgaaagtgatgcagagattgaagatcctgataaaatagctatgtcagaatcagaagaggaacaagatgaagaggatgatgacaaggatggttgggaacagaaaaggagtaagaaggataagctgatggataagcagttcttgaaagatccaagtgaaatcacatgggatattgtcgataagaaactcaaagagattgtagcatctagggaaagaaagtttgatgttaaccctagtctacttgggcatatgccagtcaatgtgtggaagaagtgtgtcaataatatgcttcttgtgcttgatatactccagcagtatcctaacattgtagtagacacctcgtttgagcctgatgagaatgaaactcaaaagggtgcagactacaatggaacaatacatgttgtgggtgacctggttgcattccttgagagactggactctgaatttttgaagaccttacagtgcacagatccgtacacaaaagattatgttcagaggctcagagaggaacccctgtttctggttgtcgcacagaacgtccaagattatcttgaaagggttggaaacttcaaagctgctgccaaggttgcactgcgccgtgttgaactagtttactacaagccccaagaagtgtacgatgcaatgagaaaactcgcagagcagcctgaggactgtgtggacgatgatgatgcagaggctggtgatgaacataaagcagtagatgacaatagaggaccatcaccatttgttgtgattccagaggctgtgcacaggaagcctacttttccagaaagcggtagaactttgatggatggattgatgttcttaatctacaagtatggggatgaaaggaccaaagcccgtgcaatgctgtgtgacatatatcaccatgcgatctctgatgagttttcagtggctcgcgacttgcttttaatgagtcatttgcaagatggtattcagctcatggacatatcatcgcagattttattcaatagagtcatggcccagttagggctgtgtgctttcagggctggtttgataaatgaagcccatggttgcttgactgagctctattctactgggagggtgaaagaattgcttgcacaaggtgtgcaacaaagccgataccatgaaaaaactcccgaacaggaaagacttgagaggagaagacaaatgccttaccatatgcatataaacctggagcttttggaagccacacacttgatctgtgcgatgctgattgaagtccccaatatggctgccagcacctatgacaagcggagacctatgagcaaaacattccgaaggcttcttgaagtgagtgaaaggcagacatttgttgggccgcccgagaatgtgagggaccatgtaatggctgccacaagagccctcaacaagggtgatcaccaaaaggctttcagtgtcataaattcgttggagatttggaagcttttgaggaacagagagcatgtccttgagatgttgaagcttaagatcaaggaggaagctcttagaacctatctcttttcatactcgtcttcgtacgagtccttaagccttaaccagctcactaccatgtttgatctcagcgagcagcatgcccacagcattgttagcaagatgatgatgcatgaagagcttcatgctagctgggaccagccaacaaagtgcatcgtattccatagtgtggaccaaactaggcttcaggggctactcttccagatggcagataagctctcggtcctggtggagatcaatgagagggcatacgaggcaagaactggtggtgctctcgagggggtaccgcccaggcgcaggggcgagggtcaggataatatgggaaagtggcaggataactttgtctcgtcacaggggcggcagggtggtggcaacaggtttggatactccagcagaggtgcagtatctggtcaaagtggtggtggacaccagagggacaggggcaatcagggttaccgcgggggctatggtggcgtttcaaggtttcaggatgcaaggggtcgcaaccagtctaatccatcaggcagaggtggtgatggtggtgcacgcatggtgaacctgaacagggttggtagagtttagaagtgataattttcagctcaagtaatcctgaaattctcctaaaagccaagttctgaatcactgcattttacatagtttcctgttctgggctgagtcatctacctgtttcctacatttcgttgtagccttttaaattaaggggctaagaaattgaactaagagtttggtactgttttgtgggagtgtgacgatgtattcgctccaatatttgatatctatccgtgacacttgctataaactgtacttttctttgtgttatgtggtgttcattgggtta

SEQ ID NO: 101886 - DNA, 1778 bp, Zea Mays
tcgtccgccccgacgagatcgcgtacgtcttcaacacctcggccgacgcgcccttctcccgcctcgtgctgaacgaggtcggcgtgctgcaacgcctagcgtgggaccccgccagccgggtctggaacgtcttcgcgcaggcgcccagggacgtctgcgacgactacgccatgtgcggcgcgttcggcctgtgcaacgtgaacacggcgtccacgctgttctgcagctgcgtcgtggggttcagccccgtgaaccccacgcagtggtccatgagggagtccggaggcgggtgccggaggaacgtgccgctggagtgcggcaacgggacgacgacggacgggttcaaggtggtgcagggagtgaagctccccgacacggacaacacgacggtggacatgggcgcgacgctggagcagtgcagggagaggtgcctcgccaactgctcgtgcgtggcctatgccgccgccgacatccgaggaggcggtgatggcagtggctgtgtcatgtggacgaataacattgttgacgtccggtacgtagacaaggggcaaaatctctatctgaggttggcaaagtctgaattagctagcaggaagagaatggttgcgacaaaaatcgtgcttccggttatcgcatctctgcttgcacttgtggctgctgccgtgtatctcgtttggaaattcaggctgagagcccaacgtcgaaaaaaggatatccagaagaaagccatggttggatacttgaccacgtcacacgaacttggtgatgaaaatctagagcttccatttgttagctttgaagatattgttactgcaacagacaacttctctgaagacaacatgcttggtcaaggtggatttgggaaggtttacaagggtatgctgggcgagaagaaagaagttgcaatcaaaaggctcggtcagggttctgggcaaggtgcagaggagttcagaaatgaagtagttctgattgccaaattgcagcacagaaacctcgtcagacttcttggttgctgcatttgtggggatgagaaattgctgatttacgaatatttgccaaacaaaagcttggattcattcatttttgatgctgctagaaaaaagctccttgattggccaacaaggttcaagataatcaagggaatatctagagggctcctttacctacacgaggattcaaggttgacgatagttcacagagatctcaaaccaagcaacatattgttggatgcggatatgaaccctaagatatcagatttcggtatggcaagaatctttggaggaaaccagcacgaggcaaatactaatcgagttgttgggacatacggttacatgtctcctgaatatgctatggatggcgccttttctgtcaagtctgacacatacagcttcggtgtcatactcttagagattataagtggtttcaagattagtttaaaccacatcacggatttcccaaatctattagcttatgcatggagcttatggaatgaaggaaaggcaatgaatttagtggactcatcccttgtcaagagttgtttaccaaatgaagctttaaggtgtatccacataggactcctatgtgtacaggacaatccaaatagcaggccgctcatgtcatcagtggtcttcatgttggagaatgaaaccacaacactttcagttccaaaacagcctgtatttttttcacaaaggtattctgaagcccaggaaacaggagaaaacactagtagctctatgaataacatgagcatgacaatgttatcagaggggcggtag

SEQ ID NO: 101887 - DNA, 2804 bp, Zea Mays
cttggttcttggcttggtcaattttattctgaaatacaaactttggcatcttgtctatccctgcatgccacgtatcctcccttttctcttcttctagtaataaaaaccttgggtgctctactgtatgaaacaccgggcattgttcataatgtattgttaaatattttagaccattacacggcattgacgttttgcattttcatcaaatttgtcagactacacccggtgaacttacgactccaccttgtccatgtgtacaatctctgatctatatcttggtaatggatatgaccagccttaccatttccatcctcctgctcctcctgatgatccgtgtctgcaaatccgatgaccagctggcaagcgcaaggccactttcacccggcgacctgctcatctccaaaggcggcgtctttgccctcggtttcttctccccgtccggctccaacaccagcacgagcctgtacgttgcgatctggttccacggcatccccgagcgcagccgcaccgtcgtgtgggtcgccaaccgcgacagcccagccaccacatcgtcgtccccgacgctcgccatcagcaacagctttgacctcgtgctttcggactcccagggccgcactctctggaggacgcagaacgccgccgccgcggccgtccacgacagcggcactcccctggccgtgctgctcgacacgggcaacctgcaactccagctgcccaacggtacggtcatatggcagagcttcgaccacccgactgacaccattctcccaggcatgcggttcctgatgatccacggggctcgccccgccgcgcgcctggtctcttggagaggccccgccgacccgtccaccggagccttctcgttcggcctcgaccccgtctccaacctccagctgatggtctggcacggggccgagccgtactgccgcatcagcgtgtggaacggcgtgtcggtgtcaggcggcatgtacaccggctcacctagctccatcgtgtaccagaccatcgtcaacaccggcgacgagttctacctcacgtacaccgtctccgacggctcgccgtacttccgtatcatgctcgaccacaccggcacgatgaagctcctgagctgggacaccaactcgtcgtcctggacgctcatctccgagcgccccaccggtggctacggcctctatggctcctgtggccccaacgcctactgcgacttcaccggggctgccccggcgtgccagtgcctcgagggcttcgagcccgtcgccgccgatctcaactcttcagaaggatgccggagaacggagcctctgcagtgcagcaaggcaagtcacttcgtggccttgcccgggatgagagttcctgacaagttcgtgctcctccggaacagaagctttgagcagtgcgcggctgagtgcagcaagaactgctcctgcaccgcctatgcttacgccaacttgagcagcagcggtgccatggaagaccagtcaaggtgcttggtttggaccggggagcttgtcgacacctggaaaagcatcaactatggcgagaagctgtacctccggcttgccagccctgttaaaaccaagagcaatatagtaaagattgtagtcccggttgtagcatgcctgctgctacccacatgcatagcccttgtcttcctatgcaaattcaaaggtacaacattaagcggcttgttttcaacgtgtaatgtgattgtgtatatgaaaagaaaagtatcaatgtcccaccagcagggaaatggatacttgagcacctccaatagactcggagacaaaaatgatgaatttccatttgttagcttcaatgacattgttgccgcaaccgataatttctctgactgcaatatgcttggaagaggaggctttggcaaagtttacaagggaatattggaagatggcaaggaagttgctgtcaaaaggcttagtcaaggttctgggcaaggtattgatgaagtcagaaacgaggtagtcctactcgtcaaactacagcacaggaatctagtcagactgcttggttgctgtattcatgaagaagagaagttactgatctacgaatacttgcctaacaaaagcctagatgccttcctctttgatacttcaagaacacgtgtacttgattggccaacacggttcaacataattaaaggcatagccaggggcattctatatctccaccaagattcaagattaacaataattcatagagatcttaaagcaagtaacatcttgttagacacagaaatgagtcccaaaatatcagatttcggtatggcaagaatcttcgggggaaaccagcaactagcaaacactacacgtgttgttgggacatacggttatatgtctcctgaatatgtgacaagtggtgccttttctgtcaagtcagacacatatagctttggtgttcttctcttggagattgtaagtggtttgaagattatctcaactcaatttataatggacttcccaaaccttataacatggaagttatgggaagagggaaatgcaacgaaattggtggactcattggttgctgaaagttgtccactccatgaagcttttaggtgtattcatgtaggacttttgtgtgtccaagacaatccaaatgcaaggccactcatgtcaacagttgtgtttatgttggagaatgaaaccacattgcttccagcaccaaaggagcctgtatatttttcaccaaggaataatgaaactgaagaaacaagaagaaacatagaaggttttctgaatatgtcgtgtatcacaacactggaaggccgctagatgttcacactt

SEQ ID NO: 101888 - DNA, 1870 bp, Zea Mays
aatctgcagtacctccaacctcactagtcgtagcaacagcccgctctctttgtaatcaccgcccccagacccatctgctggactgccgctcggtggggcaacacatcttggacggcggatctcaagagggcaagggagcaagccttcctgtgagacgtcgacctgctgctgtccctcttctcccgcgccgcacaagactggtggcagcagcacgcgccacgatcctcctcgaccctccggcctctcccctccctgcacctgcagagagcgccgcaagctagctgcagaggagcaaaacagcaggaggaggacgaaaggaagaagagaaggcgagcggctgaatcctccctcgatcaccacacgcgctctgcccttccccgccaccgatctgccacctccgagcttgtccgccaacgccggatctgccggccacgtgatgcggctcaggcgacggacagagcctacgggcagcggcggcgccaaaacctagctctggataccatgtcgttttctggtaggggcgcttcccctcctggtgcatgtataaaaaaggtatccataggtcatggaaacccttataaagtaagctcacattgcaaccaacgcttgttgcagtatattctgacaggatacatttctgtgtatagttcgaaggaagagcagtttgctgaaaattttactcccaattatactgtgtgtgctgctactcatgcttggagcccttgtctggacatgtaaaagcagaggtacaaaagaaaaagaaccatcatttaaaaaaaagcagtgcaaacggcaaaagaagagagttcaaaagagaaggatgctagaatacttgagttctactgatgacgctggggacaagaacataaacttcccatttattagctttgaaaacattgtcacagcaacagataatttctctgaatctaatttgcttgggaaaggaggttttggcaaagtgtacaagggaatgttggaaggcacaaaggaagtagctgtcaagagacttagcacgggttccggccaaggcaaggaggagttcaaaaatgaagtagtcctaattgcaaagttgcagcacaagaacctagttaagcttctcggttgttgtattcatgaagatgagaagctgttagtttatgagtacttacccaacaaaagcttggattacttcctctttgcttctgcaagaaaatcaatgcttcagtggccaacaaggttcaagataatccagggggttgctagaggaattatgtatctccatcatgactcaagattaactgtaattcatcgagatctaaaagcaagcaacatcttgctagataaggagatgaacccaaagatatcagatttcggcatggctaggatattctctggtgatcagctccaagcaaatactaaccgagttgtagggacatatggctacatgtctcctgaatatgcaatgaaaggtgcattttcagttaagtctgacacctacagctttggtgttcttatattggagattgtaagtggattaaagataagctcaccatatcttatcatggatttttctaaccttataacatttgcatggaacatgtggaaagatgggaaaccagaagattttcttgactcatctgtaacggagagttgctccctcgatgaagtttcacgatgcatccatataggactcctgtgcgctcaagacaatccgagttgcaggccactcatgtcaacagttgtgtccatgctggagaacaaagcaacaccactgccaacaccgaagcaacctaaagattttgcacttcgggactacaatcctggaaacgaaggtgtccacagggaattgtccgtaaatgatacaagtctcactatggtggagggccgttag

SEQ ID NO: 101889 - DNA, 2027 bp, Zea Mays
aatctgcagtacctccaacctcactagtcgtagcaacagcccgctctctttgtaatcaccgcccccagacccatctgctggactgccgctcggtggggcaacacatcttggacggcggatctcaagagggcaagggagcaagccttcctgtgagacgtcgacctgctgctgtccctcttctcccgcgccgcacaagactggtggcagcagcacgcgccacgatcctcctcgaccctccggcctctcccctccctgcacctgcagagagcgccgcaagctagctgcagaggagcaaaacagcaggaggaggacgaaaggaagaagagaaggcgagcggctgaatcctccctcgatcaccacacgcgctctgcccttccccgccaccgatctgccacctccgagcttgtccgccaacgccggatctgccggccacgtgatgcggctcaggcgacggacagagcctacgggcagcggcggcgccaaaacctagctctggataccatgtcgttttctggtaggggcgcttcccctcctggtgcatgtataaaaaagttcgaaggaagagcagtttgctgaaaattttactcccaattatactgtgtgtgctgctactcatgcttggagcccttgtctggacatgtaaaagcagaggcaaacggcaaaagaagagagttcaaaagagaaggatgctagaatacttgagttctactgatgacgctggggacaagaacataaacttcccatttattagctttgaaaacattgtcacagcaacagataatttctctgaatctaatttgcttgggaaaggaggttttggcaaagtgtacaagggaatgttggaaggcacaaaggaagtagctgtcaagagacttagcacgggttccggccaaggcaaggaggagttcaaaaatgaagtagtcctaattgcaaagttgcagcacaagaacctagttaagcttctcggttgttgtattcatgaagatgagaagctgttagtttatgagtacttacccaacaaaagcttggattacttcctctttgcttctgcaagaaaatcaatgcttcagtggccaacaaggttcaagataatccagggggttgctagaggaattatgtatctccatcatgactcaagattaactgtaattcatcgagatctaaaagcaagcaacatcttgctagataaggagatgaacccaaagatatcagatttcggcatggctaggatattctctggtgatcagctccaagcaaatactaaccgagttgtagggacatatggctacatgtctcctgaatatgcaatgaaaggtgcattttcagttaagtctgacacctacagctttggtgttcttatattggagattgtaagtggattaaagataagctcaccatatcttatcatggatttttctaaccttataacatttgtaagtattgggagacgctcagaatttagaaatatccacaggaaaacagcatgcaagcttaatgtgcgattgtgtcatgttgcaggcatggaacatgtggaaagatgggaaaccagaagattttcttgactcatctgtaacggagagttgctccctcgatgaagtttcacgatgcatccatataggactcctgtgcgctcaagacaatccgagttgcaggccactcatgtcaacagttgtgtccatgctggagaacaaagcaacaccactgccaacaccgaagcaacctaaagattttgcacttcgggactacaatcctggaaacgaaggtgtccacagggaattgtccgtaaatgatacaagtctcactatggtggagggccgttagattattgtttttgatactacgatgggggagcacatagcccaccagaaatattcattgaagacagacgtttagtccctattttgtttatgggtatttctgtttagacaaatttagtatcaatttaatctataaaatttattatgcaagaacaatctattggaaaggtaaagtttattatgcaatttatcaatttaggtttagattca

SEQ ID NO: 101890 - DNA, 2671 bp, Zea Mays
acgggcatggcatacctttacctgcctgttttcatattcttgctgtccatggcttgttcatgccaatccgacgacaggctaacacctgcaaagccactcctgccgggcgacatgttgatctcacatggtggagtctttgctctcggcttcttctccctgacaaactcaagttcgagttcatatgtcggcatatggtacaacaacatccctgagcgcacatacgtgtggatcgccaaccgcgacaacccaatcactacagatgtgccagggacgaagctagcttttaccaacagttctgaccttgtcttgttagactccacaggccacactatctggatgacgagaagcagcatcagtgcaggaggcggtggaactgctgccgtcgtcctgctcgactcggggaacttggttatccagtcgatagatggtactgccatatgggagagctttgatcacctgaccgacaccgtcatccctggtgtaagtttatcgttgagctcgtctgatgctgctgctagtgctaggcgccttgttgcctggaaggggcctgatgatccatccagcggcaacttctccatgggtggcgactcaagctcagatctccagattgtcacttggaatgggacgaggccattctggcggagagctgcgtggggtggtgaggtgacattcggcacattcgaggacaacaccagcttcacgatgtacgaaacaataacaggcggcacaggggatgactactacatcaaactcaccgtctctgatggcgcaccgatcatacgcgtaagcctggattacacgggcttgtttacctaccgaagatggaacctcaaaacatcctcttggacagtctttgtacaattccccagttcagcctgtgaccgttatgccttctgtggcccgttcgcctactgtgatagcactgagactgttccgtcttgcaagtgccttgatgggtttgagcccattggtcttgatttttcccaaggatgtcggagaaaggaggagctcaaatgtggtgatggagatacattcttaaccttgcccaccatgaagactcctgacaagttcttatacatcaagaatagaagctttgaccagtgcactgcagagtgcagcaacaactgctcctgcacagcgtatgcttatgataacctgcaaaatgttgactcgacgattgacacaacaaggtgcttggtctggatgggggagcttatcgatgctgagaagttcggtaacacatttggtgagaacctgtatctccgggtctccagctcaccagtaaacaagatgaagaacactgtactaaagattgtactgccggctatgattacttttcttcttttaaccacatgcatatggcttctatgcaagttaagagggaaacaccaaacagggaatgttcagaacaatctactatgcttgaatcctcccaacgaatttgggaatgaaaatctagattttccatcattcagctttgaagacatcatcattgcaacaaacaatttctctgattataagttgcttggggaaggtggttttggaaaagtttacaagggagtgttggaaggtggcaaggaagtcgctgtcaaaaggcttagtaagggttctgtgcaagggattcaggagtttagaaatgaagttgttctgattgccaaactgcagcacagaaacttagtcagactccttggtttctgcattcatgaagacgagaagttacttatctatgagtacttacctaacaaaagcttagatgctttcctttttgatgctacaagaaaatcattgcttgattggccagcccggttcaagataattaaaggggtggcaagagggattctttatctccaccaagattctagactaacaataattcatagagatctcaaagcaagcaacatcttgttggacacagatatgtgtcccaagatatcagattttggtatggccaggatatttggtggaagcgaacgacaagtaaacacaacacgagttgctggtacatacggctacatgtctcctgagtatgctatgcaaggctcattctctgttaagtctgacacctatgcttttggtgttctactactggagattgtaagcagcttaaagatcagctcatccctaataaactttccaaacctcattgcttatgcatggagcttatggaaagatggaaatgcatgggaattggtggactcatcaatttctgtgagttgttcacttcaggaactggtacgatgtattcagttaggccttctgtgcgtccaagaccatccaaatgcgaggccactcatgtcttccatcgtgttcatgctggagaatgaaacggccccacttcctaccccaagagaacctctatattttacagttcggaactacgaaactgatcgatcaaatgaatccgtgcaaagatatctgaataacatgagtatcacaactctagaggcgcgttagatttttagtttcatcgttacttaaatttgtaaaacttcttcttgtctgtgctagctatggcgaggattttttgtggaaatgagcaacaggcaaacactactcaagtcattggaacatatggttacatgtctcctgaatatgctatggaaggctcattctctgtcaagtctgacacctatagctttggtgttctactactggagattgtaagcggctt

SEQ ID NO: 101891 - DNA, 89 bp, Zea Mays
gtccagcagtacgatgtattcacttgggtcttttatgcgtgcaagacagtccatatgcgaggccactcatgccatcgttgtgttcatgc

SEQ ID NO: 101892 - DNA, 600 bp, Zea Mays
atggcgctgccgcaacgacgaagatgggagcggtcagccatggagtgggatgtgcagaggcggaggttgcaggaacatgaactggatgcaaaacagctagctcttgttgctgggctgtttggtagcacgcctaagccgccacctcgcgccacagttttgccgccgcagatgcctacagatgttggaaatttgaaaaggattgtgaaatcaaaatatccatatgtcagcaatctttggatgctcataaaaaatggtccacactgctccttggcacgggccgcggatgtgccatgccgcggtggcggaccctgggaagcaggagcaccggcggcggcggcgccgtggcaacagagcagacgtaggcaggcgtgggagacgttggccatggtgactgcgctcgccaaggaaactcccactgataaagataaagagaaagcttcctcttcaatctcctccaaagagcttctacataggtcatataacccggcgtgcgctagacgcccgtcaactactagtaggtttacatgcacaaagagcttggaagtaacaaactgttgcaaggagacaagggatgggatggagctctccggtactaaatag

SEQ ID NO: 101893 - DNA, 2902 bp, Zea Mays
tttctacatacgacagcttcatcagtggtccagattattcctcctttcccatctaataaatttgacaactgacaagagcagcatctgagttggagggatagaaaaatctcagcatctgcgccattttctactacttatccttggggttgaactgtctaacggttctaccattgtgctatctcctttgtttgtcttctccacaaccatatatacaccaacttgccaaggaaggcttcatggccatggcttacctccccgttttcgtcttcctgttcatggttgtcttatgccaatccgatgacaggctaacacctgcaaagccactcttgcccaacgaggtgctcatctcaggcggtggtgtctttgctcttggcttcttctccctgaagaactcttcaaggtcttatgtcggcatatggtacaacaacattcccgagcgcacatacgtgtggattgccaaccgcgacaacccaattaccaccaatgtgcctgggaagctagtttttaccaacagttctgaccttgtcttgttagactccacaggccgcaccatctggacgacgacaaacaactataccgcaggaggaggcggtgaaactgcttccatcctgctcgactcggggaacttggttatccggttgccaaatggcaccgacatatgggagagcttcagttacccgactgacacaattgtccccaatgtaaatttttcactgaacgtagcttccagcgctacgctccttgttgcctggaagggacctgatgacccatccagtagtgatttctccatgggtggcgaccctagctcaggtctccagattatcgtttggaatgggacacagccatactggagaagagccgcatggggtggtgaactggtgcacggcatattccaaaacaacacaagcttcatgatgtaccagacagttgtcgatacaggagacgggtattacatgcaattgactgtgcctgatggctcacctagcatacgcttaactttggattacacaggcatgtccactttccgaagatggaacaacaacacgtcttcgtggaaaatctttagccaattcccctatccatcatgtgacaggtatgcctcttgtggcccatttggctactgcgatgacacagtacctgttcctgcatgcaagtgccttgatggttttgagcccaatggtcttgattcttccaaaggatgtcggagaaaggatgagctgaaatgtggtgacggagatagtttcttcaccttgcccagcatgaagactcctgacaagttcttatacatcaagaacagaagccttgaccaatgcgctgcagagtgcagggacaactgctcatgcacagcgtatgcttatgctaacctgcaaaatgttgacaccacgattgacacgacaaggtgcttggtctcaatcatgcacagcgctgcctcaatcggtctcaattctaggcaaagaccatccaatgtgtgtaagaataagaagagtaccacattgaagattgtactcccgattatggctggtttgattcttctaataacatgcacatggcttgtattcaagccaaaaggtaggacactacttcatttttcagagtgcagtgttaatgaggtactcataaaaacgagactgatatcaatgtgtccgttcctgccagacaaacacaaaagcaagaaaagtcagtacacactgcaacactcggatgcttccaacaggtttgagaacgaaaatttggaatttccatcaattgccttagaagacatcatcgttgcgacaaacgacttctctgattttaacatgcttggaaaaggtggattcggaaaagtttacaaggcaatgttggaaggtggcaaggaagtagctgtcaaaaggctcagtaaaggctctacacagggggtcgaggaatttagaaatgaagtagttctgattgctaaactgcagcacagaaacttagttagacttcttgattgctgcattcataaagatgagaagttactgatatatgaatacttaccaaacaaaagcttggacgccttcctttttgatgctacaaggaaatctttgcttgattggccatcccgtttcaaaataattaaaggtgtagcacgaggacttctttatctccaccaggattcaagattaacgataattcatagagatctcaaagcaagcaacatcttgttagacacagaaatgagtcccaagatatcggatttcggtatggcgaggatttttggtggaaatgagcaacatgcaaacactactcgagttgttggaacatatggttacatgtctcctgaatatgctatggaaggctcattctctgtcaagtctgacacctatagctttggtgttctactactggagattgtaagcggcttaaagattggctcaccccatctgataatggactatccaaatctcattgcttatgcatggagcttatgggaaggtggaaatgcaagggaattggtggactcgtcggttctggtgagttgtccacttcaggaagctgtacgatgcatccacttgggtcttttatgtgtccaagacagtccaaatgcgaggccgctcatgtcatccattgtgttcatgctagaaaatgaaacagccccggttcctaccccaaaaagacctgtatattttactactaggaattatgaaactaatcagtcagatcaatacatgcgaagatcgctgaataacatgagtatcacaactctagaggggcgttaaatgtttagtttcattgttcgctattttggtaaacttttgtttaatgtgtgccattaaacaattacattaggtttgtattaatacaattacgctagccgttcaggtttgtacatagaaaatgttccattaaatctgttgtacaccatcggttcggtgggttgtattga

SEQ ID NO: 101894 - DNA, 2800 bp, Zea Mays
tttctacatacgacagcttcatcagtggtccagattattcctcctttcccatctaataaatttgacaactgacaagagcagcatctgagttggagggatagaaaaatctcagcatctgcgccattttctactacttatccttggggttgaactgtctaacggttctaccattgtgctatctcctttgtttgtcttctccacaaccatatatacaccaacttgccaaggaaggcttcatggccatggcttacctccccgttttcgtcttcctgttcatggttgtcttatgccaatccgatgacaggctaacacctgcaaagccactcttgcccaacgaggtgctcatctcaggcggtggtgtctttgctcttggcttcttctccctgaagaactcttcaaggtcttatgtcggcatatggtacaacaacattcccgagcgcacatacgtgtggattgccaaccgcgacaacccaattaccaccaatgtgcctgggaagctagtttttaccaacagttctgaccttgtcttgttagactccacaggccgcaccatctggacgacgacaaacaactataccgcaggaggaggcggtgaaactgcttccatcctgctcgactcggggaacttggttatccggttgccaaatggcaccgacatatgggagagcttcagttacccgactgacacaattgtccccaatgtaaatttttcactgaacgtagcttccagcgctacgctccttgttgcctggaagggacctgatgacccatccagtagtgatttctccatgggtggcgaccctagctcaggtctccagattatcgtttggaatgggacacagccatactggagaagagccgcatggggtggtgaactggtgcacggcatattccaaaacaacacaagcttcatgatgtaccagacagttgtcgatacaggagacgggtattacatgcaattgactgtgcctgatggctcacctagcatacgcttaactttggattacacaggcatgtccactttccgaagatggaacaacaacacgtcttcgtggaaaatctttagccaattcccctatccatcatgtgacaggtatgcctcttgtggcccatttggctactgcgatgacacagtacctgttcctgcatgcaagtgccttgatggttttgagcccaatggtcttgattcttccaaaggatgtcggagaaaggatgagctgaaatgtggtgacggagatagtttcttcaccttgcccagcatgaagactcctgacaagttcttatacatcaagaacagaagccttgaccaatgcgctgcagagtgcagggacaactgctcatgcacagcgtatgcttatgctaacctgcaaaatgttgacaccacgattgacacgacaaggtgcttggtctcaatcatgcacagcgtaattgatgctgcagtgacacttgcctttagtaagaataagaagagtaccacattgaagattgtactcccgattatggctggtttgattcttctaataacatgcacatggcttgtattcaagccaaaagacaaacacaaaagcaagaaaagtcagtacacactgcaacactcggatgcttccaacaggtttgagaacgaaaatttggaatttccatcaattgccttagaagacatcatcgttgcgacaaacgacttctctgattttaacatgcttggaaaaggtggattcggaaaagtttacaaggcaatgttggaaggtggcaaggaagtagctgtcaaaaggctcagtaaaggctctacacagggggtcgaggaatttagaaatgaagtagttctgattgctaaactgcagcacagaaacttagttagacttcttgattgctgcattcataaagatgagaagttactgatatatgaatacttaccaaacaaaagcttggacgccttcctttttgatgctacaaggaaatctttgcttgattggccatcccgtttcaaaataattaaaggtgtagcacgaggacttctttatctccaccaggattcaagattaacgataattcatagagatctcaaagcaagcaacatcttgttagacacagaaatgagtcccaagatatcggatttcggtatggcgaggatttttggtggaaatgagcaacatgcaaacactactcgagttgttggaacatatggttacatgtctcctgaatatgctatggaaggctcattctctgtcaagtctgacacctatagctttggtgttctactactggagattgtaagcggcttaaagattggctcaccccatctgataatggactatccaaatctcattgcttatgcatggagcttatgggaaggtggaaatgcaagggaattggtggactcgtcggttctggtgagttgtccacttcaggaagctgtacgatgcatccacttgggtcttttatgtgtccaagacagtccaaatgcgaggccgctcatgtcatccattgtgttcatgctagaaaatgaaacagccccggttcctaccccaaaaagacctgtatattttactactaggaattatgaaactaatcagtcagatcaatacatgcgaagatcgctgaataacatgagtatcacaactctagaggggcgttaaatgtttagtttcattgttcgctattttggtaaacttttgtttaatgtgtgccattaaacaattacattaggtttgtattaatacaattacgctagccgttcaggtttgtacatagaaaatgttccattaaatctgttgtacaccatcggttcggtgggttgtattga

SEQ ID NO: 101895 - DNA, 409 bp, Zea Mays
ttagtttcattggttcagacgagtttatgggaagatggaaatgcaagggaattggtgcactcgtcggttttggagagttgtccagctgtacgatgtattcacttgggtcttttatgcgtccaagacagtccaaatgcgaggccgctcatgccatccgttgtgttcatgctagcaaatgaaacagccccacttcctaccccaaataaacctatatattttactactaggaattatgaaactggtcagtcaagtcaatacacgcgcgaagatcgctgaataacatgagcatcacaattctagaggggcgttaaatgtttagtttcattgtccgttattttggtaaacttctttaatgtgtgccgttgtacaattacactagctgtttaggtttgtacatagaaaacgttcc

SEQ ID NO: 101896 - DNA, 1370 bp, Zea Mays
ctgcaagttgcgcgcctcctctacccttgaactctgaaaaaaaagttcccgcaaagcaaaaactctctctcctcttcttcctcgaccctcgtcgtggtgcggggcatctcgcaccccaccccctgtcctcccgctcaccggtgtgcgcgctttcctagggtttccgctgcccccgccgcccaccctgttctcctctcgtcagcggcgatggcgtcggcgtcggccccggtggcaggggcagtggccgggaatgatgacgagctcgccgatctggtgaggcgcctcgtggacgccctcgctcgctacgctgatcgcctgcccttcgacctcgatcgccagaagctccgttcacttactacacttgctgcaatctcgatcacacttctgtttgcctggaaaatgttgagaggtcctcaagagcaacctccgaggcctcgtaggaggattgccccatcgtcaagcaacaccagcactagatcgcgaccaggtgctttaaccacaacagatgcttgttcatcagcagattcaagagcacacgaagcagtcaaccagctgttccaaccactgactcttgagcagcttgtcaagcataagctaagtggaggacgaaggttcacatgccgcttgcttggtgtgattttggaagaaacagctccagaggagcttcagaaccatgtcacagtgaagccttccgtggtggaggttctcctagaaattgcaaaaatttgtgatgtgtatttgatggagtgcgtccttgatgacgaaagcgagggaaaggttttatcggccctgagtgaggctggcctttttgctggtggcggcttgataaaagataaggttctcttctgtagtacagataacggccgcacatctttcgttcggcaactcgaacctgattggcacatcgacacaagtcctgaaatcgttcaccaattagctaggtttatcaaatatcaactgcacatttcaccgcagcgaccggaaagaacagcatccaatgtcttcagcgctccaagcctggaacaatattttggaggcctagaccagagatagaggtcaaactccatccagcgaagtgttggcagcggcttagtgagaacggaggacatcattgttttttttttccttctttcgtcagctcggctcgagtgatggaactcatttttcctgtaccatgtgtaaaagcctgtgctatgtacacgttgttgtgcgatatgcagtgcccccataatctatgcagggagatgacaaatgtaatactagcatacttggcgaatcagccagttgtgttaatgtacaagtataaccaaaatagttgcaagtgtcaacctgctgctattgccattcgctcttgtggttgtgttagtccc

SEQ ID NO: 101897 - DNA, 1626 bp, Zea Mays
ctgcaagttgcgcgcctcctctacccttgaactctgaaaaaaaagttcccgcaaagcaaaaactctctctcctcttcttcctcgaccctcgtcgtggtgcggggcatctcgcaccccaccccctgtcctcccgctcaccggtgtgcgcgctttcctagggtttccgctgcccccgccgcccaccctgttctcctctcgtcagcggcgatggcgtcggcgtcggccccggtggcaggggcagtggccgggaatgatgacgagctcgccgatctggtgaggcgcctcgtggacgccctcgctcgctacgctgatcgcctgcccttcgacctcgatcgccagaagctccgttcacttactacacttgctgcaatctcgatcacacttctgtttgcctggaaaatgttgagaggtcctcaagagcaacctccgaggcctcgtaggaggattgccccatcgtcaagcaacaccagcactagatcgcgaccaggtgctttaaccacaacagatgcttgttcatcagcagattcaagagcacacgaagcagtcaaccagctgttccaaccagtaaatctgactcttgagcagcttgtcaagcataagctaagtggaggacgaaggttcacatgccgcttgcttggtgtgattttggaagaaacagctccagaggagcttcagaaccatgtcacagtgaagccttccgtggtggaggttctcctagaaattgcaaaaatttgtgatgtgtatttgatggagtgcgtccttgatgacgaaagcgagggaaaggttttatcggccctgagtgaggctggcctttttgctggtggcggcttgataaaagataaggttctcttctgtagtacagataacggccgcacatctttcgttcggcaactcgaacctgattggcacatcgacacaagtcctgaaatcgttcaccaattagctaggtttatcaaatatcaactgcacatttcaccgcagcgaccggaaagaacagcatccaatgtcttcagcgctccaagcctggaacaatattttggaggcctagaccagagatagaggtcaaactccatccagcgaagtgttggcagcggcttagtgagaacggaggacatcattgttttttttttccttctttcgtcagctcggctcgagtgatggaactcatttttcctgtaccatgtgtaaaagcctgtgctatgtacacgttgttgtgcgatatgcagtgcccccataatctatgcagggagatgacaaatgtaatactagcatacttggcgaatcagccagttgtgttaatgtacaagtataaccaaaatagttgcaagtgtcaacctgctgctattgccattcgctcttgtggttgtgttagtcccatgaggctgctggttacgacgactgatcgtctgttcgtcactattcatattcattggacaacaacaaaacttttgcaagttacagccgaaaacaaacatcattttgtgcactcacttctcgcgagctttcaaaactacccagtgacataggctgaatgccgcaaaattcaaacatatttgtcctttcagaccggtcgctcttcttggcatttcaagcatgtacacgtgaacccgtaatctgcaagctgcg

SEQ ID NO: 101898 - DNA, 1337 bp, Zea Mays
acgggcgcgttggcggacagccccgagcggagctggtacgcgacggtgccggtgtcgacggagaaggcgaactcgaagggcgccgccgggtccggcgacgcgcggagtggcaggcggtgggagacgatgacgcggcgcggcgaggcgggcgcgggcggcgaggtgggcgaggccggggacgcaacggacatgacgcgcgggaggcggagcggcgttggcgacggcaggggcacctcgtcctcttgccgacaagcctaaagaagaagccgtcgacacggagacgtccatgccttgcaaggtcggggactgcgggggagaaagaggaggcatcggtgtggtttgcggcggacatggctctcgcggaggtttgcggaggtcgggcgggcggaggcggggccgggccgggcgggggcagtctacagagctcgatccacgcagctgcagtcgccgctttactcgaagccaacggacgtgccggagaatccaggtccctgatcgccgactccatctcgcagcacctccagcagtcgaccgacgaggtagccctcttctactgcgacctcctggcggcgttctcctcgcgcgggctcaaggaccgggcaacggagttccacttggagctacggtccatgcctccgctctcagggcgcaaggcttacgcggcgatggtcaagtccctgtgcctgctgggcatgccggccgaggccgagacagcgctcagtgagatggtctcgcgagggcaccgacccgaggcggcccagttcggggccgtcgcgaggtgctacggcagggtcggctcgccggccgacatggagcgggtcatcgcgtccatggcggacgccgtgctgtcgtgctacagcgcctgccacgccaggacgctggcgtggctgaagaggatgcggaagctgcgcgtcgcggtaaccgcgaaaggctacaacttggtgctcaactcgtgtccgtcgctcgcttcggtggtgcgggagctgggccctgagcttccgctgtcgacggtcgggctggtcgggcggctcaggtctgcgtcgacaacaccgaaagcggaagtggaggtggtgcgggagctcctggcgtcgtcggcgtcggttctggacagggcgatggagtggtcggaggccgaggcgaagctgaacctgcacggttgcaacctacgtgctggtgctggtgctgcagtgggtggacgctgggaggaacgagcacagagatattggcggcggcctggaaaggaaagagagttaggttttcaccgagtactcattttcaccagcgtcggagactcacagcgtctggtagagggtaaaattgacttttaccgtagctaa

SEQ ID NO: 101899 - DNA, 307 bp, Zea Mays
tcacctggtaggagctgcgcggcggcagagacgaggccatggtgggattactggtggggattaggggttatagctgctaggtttttcttgtgcgcggtgggggaggtggacctttcttggtgcgggggggtgggatggagtgaactcgacggcaaagaatcccgtggctttgaagcgccgacgaactcgcgctttgttggacgggtgaaggcctccccccaccgcgcttcgttgggaacgagtgcctcagggaaatcgcggagctcgtaatggatggagcagcctcgaattcgcatggaactggaat

SEQ ID NO: 101900 - DNA, 243 bp, Zea Mays
ggctacctcatttcatgtctatttacattacatgcatgtatgaagcaaaattgtatcacttatagtattaatccctgcgcagcttctggctttttagaaacttcagctggtggagtggccgtgctgggctcctcatctgtaacagcggggacagtcacggtagacatgggaacatcttcagaggtttcagagacatgtatgtttgcgaattcgttgtccaactccgtgtgtgctgcaaggatc

SEQ ID NO: 101901 - DNA, 2962 bp, Zea Mays
ctatctttcgcgtacagtttgttgtgctgtggcgccggccagcagcaaggcctggtttggagggcggtgggctgggctgggctgggctggtgatctcggcttgtgcgtgcgtgacttagggcctagagatgcaaaaaaagaagggaaaaaaaatgattcgtgactctcccgaggtgcggtgcggccgcaccccgcatgccattgcggtattgccaacgtcgcttcgcccctgaatccctccgctaccgcgcctagggttttaggcttttagcacacaccggcggcgctgcataccaagggcttcccctgcccgcgccgatgccgcgcaagcacgcgccggcgtttacgccggaggcagcctccgcctcttcgtcaggcggggctggccagccgcataacctccccgtgcttcaggcgaagatgaagcgtgacccggagggctacgaggaggagctccgccagctccaccgccacttcgagtcctcggtgttcctattccagcagcaggcggcgctggctacaacctcgtcctcgggaggcggcggggaggtggccaaggagctcggggacctcgccctgttccttgcccacgtcgcgcctttctacccggatgacctcgccgatttgcccgaccagattggtggcttgctcgacaccaacgcgcgtgggctgccgccggggctcaggtctcacctcgtgcaggcgcttgtattgctggtgaatcggaagattgtcgatcttgaggacacaatggagttattcatggagcttcaagttattggagatcgagctgtaaaaaagctagcattttcgcatattgtacacagtatcaggaggatgaaccagaagcacaagaatgaatcgacaaatcgtaaactgcaaaacgtcctttttaaattcttacaggctgaagaagagtcacgagcaaagagagcatttactatcctttgtgatcttcaccgtcggagggtctggtttgatgaacgcacaacaaatgcaatatgtgatgcttgtttccacccttcctctaggattatgatagctgctatttcatttcttcttggatatgaaaatgctccacaagaggatgatagcgacgcatcaagcagtgaagatgaagcagatcaaaacccacaaattcttctcagtaaacaggacgtttataaggcaaatcacaagggtacgtctgctagtaaaaaaaagaagaaagctaaattacagcgggtcattcgtagcatgaaaagacaacagcggaaatctgtcgaggaaactggttccagtttctattcacccctgacatatttaaaagatgcccagggttttgcggagaagcttttctctcggttgcagaaatgcaatgagcgatttgaggtaaggatgatgatgctaaaagtaatcgcgaggaccattgggctgcatcacttggttttgttgaacttctacccgtatcttcaaagatacgttcaacctcatcaacgagatgtgacgactctactcgctgcagcagttcaggcttgccatgatatggtacctccagatgctgttgaaccactgttcaagcagatagtaaatcagtttgtgcatgaccgttctcgtccagaggctattgctgttggcttaaatgttgtgagagagatctgcatgagaatacctttgatgatgaatgaggatctgctccaagacctcgttttatacaaaaagtcccatgagaaagctgtttccattgctgctcgttcgctgatcacattgttcagagagatctgtccttcattgttagtcaagaaagatcgtggccgtcctgtggatccaaaggctcggcccaaagcatttggagaagtcactgttgctagcaacgttcctggtgccgagttgctagatgaaaatatttcttcagaaggggaaagttcggacgatgagtctgatggttttcactccgatgatgagatggacttgacacctgcccctcctggaacagaagaaaatatggagggttcatctgttgcaaacaaacatgatgccgatggagataccaaagaggaagatgacgcatctgatgatgaagatggtacggatcaagatgactccaacagtgatagtgatgaactagacgatgactctgatgtggatgtgggtactgatatatctgatgaagacgaaggtgacgacggtgaactgaaagaaagcataaatggttcagaggatgaagctttagaccagaatgaagacagcgaagaggaagacaagtcaaaaggcagtggctctaaagcgcagaagaggaagttaaatgattatattggacagctaaattctgctgatgcaagccttcgagctctgaagaggttagcaactgccaagaaggctgaagaaccatctgatgaaactggtaaaattctatccgatgaagatttcaaacgcatcaaagaactcaaggctaagaaagaagcgaagctggctttggctcagcatggactaatcaagggtgtcgacacaaggtctgtaacctttaagatgccatcatctgaccagctcagcaggaagcgtgtcgatccacttgagcttgaggctcacgtcaggagaaagatgtccaaggaagaaaggttggcgttggtgaaagctggaagagaggatagaggtccttacatggcaagggcggccgtgaaacagaaaaagaccggtggactgagcaataagcagaagcagcacaagaagaggatgccactggcagcgactagagccaaggcagcacgttcccggcaggagaagaagcagcagcgcaagcgctccgggaatcagttcaggggccgcaaggcgtggaagtgagagagcctctgctgccgctttgcgattcatctagccgaatggccaatttttttgactctttgtatcttcttctgccagttaatgtttccatataataccttgattctatgagaatgcttttccatatttcgccgttggtatc

SEQ ID NO: 101902 - DNA, 1849 bp, Zea Mays
cgcaacgcagcggcaaaagcgacactgccagcagcgagcgggtggaaccagaccagaccagacatgtcgacgacggagccgctcctctcggccggcgccgagaagaagaagggcggcaagggtccgcgcgtgggcatcgacgaggcgctgtcggcgcacgcgggggagttcgggcggtggcagctgcggcacttcgtggccgtgtcggcggcgtgggcgctcgaggcgctgcacaccatggtgatcatcttcgcggaccgggagccggcgaccgtgccggtgccctgcgccgccgccgggcgggagtgggccggtggcggcggttcaggcgccgctgcgtcgaccgtcgtcgagtggggcctcgtctgcggccagcgctacaaggtcggcctcgcccaggccgtcttcttcgccggctgcatgatcggcgcgggcgtgttcggccacctgtcggactcgttcctgggccggaagggggcgctgcaggtggtgtgcgtgctcaacgccgccttcggcctcctcaccgcgctgtccccgaactactgggcctacgcggcgctgcgcctcctcacgggcttcagcgcggggagcgtgggcgtgctggccttcgtcctggccaccgagcccgtcggccccgcccgccgcggcgccgcgggcatgtccaccttctacttcttctccggcggcatcgcggcgctcgcggccgtcgcggcgctcttccagggctcctggcgcgcgctctacgccgtcacctcgctcccctcgctcgtcttcgccgtcgccgtcgtgccgttcttcgtctccgagtcgccgcggtggtacctcgtgcgccgccgccccgacgacgccctgcgggtcatccgcgccatcgccgccaccaacggcagggccgtccctgaggatctcaggcttaagctcgacgacgaggagccagggaacaaggacgttggtgggagtacggcgcatgcggcgtcctcgggctccatcgtcgacgtgttccggtcgccgaccacgcgggtgcggcttgtgctctccgtgcttatcaacctcctcagctcggtggtgtactacggcctcagcctcaacgtggtcaacctcaagaccaacctctacgtcaccgtcgtcgtcaactcgctcgccgagatgcccgcctacctgctcacggcgctcctcctcgatcatttcgggcggaagcctctcgccatcggcaccatgctgctcagcggcgtcttctgcaccgccgggagtctcgtacccggcgcagggatcatgagggtggcgtgcggcgtggtgggcatcttcggcatggcggcaacgtacaacctgctgttcatctacacggcggagctgttccctacggtggtgcggaacgcggcgctggggtgcacggcgcaggcggcgcagatgggggccatcgtggcgccgctggtggtgatgctcggggagaggctgccgttcgcggtgttcggcgcctcgggcatcgtcggcggcctgcttgtcttgtacctgccggagacgatgaacaagcccctgtacgacaccatggcgggtctggaggaaggggagaagaacgttgtcaagtgacacatgttgggatctcagatcagatgaaacggtcttttgtagtctcgtgttcactacgatcgaatgtgcaatagtgcaagatgtcgcgaggtgatgaattccacaaagacgaggagagttagtgctggcttactgccaaggagtggggatctagcggtgctgtttttcaggttacgctagtgtacatctaagcgtccagcttgtgcccgactacacatctccaagtttaacgaagaattgtttttcctcgttttccggaggatgg

SEQ ID NO: 101903 - DNA, 1663 bp, Zea Mays
cttattatataaagccccgtcttggcctcgccattggctcaccagctcgatcgcacgggagaagaggataagaggaagcgagtgggactgtgagtgagttggaaggaggggggtggcaatggcgttgcggaatggtggtggtggtggtggagcctgtcccgcggcggttgtgctggtggctgcggccgtcgcggcgctgctgggcgccggggtggcggcggcgaccaagttcgacgacgtggtgcagcccagctgggccaacgaccacgtggtgtacgacggcgacctcctcaagctccgcctcgactccagctccggcggagggttcgtgtcaaggaccaagttcctgtacggcaaggccagcgccgacctcaagctcgtgccgggggactccgccggcgtcgtcacggctttctatgtgactgtcgtcggccggggacaagcacaacgagttcgacttcgagttcctgggcaacgtgaccggcgagccgtacctggtgcagaccaacctgtacatcgacggcgtgggcaaccgggagcagcgcatcgacctgtggttcgaccccacggccgacttccacacgtacgccgtgctgtggaaccccagccaggtggtgttcatggtggacgacacgcccatccgggtgtacgagaacgccacgctgcaccaaggccacggccacggccaccaccggcacggcggcgcggcggcggaggccaacggcaccaacaccaccaccaccacgctggctgctgccccggcgccgttccccgggccgcagccgatggccgtgtacagctccatctggaacgcggacgactgggcgacgcagggcgggcgcgtgaagacggactggtcgcacgcgccgttcgaggccacgttccgggaggtgcgcgtggacgggtgcgcctgggcgggcaacgccacggacggcgacgccgcggaggcgcgccggtgcagcgagtcctcgtggggcaaggagggccgctactggtggaaggagaaggagatgtcggagctgagcgtgcaccagagccaccagctcgtgtgggcgcgcgcgcaccacctcgtctacgactactgcgtcgacaccgaccgcttccccgtgcagccgcccgagtgcgccggccgctgagctcctgaccgacctacgtcgatccgtgcatggcatggcaatggatctcgtcgggcggggtggaaatggaactgcttgtttctctcgctggaccgtgggggtttgtgttcgtgcgtctgcagcaatggtgtctgtctgtctgtagctctgtttccgcttattgaaggtcgcattgttggcgacccatgcgtgggtgaaccggcggtggtgtctcttgtagaaacaagtgaatgggagggattatgggaacgaagaacgatgctgcgctccgtttcagagatttgctactccactgtgttcagtgcttatgatttgattcctctgtacaaaggcatgatttctgttccctcgaggcttgcattgcagctgtgcctgtgcggtgggtgtacttgaagctactttctccctgtcttttttttactgcggatgcttttaaccgagccacttactttgcaaccgcatgggcaggggatacatgcgaaatgatggtttcagaaatctggtatcagtcgttgccatttctccgg

SEQ ID NO: 101904 - DNA, 1659 bp, Zea Mays
cttattatataaagccccgtcttggcctcgccattggctcaccagctcgatcgcacgggagaagaggataagaggaagcgagtgggactgtgagtgagttggaaggaggggggtggcaatggcgttgcggaatggtggtggtggtggtggagcctgtcccgcggcggttgtgctggtggctgcggccgtcgcggcgctgctgggcgccggggtggcggcggcgaccaagttcgacgacgtggtgcagcccagctgggccaacgaccacgtggtgtacgacggcgacctcctcaagctccgcctcgactccagctccggcggagggttcgtgtcaaggaccaagttcctgtacggcaaggccagcgccgacctcaagctcgtgccgggggactccgccggcgtcgtcacggctttctatctgtcgtcggccggggacaagcacaacgagttcgacttcgagttcctgggcaacgtgaccggcgagccgtacctggtgcagaccaacctgtacatcgacggcgtgggcaaccgggagcagcgcatcgacctgtggttcgaccccacggccgacttccacacgtacgccgtgctgtggaaccccagccaggtggtgttcatggtggacgacacgcccatccgggtgtacgagaacgccacgctgcaccaaggccacggccacggccaccaccggcacggcggcgcggcggcggaggccaacggcaccaacaccaccaccaccacgctggctgctgccccggcgccgttccccgggccgcagccgatggccgtgtacagctccatctggaacgcggacgactgggcgacgcagggcgggcgcgtgaagacggactggtcgcacgcgccgttcgaggccacgttccgggaggtgcgcgtggacgggtgcgcctgggcgggcaacgccacggacggcgacgccgcggaggcgcgccggtgcagcgagtcctcgtggggcaaggagggccgctactggtggaaggagaaggagatgtcggagctgagcgtgcaccagagccaccagctcgtgtgggcgcgcgcgcaccacctcgtctacgactactgcgtcgacaccgaccgcttccccgtgcagccgcccgagtgcgccggccgctgagctcctgaccgacctacgtcgatccgtgcatggcatggcaatggatctcgtcgggcggggtggaaatggaactgcttgtttctctcgctggaccgtgggggtttgtgttcgtgcgtctgcagcaatggtgtctgtctgtctgtagctctgtttccgcttattgaaggtcgcattgttggcgacccatgcgtgggtgaaccggcggtggtgtctcttgtagaaacaagtgaatgggagggattatgggaacgaagaacgatgctgcgctccgtttcagagatttgctactccactgtgttcagtgcttatgatttgattcctctgtacaaaggcatgatttctgttccctcgaggcttgcattgcagctgtgcctgtgcggtgggtgtacttgaagctactttctccctgtcttttttttactgcggatgcttttaaccgagccacttactttgcaaccgcatgggcaggggatacatgcgaaatgatggtttcagaaatctggtatcagtcgttgccatttctccgg

SEQ ID NO: 101905 - DNA, 1040 bp, Zea Mays
cgggagaagaggataagaggaagcgagtgggactgtgagtgagttggaaggaggggggtggcaatggcgttgcggaatggtggtggtggtggtggagcctgtcccgcggcggttgtgctggtggctgcggccgtcgcggcgccgttccccgggccgcagccgatggccgtgtacagctccatctggaacgcggacgactgggcgacgcagggcgggcgcgtgaagacggactggtcgcacgcgccgttcgaggccacgttccgggaggtgcgcgtggacgggtgcgcctgggcgggcaacgccacggacggcgacgccgcggaggcgcgccggtgcagcgagtcctcgtggggcaaggagggccgctactggtggaaggagaaggagatgtcggagctgagcgtgcaccagagccaccagctcgtgtgggcgcgcgcgcaccacctcgtctacgactactgcgtcgacaccgaccgcttccccgtgcagccgcccgagtgcgccggccgctgagctcctgaccgacctacgtcgatccgtgcatggcatggcaatggatctcgtcgggcggggtggaaatggaactgcttgtttctctcgctggaccgtgggggtttgtgttcgtgcgtctgcagcaatggtgtctgtctgtctgtagctctgtttccgcttattgaaggtcgcattgttggcgacccatgcgtgggtgaaccggcggtggtgtctcttgtagaaacaagtgaatgggagggattatgggaacgaagaacgatgctgcgctccgtttcagagatttgctactccactgtgttcagtgcttatgatttgattcctctgtacaaaggcatgatttctgttccctcgaggcttgcattgcagctgtgcctgtgcggtgggtgtacttgaagctactttctccctgtcttttttttactgcggatgcttttaaccgagccacttactttgcaaccgcatgggcaggggatacatgcgaaatgatggtttcagaaatctggtatcagtcgttgccatttctccgg

SEQ ID NO: 101906 - DNA, 2455 bp, Zea Mays
gcgttcatgaatcatgacgaagacgaacaccatgagaagccacgacctccatggttacagccaccgccacctactcgtacagtcttcaatcctgcttttcctcggaactttttccgccgcacaagctgcatccgacatcctcagcaagggcagtaaccttacctatggcgagaccctggtctccgctaacgggtcgttcacattagggttcttctctcgcggagtgccggcaaggaggtacctgggaatctggttcacggtgtccaactccagcggcgacgctgtatgctgggtagcgaaccgtgaccaccctctcggcgactcttccggcgtgctggcgatcagcgatacgggaagccttgtcctgctcgacggctctggccgggcggcgtggtcttcgaacacgaccgccggcgccggcgccgcttccccaacggtgaagctactcgagtccggcaacctcgtcctgctggacgggaacgacggaggagtcgacgactacggcgtcgtgaagctgtggcagtcgttcgaccacccgacgaacaccttgctccctggcgccaagatcggcatcaacctgtggagcggcggcgggtggtcactcacgtcgtggcgtgatgccgacgacccctcgccgggggaattccggtacacgatggtcaggcgagggttgctgcccgagatcgtgacgctggactcgagcgacgccatcaagtaccgcacgggagtgtggaacgggcggtggttcagcggcatcccggagatgaactcgttctcgaacatgttcgtcttccaggtgacggtaagcccgagcgaggtcagctacagctacgccgccaaggccggcgcgccgccatccctgtcccgcgtcctcctcaactacacggctgacgccgtgcgcgtcgtgtggtggctggacaagcgagggtgggacaacttcttcacggggccgcgagatgactgcgaccactacaacaggtgcgggcattctggcgtgtgcaatcatactgcagcgtcgacgacgtggccgtgcagctgtgtccagggcttcgtccccgtctcgtcgtcggactgggacgggagagactcatctggcgggtgccggcggaacgtgtcgctggactgcggcgacaatggcaccacggacgggtttgtccgtttgccgggagtgaagctgcccgacacgctcaactcgtcgctggacacgagcatcacgctggacgagtgcagggcgaggtgccttgccaactgctcctgcgtggcgtatgccgcggcagatgtgcaaggcggaggcgatgatgttggcactggatgcatcatgtggcctgaaaacctcactgacctacgctacgtggctggaggacagaccctgtacctacggcaggctactcccccatctggtcggaacttgttaattcaaatgacggaggcagttgaaacagcccaagatccctctgtttcttccattgctctggctactgtcaagagtgcaacaaggaatttctccacaaggaatgtgataggcgaaggcactttcggcatcgtatatgagggcaagttgcccagagggcatccgctcctacacgggctagccgggagaaccattgccgtgaagaggctgaaaccgatcggcgatcttccggacataatcgtcaggtatttcacgagagagatgcagctcatgtccgggctcaagcagcaccggaatgtgctccgcctccttgcctactgcgacgaagccagcgaacggatcctggtgtacgagtacatgcacaggaggagcttggacgcctacatattcggaacacctagagaacgcgcgctgctgaactggtgccggaggctgcagatcattcaggggatcgccgacggcgtgaagcacctccacgagggagaagggtcggccggcaacgtgatccaccgggatctgaagccggccaatgtgctgctggacggcggatggcaggccaaggtggccgacttcgggacagcaaaattgctcgtcgctggagctaccggaactcggacaaggataggcacacctggatacatggctccagagtacgttcagagcgacggtggcgagacgacgctcaagtgcgacgtgtatagcttcggagtcactttaatggagacactgagcggacgaaagaactgtgacacgccaagcctcgtctcagaagtaaagaccatactgaactgcctcggccgttcgagatgctaggcagcccctgctcggagcttgccgagcccatggtgccgacggtcgtcggcaatgcagccttggctacgctcctggaggccgatctctccagaccgacggtgtacgagacaatcgattttagataagagatgacgcgctcgcactgcgttgctgctaagcttataacacttgttttatacttcgtactgttgttttacactgattataattgttattaataacatttttggt

SEQ ID NO: 101907 - DNA, 602 bp, Zea Mays
gatacaatcactctaataacttactaaaagattattcaccaggtaacttgctgaaacgattaatgtcatataatacatccttcaacaaaaaacaaagagcggagattattatctactttggttgaatagctgagtatgaacacccactattatagtaaaaattgttgttgttgcttccatcattcatagcaaatgttctgaataagcatctcgtctattttcgtttacaaattgttcaaatgataaagacgctgagtttaacaattgtgccccttctttttgtatggaggtctcaagttacttcaccacatcattcattgttgggcgtctgggcagtcaacaacagactcttccacgcattcatagccaaccgtataaatctttgtaagacaattaatttagctaaatcccagtttttttgatcgattaggtccttcaaggcatagtattattcatcatattgacatgttgttctcctgatttaacggagaatatacttacctttatccatgggctggctggctattattagtcacggtaggacagctccaaagctgtaagcatgactctcctcgaagagctgttgcgactcatgtaatatt

SEQ ID NO: 101908 - DNA, 2037 bp, Zea Mays
accacaccccaccgcaatgcccagaggtccccccaatgtcggaagggcgacgggttcacccacaccccccgctggcggatccccccgccgcctgcccgcccgcgcgccaagaattccattcacctccccccacgctgccaggagctctgcccggcccccgggtgccgaacgaccaccaggttcacccgtgtctgccgccggcggatgcccccctcccccggtggctaggagctccattcgtgctgccgtcgtgtgctgctgggcgtctcccccaatggtgttacagcatgggcattagagcactcaatgacggacggggagctactctggcgcgcatcgttcaccccggcagtacctattctgacgcgtatggtaggtggccatcatgttcctcacgcaagggcaggtgcaactcgggaggtgcctcactactgcatctacgtccacacgctatcggccaatttcaccttcaaatccatcttcccccaacgccaaatacccagtaaggctaggccacatctctatcatatatgaaagccggttttgtctgtcatacactttcgttatgaaaatgtgtgtagcctccaaaaaagcccttcacaggcctgataaatcaaggattgatattatgagagaaataggtgccacaatttctagtagaatttctacatgttcatgaatgattttattgttgctaatgaatgttgtaatagattgagtatactgcaatagagacaacgaaggcagatgggtttttgcagactcagactcaagtttgattgattgctatttgctaccaacaaaaaatagctacacacaggttctgcgttgccttgcattcaaagcattttttattttattgtaaagaatttgttgttatttaaacttgataggtcttgacaagaaagttctattgtacttcatatttgtatatatgatcaacatctctatgtgcagtatgcttgagaatagctttaaggctgagtaacaaggtttgaagaaagttatttcatttttaattttttttcctgaacatatattgtttgattcgtaatttagtttacatggtattgaaagggaaatgtgcccttgggccatttctaagtattttggtgattaagtgtccaacacaagtgcttaagcgataaactatgccaaattgtggataaggtgcaaatcaatataaaggtatgattatagacttagtacattggtttttgtgtactaacatgtttgtctaagtgctagaatcagagaaaattcaattggaaaagcttggctcgaagcagccaaaagtctgctcagtctgggtgcaccggactgtccggtggtgcaccggacagtgtccggtgcgccaggctggctctggcgaactggctgctatcgggacttcgacggcggtgtaaggctataattcaccggactgtccggtggtgcaccggactgtccggtgagccaacagtcggccaggccaacggtcggccgcgtaatccgcgcgcgacgcgtggcagagccaacggtcagaagggggcaccggactgtccggtgtgcaccggacagtgtccggtgcgacaacggctccaaaacaccaacggtcggcttcgccaaagaaggaaagaaatctgcaccggacagtgtccgatggtgcatcggactctccggtgcgccaggcgacagaaggcaagaattgccttcttgaaatgctctcaatggctcctagctgccttggggctataaaagggacccctaggcgcatggaggagtataccaagcattctctaagcattcctaagcaccaagacttcgattccgcgcatttgattctttgtgatagcaactagagctccatttgagttgtgaactcgccgggttgtgttgtgagctcttgttgtgacttgtgtgcgtgttggtactctgatttcgtttcttgtgtgcgttgctcattgaaagggaaatgtgcccttgggccatttctaagtattttggtgatttagtgtccaacacaagtgcctaagtgttaaatggtggacaaagtac

SEQ ID NO: 101909 - DNA, 2205 bp, Zea Mays
atccccatcctttccactactcatcagttttctcatctcagctcagctagctttcccctcccttgcaactgcaagcttgcccaacccaataagctaagcaagcacgcaccatacacactctctagtagctagctaagctagccggccgcccctcctcgcacgcgtgcgcgcaccagcatctatcatcagagctagccacgaaacggatcggagcagcagatctcgatcggcggcccacatgggggatcacgctgagatgttgcatgccgctccggccatgtacaacggcgctggcgctgcccctcatggcgggtggtggaatacggcggtgcccgcgacgacgtgctcgacgacggagctggctgggttcaccacgtggtcgtccgccctggctgctagctacgacctggcggccgaggggacaaaggccaagagcgccgccgcctcttcggagtcccccgggaacaacagctccgtgaccttccaagaaccggcctgcgtcacggatcctcccggcgtcggaaccgccgtggtgcaagtgcaacagcctcttgccaccggttacgccgactggacacatccctatatgagcagtggcgctactactttgcatgggtttctgcaagacggtcaccagcaggacatgagctcagcaactgagcagagctccatgaccgcatcaagcctgatgaacccttcatccaataacctagccctggcgctgcaaggtcaccaccaccaccaccaggagcatgagcaccagcagcagatgctgtccagcttcggatccgagctgctcttgtcgccgacgacctcaccctacgggttccagtcctctctgctacgaagcctcatggagccggccgcggcgacgaagcaggctttgccggggtaccagcagcagcagtatgatcagtaccagcagcagatgggcatgggccaggcgaggtttgcaccaccggcggccggagctgccagcagggaggcactccagttcagcaacgacgcgctgttcagctggaacccttctgctgctgggttcggcttcggcctcggcgtgccgccggcgccggaccaagctagcagcgtacgttctgtcgtcaaaccatcgccggcagcggcgcgtgctacagcgacccttgcattaaagactgcgctggaaggagtaggagagtctgctagctcgatcatcaccaagaagaaggcgaacggcgagccggccttgaagaagcccaggctcgagacgccgtctccgttgccaacgttcaaggttaggaaggagaagctaggggacaggatcactgcactccaacaactagtcgctccttttggaaagacggacacagcatcggtgctccatgagaccatcgagtacatcaagttcctccacgaccaagttggtgtccttagtgctccatacttgaagaacaacggccatcatcaagtgctccgccacttgaagagctcaagtcctgacaagtcgtccaaggacgacgacagccatgccagcgagatttcgctcaagggccgggggctgtgcttggtccccatatcgagcacgttcgccgtagccagcgaggtgcccgtcgacttcgtgtggagcactccgttcgctgccaactttaggtagaagaaggatgagaattgagaaagagccaaagctctgatcgatcagaggcgtcgaaagagaaataactactacctcgttaccacagatcgatcgacctgctggccctgaatcctgattatatatatatatatatatatatatatatgtttcttagtctagtgacctagtagctagcagtgtatgactgtgtatggtcatggttatctctcataactgtactagtactaagcttattgcagactaagctttgctagctagagatgaacctttggaatgagtccttgaaagacttggactcattctccaggttcatctatctatccacccagggtgtaagctaataagggatcacctaatatatttgagagggcacaacaagtctctctactgatcgtcatcagcttctaattatgattggtttgttaggttgcatcattgggtagttgtggaaagatttgttaaagatgtgtaatggtttctataccttaaactagtgacgacggaatggatcaaagtgcgtagcaggtttctattgattgtactacgtacccaataaaagtggcatctctttgatt

SEQ ID NO: 101910 - DNA, 711 bp, Zea Mays
ttttttttctagcccagacatccaatataaccattgaagtttatgtccttgctctcaagtattttcattctaagttcaaaagggtattaactccatgctcttatattctctattgctgcttatttcatggtggtttagaaataaataaagaatttatgattctttttcaacagtatcgtcagcgtcgaggatctatgaggatgctgcgtcactgtcttttcatggtttagtccccggttctaaattaagagatgataaggtctttagccatgtattgaaaatcccggttagaaactagtaggaatatatgaagcggcttttcatcccaaaatatatagcagccccttcccgtagtgacgctatgcagtcgtggctactgcttatgtcatcgccacctccgtcctcctgccgtccgccatgcatggcttcctcgatgtccatgggtaacacagcgccatgcatgccatcatgcatgtacgatcagattttggatcgctgcgagttcatgcaagctggtgtcttgccccggccccttttccttgacttgatctccatcgtcgtccgatccctcttgctccaactgctagctagtaacgaccaaatcatctcgttgataccacgagctctcaatgcaaatagccggcgcacatcctctaggatctctggcgatctcgcgcgccccgcctcccaccatgcatgccactctcatac

SEQ ID NO: 101911 - DNA, 318 bp, Zea Mays
atggcggcggtggcggtgctcgactccttcatcaagcgatgcacggcgtcaaaggaggacttcggcggccagcccagccagagaaggcctgcttccttctcggcatcgggttcgagttcgacatcaggggcctcctggccacacaccaatcacctcatccctaacaacgccgccggacttacctacgcggcgcgcgactacggcggcagcgacccgtttgaggggtttcgcgacgcggtgctggggccgataactcagagaattcggaagaaggaaggagagttcagaggaagaaaggacgaaggagacgaggaatag

SEQ ID NO: 101912 - DNA, 113 bp, Zea Mays
tttttttttctagcccagacatccaatataaccattgaagtttatgttcttgctctcaagtattttcattctaagttcaaaagggtattaactccatgctcttatattctcta

SEQ ID NO: 101913 - DNA, 924 bp, Zea Mays
caccatcgctccctcactccccagttctctcccggtctccccacttcggcctctccgcgggccgaacccgctcacccccgccctcccctagccaccggtcatcgccgccacgtccaccgacgggcccacccaacgacctcgctgcgcccacccgtacgcctccatccagcttagcggcgcccgagtcacagaccagtcacatgccgccgcggctcctgctcaacaatgtctcctgcatgcggaacgcacagacggtgctccgtgacatcaacctcagcgtccacgacggcacagccctcgtccttaccggcgccaacggctccggaaagaccaccctcctccgcatgctggcgggcttctcgcgccccttggcgggggagatcctctggaacggacacgacatcacctcccccggcgtcttccagcagtacaagctgcagctcaactggatgtcgctcaaggacgccgtgaaagagaagctcacagtgctcgagaacgtccagtggttcgagctcctcgaggggaaggacggcagcaggtcgggcccggccatccagctcatggagctcggcaggctcatcaacgagaaggccaggaggatgttgtccatggggcagaggaagcggctgcagctcgccaggctgctcgccatcgatcgacccatctggctgctggacgagccctccgtcgcgctggacgcagagggtaccaggctgcttgaacacatcatcgcggagcaccgggagaagggtggcatcgtgttcgtggccacgcatctgccgattcaggttgaggattctatgtcgcttcggcttccccagaggtttcctcggaggaagacgctggttgatcttatccattgatggcttgacgccaatgtgaccaggaatttagttgtatctctctaattcatctccagctatc

SEQ ID NO: 101914 - DNA, 1961 bp, Zea Mays
cttcttcccccactcgctcgacgcagacccaatcccaacagaaatcgccgcatggctcgccgctcacttcggatcggccgaacgacctcctggatatcgggctgccccacccgatggtgtataagggaccccggcactcgattcatatctctcgcctcgctgttactcgccctcctcgccacaatatcgataattttgcgccgtcgcggggaaaacaggggctgccgcgggggaacttcggctagccgtcatccgcgcctccagtgtgggcctcagagccttccctcggttgcggggcgggcgctggtggcctcgccacctggaattgtcgccggggacttcaccaattggtcgccggacctctcctatcacgatcgagccgccgcgcagcgagggcggacttcctcggagcttaatctgcgaacctttttgaacgatctaggcttcctggaatttggaacgtggatttgatctgctcctccaatggcaacctttagcaaggctagcaggctgtgtggtgcagtgactatgcaaccaaaacaggtgtggagtctactctcgagaatcctgtctaagctgctcggtcttcctggtattttgttgaagaaattccgaaaggaaggtgtgtcggaattggatgctgttgcattgccagagctatcacaggatgtgttgatggacatctttagtacacttgaggtccctgacctcatccgagcaggctcggtttgctcgtcatggcatgctacttacaaatgcctgctcgacctgaggcaatacaagcaaccccagacaccatgcctgttctacacttgtgaatctgccggtagcaacatagggtttctatacaacctcaaggaaaataggtcctacaagttaactctaccggagccacccatccgcagtaggttactgatcgggtcctcgaacggttggttgattactgcagatgagaggtctgaactgcaccttgtgaatcccataactggagaacaggttgcacttccctctgtgattaccatagagcatgtgaagcccatctttgatgcatcaggtactatccatatgtacgagttgtcatatgaaacaccacccgacctgtttgatcttggcgatctgcgcgatgaactctacttcaaggcatttgtgtttcctgatccatccaccactggaagctacatcgtggttcttattcatgagccacgttcacggctttcgtttgcacgaccgggagatgacaagtggacctcggttggacaaggtatcggatataaagactgcacatatgtggatggtcttttgtatacagtggattggactggagaaattgatgcttttgattttaccgcatcccctgttaaaatgacagtaattatggacagtctgaagtatcctccatgtgaaaacctgtacattattcaggctccatggggtgatctgctgcatgtttggaggactattgacgttccacccaatgctccatcgtgggaccctgaaaagtgcctggcagaaaccgtaaaaatacaagtgcataaagtggacttggaagcaaagaaatgggtgaaaataaacaggttgcagtgtgatggtgttttatttcttggccacaacgattcactttaccgtagtgctcaagtacatccaggactcaagtcaaatcatgcatacttcactgacgattgtaaagaattgactgttgcattcaaaaattccacacgtgatatgggagttatggacttggaaaataatgccaagaaggaaattgtctctcaaatttggtccaactggccctgtcccacttggataacacctaatcttatgaagctgaatcaggcattcaacaaatagctttttaggtattattatttagtacatttgctttgttatttttttttatcaaaaatggtgtaatcgatgttatgataaaagaattgtatgccatacaatggtcatttcttcct

SEQ ID NO: 101915 - DNA, 3490 bp, Zea Mays
tccacttccacctccgtccgttccccttctcctcctcctctcctccccttccatgccctcttagcttctgaaggtctccgccacctcctgctagctacccttctgagctttcaagctttgctgaacgcacgcgggcggacgcggtaaagcatcacatcttctttgagagctgcagggaagagatcgataagagttctattttttgcaaaggcacacagacatatatagttcttctgctagatctcaccgccagtcagctcgcagcgaaggttccctgggctaccttgtcgctggatctgttgctggtcgtgttgttacttgtcaggcaaggtataatatatctccgtacagctaggaataggattgggtagtaggggggtacgcatgtgccagtgaagaaatgggaaggagctagtgtggaggcagcaagaattagggttggagaggttccgcgagaggagaaatgatgatcccggcgaggcacatgccgccgacgatgatcgtccggaacggcggcgcggcgtacgggtcctcgtcggcactgtcgctcggccagccgaacttgatggacaaccagcagctccagttccagcaagcgttgcagcagcagcacctgctgctggaccagatcccggcgacgacggcggagagctgcgacaacacggggcgcggcggtggtggccgggggtccgacccactggccgacgagttcgagagcaagtccggcagcgagaacgtggacggcgtctccgtggacgaccaggacgaccccaaccagcggcccagcaagaagaagcgctaccaccgccacaccctgcatcagatccaggagatggaagctttcttcaaggaatgcccgcacccggacgacaagcagcgcaaggagctgagtcgggagctgggtctggtacccctccaggtcaagttctggttccagaacaagcgcacgcaaatgaagaaccagcacgagcggcaggagaactcgcagctgagggcggagaacgagaagctgcgcgcggagaacatgcggtacaaggaggccctcagcagcgcgtcctgccccaactgcggcgggccggccgcgctcggcgagatgtccttcgacgagcaccacctccgcgtcgagaacgcgcggctccgggaggagatcgacaggatctccgccatcgccgccaagtacgtgggcaagcccatggtgtccttccccgtgctgtccagcccgctcgctggggcgcgtccgtcgccgctggacatcgacagcggtggcgtactggggggtgctgccacttatggcggcgccgctgacatcttcggcggcggcggcggcgtcgctgcttgtggtgcggccagggattgtgacaagcctatgattgtggagctggctgtgacggccatggaggagctggttcggatggcgcagctggacgagccgctgtggaacgcgccggcaggcgggcacgacgggtctgctgagacgctgaacgaggaggagtacgcgcgcatgttcgtccctgctggagggctcgggctaaaaaagcagtacgggttcaagtcggaggcgtcgcgcgacagctccgtcgtcatcatgacccatgccagcctcgtcgagatcctcatggacgtgaatcagtatgcgacggtgttctcgagcatcgtgtcgagagctgcgacgctggaggtgctgtccaccggcgtggctgggaactacaatggcgcattgcaagtgatgtcggttgagtttcaggtgccttccccactggtgccgactagggatagctatttcgtgaggtactgcaagcagaacgcggatggaacatgggccgtcgtcgacgtctcgctggacaccagctcagtcctcaagtgccggcgccggccgtcgggatgcctgatccaggaaatgcccaatggctactcaaaggtgacctgggtggaacacgtcgaggtggatgacaggtcggtaaacggcatctacaaactgctggtggactcagggctcgccttcggtgcacgccgatgggtcggaacgctggaccgccagtgcgagcgccttgccagtgtcatggccagcaacattccgaccagtgacatcggcgtgatcactagcacggaggggaggaagagcatgctgaagctggctgagaggatggtgacgagcttctgcggtggcgtgacggcctcagccgcgcaccagtggacgacgctgtccggcagtggtgctgacgacgtccgtgtcatgaccaggaagagcgtcgacgaccctggcaggccgccgggcatagtcctcaatgctgccacctctttctggctccctatcacacccaagcgtgtcttcgacttcctccgtgacgaaagctctcgcagcgaggcacgcacccgcgcgcccacccatacccagtttttttttaatcgagaacacgttctacctagctatgaaccgccttttctttttttcttttttctttttttgcagtgggacatcctctccaatggcggcgtcgttcaagaaatggctcacattgccaatggccgcgaccatggcaactgcgtctcgcttcttcgtgtcaatcagagcaccaactcgacccaaagcaacatgctgatcctgcaagagagctgcacggacgcctcgggctcgtacgtcatctatgcgccggtggacgtggtggccatgaacgtggtcctcaacggcggcgaccccgactacgtggcgctcctgccctctggcttcgccatcctgcccgacggcccgtcaggcagcagcaacatgcaaggcggtggcggtggcggcgtcggctcaggcgggtcgctcctgacggtggcgttccagatcttggtcgactccgtccccaccgccaagctctcgctggggtcggtggcgaccgtgaacagcctcatcgcccgcaccgtggagcgcatcaaggcggcggtctccggcgagagtgttacccagcagtagctagcttagtcgaatcagacactcttcttatccttgcatcattgaaggagcagcaagttttagagctttcatcagtgggaagtcaagaacgcacctcagactctccttgccatgtggtgctcatagttcgagttcttttttcgcctagtttccccaaaatttctgggtagaaatatttcagtcgcgcaacaagaaaatgagtcaccactacgcaagggttgttggttcgggtattgacttcctctacatgtcggcctctcggatgctgctacctctgaatttaggcttctttttcttctcttgtgggatacaaaaaccgtaatttagcatgtaatttgtgctgttgctgcagttgttcagatttatccagcatatatcctggattccccaaattgagatttatttgtgtcccttagttttgtgtctagccaccatctcagacgtgcctgtgtgtctcagttattgccttgtgcttgcatacttgcgttattgctgagtgtcttcactgctattttgcagcttttaaattctcag

SEQ ID NO: 101916 - DNA, 3385 bp, Zea Mays
tccacttccacctccgtccgttccccttctcctcctcctctcctccccttccatgccctcttagcttctgaaggtctccgccacctcctgctagctacccttctgagctttcaagctttgctgaacgcacgcgggcggacgcggtaaagcatcacatcttctttgagagctgcagggaagagatcgataagagttctattttttgcaaaggcacacagacatatatagttcttctgctagatctcaccgccagtcagctcgcagcgaaggttccctgggctaccttgtcgctggatctgttgctggtcgtgttgttacttgtcaggcaaggtataatatatctccgtacagctaggaataggattgggtagtaggggggtacgcatgtgccagtgaagaaatgggaaggagctagtgtggaggcagcaagaattagggttggagaggttccgcgagaggagaaatgatgatcccggcgaggcacatgccgccgacgatgatcgtccggaacggcggcgcggcgtacgggtcctcgtcggcactgtcgctcggccagccgaacttgatggacaaccagcagctccagttccagcaagcgttgcagcagcagcacctgctgctggaccagatcccggcgacgacggcggagagctgcgacaacacggggcgcggcggtggtggccgggggtccgacccactggccgacgagttcgagagcaagtccggcagcgagaacgtggacggcgtctccgtggacgaccaggacgaccccaaccagcggcccagcaagaagaagcgctaccaccgccacaccctgcatcagatccaggagatggaagctttcttcaaggaatgcccgcacccggacgacaagcagcgcaaggagctgagtcgggagctgggtctggtacccctccaggtcaagttctggttccagaacaagcgcacgcaaatgaagaaccagcacgagcggcaggagaactcgcagctgagggcggagaacgagaagctgcgcgcggagaacatgcggtacaaggaggccctcagcagcgcgtcctgccccaactgcggcgggccggccgcgctcggcgagatgtccttcgacgagcaccacctccgcgtcgagaacgcgcggctccgggaggagatcgacaggatctccgccatcgccgccaagtacgtgggcaagcccatggtgtccttccccgtgctgtccagcccgctcgctggggcgcgtccgtcgccgctggacatcgacagcggtggcgtactggggggtgctgccacttatggcggcgccgctgacatcttcggcggcggcggcggcgtcgctgcttgtggtgcggccagggattgtgacaagcctatgattgtggagctggctgtgacggccatggaggagctggttcggatggcgcagctggacgagccgctgtggaacgcgccggcaggcgggcacgacgggtctgctgagacgctgaacgaggaggagtacgcgcgcatgttcgtccctgctggagggctcgggctaaaaaagcagtacgggttcaagtcggaggcgtcgcgcgacagctccgtcgtcatcatgacccatgccagcctcgtcgagatcctcatggacgtgaatcagtatgcgacggtgttctcgagcatcgtgtcgagagctgcgacgctggaggtgctgtccaccggcgtggctgggaactacaatggcgcattgcaagtgatgtcggttgagtttcaggtgccttccccactggtgccgactagggatagctatttcgtgaggtactgcaagcagaacgcggatggaacatgggccgtcgtcgacgtctcgctggacaccagctcagtcctcaagtgccggcgccggccgtcgggatgcctgatccaggaaatgcccaatggctactcaaaggtgacctgggtggaacacgtcgaggtggatgacaggtcggtaaacggcatctacaaactgctggtggactcagggctcgccttcggtgcacgccgatgggtcggaacgctggaccgccagtgcgagcgccttgccagtgtcatggccagcaacattccgaccagtgacatcggcgtgatcactagcacggaggggaggaagagcatgctgaagctggctgagaggatggtgacgagcttctgcggtggcgtgacggcctcagccgcgcaccagtggacgacgctgtccggcagtggtgctgacgacgtccgtgtcatgaccaggaagagcgtcgacgaccctggcaggccgccgggcatagtcctcaatgctgccacctctttctggctccctatcacacccaagcgtgtcttcgacttcctccgtgacgaaagctctcgcagcgagtgggacatcctctccaatggcggcgtcgttcaagaaatggctcacattgccaatggccgcgaccatggcaactgcgtctcgcttcttcgtgtcaatcagagcaccaactcgacccaaagcaacatgctgatcctgcaagagagctgcacggacgcctcgggctcgtacgtcatctatgcgccggtggacgtggtggccatgaacgtggtcctcaacggcggcgaccccgactacgtggcgctcctgccctctggcttcgccatcctgcccgacggcccgtcaggcagcagcaacatgcaaggcggtggcggtggcggcgtcggctcaggcgggtcgctcctgacggtggcgttccagatcttggtcgactccgtccccaccgccaagctctcgctggggtcggtggcgaccgtgaacagcctcatcgcccgcaccgtggagcgcatcaaggcggcggtctccggcgagagtgttacccagcagtagctagcttagtcgaatcagacactcttcttatccttgcatcattgaaggagcagcaagttttagagctttcatcagtgggaagtcaagaacgcacctcagactctccttgccatgtggtgctcatagttcgagttcttttttcgcctagtttccccaaaatttctgggtagaaatatttcagtcgcgcaacaagaaaatgagtcaccactacgcaagggttgttggttcgggtattgacttcctctacatgtcggcctctcggatgctgctacctctgaatttaggcttctttttcttctcttgtgggatacaaaaaccgtaatttagcatgtaatttgtgctgttgctgcagttgttcagatttatccagcatatatcctggattccccaaattgagatttatttgtgtcccttagttttgtgtctagccaccatctcagacgtgcctgtgtgtctcagttattgccttgtgcttgcatacttgcgttattgctgagtgtcttcactgctattttgcagcttttaaattctcag

SEQ ID NO: 101917 - DNA, 2606 bp, Zea Mays
ctatcatgcatggaccgcatcctgacggtgatccatggcgtgtgcgtgtgcgtcgacttgcagaaccagcacgagcggcaggagaactcgcagctgagggcggagaacgagaagctgcgcgcggagaacatgcggtacaaggaggccctcagcagcgcgtcctgccccaactgcggcgggccggccgcgctcggcgagatgtccttcgacgagcaccacctccgcgtcgagaacgcgcggctccgggaggagatcgacaggatctccgccatcgccgccaagtacgtgggcaagcccatggtgtccttccccgtgctgtccagcccgctcgctggggcgcgtccgtcgccgctggacatcgacagcggtggcgtactggggggtgctgccacttatggcggcgccgctgacatcttcggcggcggcggcggcgtcgctgcttgtggtgcggccagggattgtgacaagcctatgattgtggagctggctgtgacggccatggaggagctggttcggatggcgcagctggacgagccgctgtggaacgcgccggcaggcgggcacgacgggtctgctgagacgctgaacgaggaggagtacgcgcgcatgttcgtccctgctggagggctcgggctaaaaaagcagtacgggttcaagtcggaggcgtcgcgcgacagctccgtcgtcatcatgacccatgccagcctcgtcgagatcctcatggacgtgaatcagtatgcgacggtgttctcgagcatcgtgtcgagagctgcgacgctggaggtgctgtccaccggcgtggctgggaactacaatggcgcattgcaagtgatgtcggttgagtttcaggtgccttccccactggtgccgactagggatagctatttcgtgaggtactgcaagcagaacgcggatggaacatgggccgtcgtcgacgtctcgctggacaccagctcagtcctcaagtgccggcgccggccgtcgggatgcctgatccaggaaatgcccaatggctactcaaaggtgacctgggtggaacacgtcgaggtggatgacaggtcggtaaacggcatctacaaactgctggtggactcagggctcgccttcggtgcacgccgatgggtcggaacgctggaccgccagtgcgagcgccttgccagtgtcatggccagcaacattccgaccagtgacatcggcgtgatcactagcacggaggggaggaagagcatgctgaagctggctgagaggatggtgacgagcttctgcggtggcgtgacggcctcagccgcgcaccagtggacgacgctgtccggcagtggtgctgacgacgtccgtgtcatgaccaggaagagcgtcgacgaccctggcaggccgccgggcatagtcctcaatgctgccacctctttctggctccctatcacacccaagcgtgtcttcgacttcctccgtgacgaaagctctcgcagcgaggcacgcacccgcgcgcccacccatacccagtttttttttaatcgagaacacgttctacctagctatgaaccgccttttctttttttcttttttctttttttgcagtgggacatcctctccaatggcggcgtcgttcaagaaatggctcacattgccaatggccgcgaccatggcaactgcgtctcgcttcttcgtgtcaatcagagcaccaactcgacccaaagcaacatgctgatcctgcaagagagctgcacggacgcctcgggctcgtacgtcatctatgcgccggtggacgtggtggccatgaacgtggtcctcaacggcggcgaccccgactacgtggcgctcctgccctctggcttcgccatcctgcccgacggcccgtcaggcagcagcaacatgcaaggcggtggcggtggcggcgtcggctcaggcgggtcgctcctgacggtggcgttccagatcttggtcgactccgtccccaccgccaagctctcgctggggtcggtggcgaccgtgaacagcctcatcgcccgcaccgtggagcgcatcaaggcggcggtctccggcgagagtgttacccagcagtagctagcttagtcgaatcagacactcttcttatccttgcatcattgaaggagcagcaagttttagagctttcatcagtgggaagtcaagaacgcacctcagactctccttgccatgtggtgctcatagttcgagttcttttttcgcctagtttccccaaaatttctgggtagaaatatttcagtcgcgcaacaagaaaatgagtcaccactacgcaagggttgttggttcgggtattgacttcctctacatgtcggcctctcggatgctgctacctctgaatttaggcttctttttcttctcttgtgggatacaaaaaccgtaatttagcatgtaatttgtgctgttgctgcagttgttcagatttatccagcatatatcctggattccccaaattgagatttatttgtgtcccttagttttgtgtctagccaccatctcagacgtgcctgtgtgtctcagttattgccttgtgcttgcatacttgcgttattgctgagtgtcttcactgctattttgcagcttttaaattctcagttagtttactt

SEQ ID NO: 101918 - DNA, 614 bp, Zea Mays
gacaggcatctacgacatagcggaggaactcgtatgcatcctcctggcgcccccacctgaagtgctcggcaaataggggcatgcagcggataacttttgctggggaatcgagcgccccagcatctgcccgaagcagccgagcaatctggagcaggagccgagctcgacgcagggagttccatggcgagcaggggaagcagagaagggagaaggaaggggagcaagcagcggcgtggctgctggcgctagcaggcagagggcgctcggcgagctgcacgggaggagcacgcagggagcagctgggcgcgagcagaaggagatccggcgagcgcagggcacgccatggagaggagcgaaggagattggggccgtgtgcagcagagaagctccagcagcggccgcgacagagggagatgaagaggtgatgcggctgcttccaggagataaagctggtgcttgaaaaaatctgcgtacggcaaaagggaagggcggctgagcggcgttgggataagggcaggctgagatctttttttattttctttttctttttctttgtttttttgtttatcagaattcgaagatattttggatcgagatttataacgataatcaaa

SEQ ID NO: 101919 - DNA, 81 bp, Zea Mays
attcttttcacacacagctgccccatttatttactaagtttggtattgcctctgttttttatttttccctaactactcacg

SEQ ID NO: 101920 - DNA, 1726 bp, Zea Mays
cctgccattggatggcgctggatgcccttcactcccgtcccagattcatcgtcctgcagctcctcttccatctccgatctgctgccataccactaccacaccatggatagccaaactccactgcataacccgctgcgaagaaaccttctaaagtgactaagtgatcgatctccttgtcctgaaaggctgaaacctaaggcgagagaggccacgggagagcgccatggttctcctgctcctgggctgctctcctgcatcgtcgcgcccagactgctctccagcttccaggagaagatgcagcaccgccggacagaaaatggtcaggtgctctctgaatgaagaaacgcagctgaacaaacatggactagtatccaagcagttaatttcatgccttgctgcttcgcttgtgttcgtctctccacctagtcagaaacctttgcccgtccaggcttgtgccagattgcaacagtggcagccattgacagtgcttcagttcctctgaagtttgacaacccttcagatgatgtcagcacagggatgatgatgaggggtatgaccgccaaaaacttcgatccagttcgctactctggtagatggtttgaggtagcctcgttgaaacgtggatttgctggtcagggacaagaagactgtcactgtactcaggtattgtaatacctgaaacatcaaacacattggagaggatatctgtagccaggatttttctccattatctaaaaaagaacatctctgtctgtgtgatgatcctgcagtaatatatcataatcagtcatgataaactagtacttgacatcttaataacaaaattgtttgagatagggatggtatgtccaatcttccatgcactttgcatgatatgcagtctgtaaacggatgacatacaatttttttggggggaacttcagggagtgtattcttttgatgagaaggcacgctcaatccaggtggatacattctgtgtccacggtggacctgatggatacatcaccggcattcggggcagggtgcaatgcctatctgaagaggacattgcaagtgctgagacagatcttgagaggcaggagatggtccgtgggaaatgctttctccggttccccacactgccattcatacccaaggaaccctatgatgtccttgcaacagactatgacaattatgcaattgtgtctggagctaaggatacaagctttattcagatatactcaagaacacccaaccccgggccagaattcattgacaagtacaagtcttatgttgccaacttcggctatgacccaagcaagatcaaggacactcctcaagactgcgagtacatgtcctcagaccagattgcgctgatgatgtcgatgcccgggatgaatgaggccttgacgaatcagttcccagacctcaagctaaaggcaccggtcgcacttaacccattcacaagcgtgtttgataccctgaagaagttgcttgaactgtacttcaagtaaaaaacagtgtagcattgtccagtagccaatagccaattgcccaacttctcgacttggatcttcaatggaatgaagttcagtttattctgacgtttgctagtcagttagttctttttaagtacattgtttttttgtctattatataagagtgggatatgtaagattaagatctgttcagctgttctcggttactgtttgtacaattgttctttttcctgatgtttttatacacc

SEQ ID NO: 101921 - DNA, 1493 bp, Zea Mays
gccattggatggcgctggatgcccttcactcccgtcccagattcatcgtcctgcagctcctcttccatctccgatctgctgccataccactaccacaccatggatagccaaactccactgcataacccgctgcgaagaaaccttctaaagtgactaagtgatcgatctccttgtcctgaaaggctgaaacctaaggcgagagaggccacgggagagcgccatggttctcctgctcctgggctgctctcctgcatcgtcgcgcccagactgctctccagcttccaggagaagatgcagcaccgccggacagaaaatggtcaggtgctctctgaatgaagaaacgcagctgaacaaacatggactagtatccaagcagttaatttcatgccttgctgcttcgcttgtgttcgtctctccacctagtcaggctattcctgcagaaacctttgcccgtccaggcttgtgccagattgcaacagtggcagccattgacagtgcttcagttcctctgaagtttgacaacccttcagatgatgtcagcacagggatgatgatgaggggtatgaccgccaaaaacttcgatccagttcgctactctggtagatggtttgaggtagcctcgttgaaacgtggatttgctggtcagggacaagaagactgtcactgtactcagggagtgtattcttttgatgagaaggcacgctcaatccaggtggatacattctgtgtccacggtggacctgatggatacatcaccggcattcggggcagggtgcaatgcctatctgaagaggacattgcaagtgctgagacagatcttgagaggcaggagatggtccgtgggaaatgctttctccggttccccacactgccattcatacccaaggaaccctatgatgtccttgcaacagactatgacaattatgcaattgtgtctggagctaaggatacaagctttattcagatatactcaagaacacccaaccccgggccagaattcattgacaagtacaagtcttatgttgccaacttcggctatgacccaagcaagatcaaggacactcctcaagactgcgagtacatgtcctcagaccagattgcgctgatgatgtcgatgcccgggatgaatgaggccttgacgaatcagttcccagacctcaagctaaaggcaccggtcgcacttaacccattcacaagcgtgtttgataccctgaagaagttgcttgaactgtacttcaagtaaaaaacagtgtagcattgtccagtagccaatagccaattgcccaacttctcgacttggatcttcaatggaatgaagttcagtttattctgacgtttgctagtcagttagttctttttaagtacattgtttttttgtctattatataagagtgggatatgtaagattaagatctgttcagctgttctcggttactgtttgtacaattgttctttttcctgatgtttttatacaccattgcgattgtctgtcc

SEQ ID NO: 101922 - DNA, 1744 bp, Zea Mays
tccctcctccctctctcttgtcttctcccttgcggcgatccggattccgccgcaacggcccctctcgccttctccctcgcggcgctcgatccctccggattggcgcgtggaggggacagtggtttagaggagagaaacaagtgccgattgacaccaatagggtattcttaccattttcagatcagctggttcaacaaaactagtaaagatggcatcagaagggaacaaagacgtacctcatgaagctttgaccgtggatcactcatcgatttcgggttcaaagcgcaagcgtggccgcccaaggaaatatgagtatcctgtaaatgaactaccacagaaggtacagcccatccagagcgccccacctcttcttcactgcacacaagatggctcaagtctggccagccatgcatctggtggcggtgctcatggtaattggtccgctcaacctaggaattcagctaatgcttctcttcaaggtaattctggcaaagatgactttcttggcaagcattttgtgggcaagctgaccaagaaagttcctgggttttcgctcattacggtaaaagtgaaggacaatcaggtgctcaaaggttgggttccagatgaaattaatctccgcccaataacacctaaggatgaccttgccccagagctacccatgctgcgaccgagtcaagttcgaaagcgagcatcagcgatccatatgcaacctgctcttcctgtgccaatgcacttggagaatgttacacttgcaaagcctctgcagatgaggagacctgttgagaaaactattgctaagcatgctgtgcctcttgcttctaggccttacattagttctggtgttgttgcagcaatacctatatcggttgctcccatcaatcctgaaatgagaacttcggccaggcaggatgctgaacttgtgatcccacaatcatcagtttctgcagtgccaataaaatttgtttgtcctgcctcggtaccatgcaagcaactggctaatcaaaatgagtttactggaaataagtctgttgatgaggttcagaaagattcggaatctccaaatgtaaccaaggaatcaccagtgaaagctgaaaaaccaaacattgctcttgtggatgtagtggccaaggattctctaggggaagggcaacaacttaatgatcaagtaacggatgtagttagggatttttctggtcaaactcaaaatgttgatgtgacaatgtctgatgagatcaagatagcatcaggtgccagagataagccaaattctgcaaattgtgaacagcagagttctaaggaaccatcagacatcacagaacaatctgagcagctcaagacagagaccgatgtccagaaaggagttgatgcctcagatgacattcatcctgcgcatgatgaacaataaatcaaggttgtcggtaagtgaaaatagagatcaagattcaacgaacacaacacagatcctgatgtttagtggaagtttgctgcctgtaatgtttctgtcaggcttattgggatgtggagctggaattttagcatggaccaatgctttaggtgtataggtgagagattaagtagagttacataaacccaaaaaaaatcacctaggacgtagcagttatagcacagagagaatacttgatggacttctcatttttaggaagatgacccggcttaaagttattttgaactcctggtcttgtaatatgcctttttaatattttaagctctattcacagac

SEQ ID NO: 101923 - DNA, 1656 bp, Zea Mays
tccctcctccctctctcttgtcttctcccttgcggcgatccggattccgccgcaacggcccctctcgccttctccctcgcggcgctcgatccctccggattggcgcgtggaggggacagtggtttagaggagagaaacaagtgccgattgacaccaatagggtattcttaccattttcagatcagctggttcaacaaaactagtaaagatggcatcagaagggaacaaagacgtacctcatgaagctttgaccgtggatcactcatcgatttcgggttcaaagcgcaagcgtggccgcccaaggaaatatgagtatcctgtaaatgaactaccacagaaggtacagcccatccagagcgccccacctcttcttcactgcacacaagatggctcaagtctggccagccatgcatctggtggcggtgctcatggtaattggtccgctcaacctaggaattcagctaatgcttctcttcaaggtaattctggcaaagatgactttcttggcaagcattttgtgggcaagctgaccaagaaagttcctgggttttcgctcattacggtaaaagtgaaggacaatcaggtgctcaaaggttgggttccagatgaaattaatctccgcccaataacacctaaggatgaccttgccccagagctacccatgctgcgaccgagtcaagttcgaaagcgagcatcagcgatccatatgcaacctgctcttcctgtgccaatgcacttggagaatgttacacttgcaaagcctctgcagatgaggagacctgttgagaaaactattgctaagcatgctgtgcctcttgcttctaggccttacattagttctggtgttgttgcagcaatacctatatcggttgctcccatcaatcctgaaatgagaacttcggccaggcaggatgctgaacttgtgatcccacaatcatcagtttctgcagtgccaataaaatttgtttgtcctgcctcggtaccatgcaagcaactggctaatcaaaatgagtttactggaaataagtctgttgatgaggttcagaaagattcggaatctccaaatgtaaccaaggaatcaccagtgaaagctgaaaaaccaaacattgctcttgtggatgtagtggccaaggattctctaggggaagggcaacaacttaatgatcaagtaacggatgtagttagggatttttctggtcaaactcaaaatgttgatgtgacaatgtctgatgagatcaagatagcatcaggtgccagagataagccaaattctgcaaattgtgaacagcagagttctaaggaaccatcagacatcacagaacaatctgagcagctcaagacagagaccgatgtccagaaaggagttgatgcctcagatgacattcatcctgcgcatgatgaacaataaatcaaggttgtcggcttattgggatgtggagctggaattttagcatggaccaatgctttaggtgtataggtgagagattaagtagagttacataaacccaaaaaaaatcacctaggacgtagcagttatagcacagagagaatacttgatggacttctcatttttaggaagatgacccggcttaaagttattttgaactcctggtcttgtaatatgcctttttaatattttaagctctattcacagac

SEQ ID NO: 101924 - DNA, 1717 bp, Zea Mays
tccctcctccctctctcttgtcttctcccttgcggcgatccggattccgccgcaacggcccctctcgccttctccctcgcggcgctcgatccctccggattggcgcgtggaggggacagtgatcagctggttcaacaaaactagtaaagatggcatcagaagggaacaaagacgtacctcatgaagctttgaccgtggatcactcatcgatttcgggttcaaagcgcaagcgtggccgcccaaggaaatatgagtatcctgtaaatgaactaccacagaaggtacagcccatccagagcgccccacctcttcttcactgcacacaagatggctcaagtctggccagccatgcatctggtggcggtgctcatggtaattggtccgctcaacctaggaattcagctaatgcttctcttcaaggtaattctggcaaagatgactttcttggcaagcattttgtgggcaagctgaccaagaaagttcctgggttttcgctcattacggtaaaagtgaaggacaatcaggtgctcaaaggttgggttccagatgaaattaatctccgcccaataacacctaaggatgaccttgccccagagctacccatgctgcgaccgagtcaagttcgaaagcgagcatcagcgatccatatgcaacctgctcttcctgtgccaatgcacttggagaatgttacacttgcaaagcctctgcagatgaggagacctgttgagaaaactattgctaagcatgctgtgcctcttgcttctaggccttacattagttctggtgttgttgcagcaatacctatatcggttgctcccatcaatcctgaaatgagaacttcggccaggcaggatgctgaacttgtgatcccacaatcatcagtttctgcagtgccaataaaatttgtttgtcctgcctcggtaccatgcaagcaactggctaatcaaaatgagtttactggaaataagtctgttgatgaggttcagaaagattcggaatctccaaatgtaaccaaggaatcaccagtgaaagctgaaaaaccaaacattgctcttgtggatgtagtggccaaggattctctaggggaagggcaacaacttaatgatcaagtaacggatgtagttagggatttttctggtcaaactcaaaatgttgatgtgacaatgtctgatgagatcaagatagcatcaggtgccagagataagccaaattctgcaaattgtgaacagcagagttctaaggaaccatcagacatcacagaacaatctgagcagctcaagacagagaccgatgtccagaaaggagttgatgcctcagatgacattcatcctgcgcatgatgaacaataaatcaaggttgtcggtaagtgaaaatagagatcaagattcaacgaacacaacacagatcctgatgtttagtggaagtttgctgcctgtaatgtttctgtcaggcttattgggatgtggagctggaattttagcatggaccaatgctttaggtgtataggtgagagattaagtagagttacataaacccaaaaaaaatcacctaggacgtagcagttatagcacagagagaatacttgatggacttctcatttttaggaagatgacccggcttaaagttattttgaactcctggtcttgtaatatgcctttttaatattttaagctctattcacagacatatggaaacatgatgctatacaggaaaactt

SEQ ID NO: 101925 - DNA, 1698 bp, Zea Mays
cccaaagttagcgtcgtcgtgtagtcgtctttctcaagagtcaagagcatcatttcacctagtacccagtaaatggaggcgctcgtggtgcggcagctgggcgatcccaccctgccccctggcggtgaagcctccccgttcgccgcggtctctggggatcacccagtgccggagatctcatcgccgacggctgtccgagtgcgagtcgcggcgaccagcctcaacttcgccacgttcctccaggtgcagggcaagtaccaggagcggcccccgcttccgttcgtgcctggatccgactactctggcgtggtcgacgcagtcggtcccggcgtgcgtgggctccggcccggcgaccgcgtctgctcctttaccggcctcggttccttcgctgacttcatcgtcgccgaggagaagcagctatttttggtgcctgatggatgcgacctggtcacagctggggctttaccagttgcatttggtacatcacatttggcccttgttcaccgagcccaattgaaggctggccaggtgctacttgttcttggtgctgctggtggtgtcggggcatctgctgtgcaaataggaaaagtttgtggtgctgttgttattgcagttgctaggggggctgagaaatcggattatctcaaatccataggtgccgatcatgtaattgactcaagcaaggataatgttatagaaagtgccagtctttcttaaaggctagaggcttgaaaggtgttgatgttttatatgacccagtcggggggaaattaactcaagatagcctgaaacttctcaattggggagcacaaattcttgtcatcggatttgccagtggtgatgttccagttattcgagcgaatattgctcttgttaagaactggacagttcatggtttgtactggggaagctacttaactcaccggccacaagtactcattgattcgctcaatgaactcttgtcatggctttcaaagggtctgataacagttcaaatttcacactgctacagacttgttgaggtccatcttgctttctctgccctgagagataggaaggcggttggcaaagtgatgattgtaatgggctcctcagctgtaccaaggctctgatatcattcagaaacgtttctctacgagatcataccaaggctctgttatcattcagaaacatttctctacgagatcatgaggcttatactgtgtatctcttttatcatctgagactgaagtagtttccttgtcaataatgtggtgtatgatctacaaaaataatcagagaaataagcagtttatatcgacacagtgccaagcagcatatacaactgatgagaaacagctctaccatgccaatgctgtgagtagtggcatgtacaataaatacaacctgattaaccagcatctagatcgcaaggattggattatggtggcagtgggaagacctcgccgttttttttatgttttacaccattaggtgatcttattccaaatatgttgtgtattaaatataatatgtagctccttagaagcggatgcactcgaccatagcaaagtgtacaacaacgagaaaagagaggcttaggtgttgtttggttcaagaaatgtacaacaacgagaaaagagaggcttaggtgttgtttggttcaagaaatgtaacgcaaatggtaatggtaatggtttacgttcgattactggcggt

SEQ ID NO: 101926 - DNA, 1844 bp, Zea Mays
cccaaagttagcgtcgtcgtgtagtcgtctttctcaagagtcaagagcatcatttcacctagtacccagtaaatggaggcgctcgtggtgcggcagctgggcgatcccaccctgccccctggcggtgaagcctccccgttcgccgcggtctctggggatcacccagtgccggagatctcatcgccgacggctgtccgagtgcgagtcgcggcgaccagcctcaacttcgccacgttcctccaggtgcagggcaagtaccaggagcggcccccgcttccgttcgtgcctggatccgactactctggcgtggtcgacgcagtcggtcccggcgtgcgtgggctccggcccggcgaccgcgtctgctcctttaccggcctcggttccttcgctgacttcatcgtcgccgaggagaagcagctgtacgtccctgaggtcaaaaggatcgaactctgcctcacccgaggtcctcctcacgagtattccaaaaactccgccttgctcgagcccgatctcggacagggcgtgagcttgggagaatctccgcctcggccgaggagaagcagctatttttggtgcctgatggatgcgacctggtcacagctggggctttaccagttgcatttggtacatcacatttggcccttgttcaccgagcccaattgaaggctggccaggtgctacttgttcttggtgctgctggtggtgtcggggcatctgctgtgcaaataggaaaagtttgtggtgctgttgttattgcagttgctaggggggctgagaaatcggattatctcaaatccataggtgccgatcatgtaattgactcaagcaaggataatgttatagaaagtgccagtctttcttaaaggctagaggcttgaaaggtgttgatgttttatatgacccagtcggggggaaattaactcaagatagcctgaaacttctcaattggggagcacaaattcttgtcatcggatttgccagtggtgatgttccagttattcgagcgaatattgctcttgttaagaactggacagttcatggtttgtactggggaagctacttaactcaccggccacaagtactcattgattcgctcaatgaactcttgtcatggctttcaaagggtctgataacagttcaaatttcacactgctacagacttgttgaggtccatcttgctttctctgccctgagagataggaaggcggttggcaaagtgatgattgtaatgggctcctcagctgtaccaaggctctgatatcattcagaaacgtttctctacgagatcataccaaggctctgttatcattcagaaacatttctctacgagatcatgaggcttatactgtgtatctcttttatcatctgagactgaagtagtttccttgtcaataatgtggtgtatgatctacaaaaataatcagagaaataagcagtttatatcgacacagtgccaagcagcatatacaactgatgagaaacagctctaccatgccaatgctgtgagtagtggcatgtacaataaatacaacctgattaaccagcatctagatcgcaaggattggattatggtggcagtgggaagacctcgccgttttttttatgttttacaccattaggtgatcttattccaaatatgttgtgtattaaatataatatgtagctccttagaagcggatgcactcgaccatagcaaagtgtacaacaacgagaaaagagaggcttaggtgttgtttggttcaagaaatgtacaacaacgagaaaagagaggcttaggtgttgtttggttcaagaaatgtaacgcaaatggtaatggtaatggtttacgttcgattactggcggt

SEQ ID NO: 101927 - DNA, 1434 bp, Zea Mays
atggagccccggccgtcagccagccaggtccggcgtccgggtctgcgccctgcggcgtcactgctgtcgccaccgtctccgatggtcccacatccatccagcgggccgcgcgtggtacaaaaggctcttcctcgccgtcaggtgcagctgcccaaacaccagacacagactccaccaccccgcttcgatcttctgttgcagctgaaatctgtcagattctgcagttcattccaaatggctgctgcagcagagcacggcaactgcgatgcttgggcggccagagacccttctggggttctctcaccatacaagtttaaccgcagggcagtgcaaagcagcgacgtttcgctgaagatcatatactgcggggtgtgttacggtgacgttatgtggatacagaacaagcacaacgactcagtttatcctctggttcctgggcatgagatagctggggttgtgactgaggttggcgcagacgtcaaggccttcaaggtgggtgaccacgcaggcgttggaacctacgtgaactcgtgccggcactgcgagaactgcaacagctctctggagaactactgcccagaaacagttttcacttacaacacaactgatgctgatgggaccatcacaaaggggggctactccactcacattgtcgtccatgaaaggtactgcttcaagatacccgatggctaccctctggcgcaggcagcgcctcttctgtgtgctggaatcaccgtctataccccaatggcgcggcacaacatgaagcagcctgggaagtcgctgggagtcattgggctcggtggcctaggccacatggcggtcaaatttggcaaggccttcggcctcaaggtcacggttttcagcacgagcgaatcgaagagggaagaagccattaacctccttggagcagataactttgttatatcgtcagacacgcagcagatggaggccctgaaaaactccctgcacttcatagttgacactgcttctggtgaccatccattcgatccgtatctctcgctccttaaggttggcggtgtgatgacaatagtgtgctttccaagtgagatcaagatgcaccctgcgagcctcaatcgtggtgggcggaccttgtctggtagtattgtcggaggtacaaaagacatccaggagatggttaacttttgcgcggagaacaaaatctatccagagatcgagatcatcaagatggattatatcaacgaggctctcgccaggcttgttaaccgagacgtgaaataccgctttgtcatcgacatcaagaactctttcgagtagcatgctcattcacatgatccctgtcttctttgtcaatgtatgagagataatgagtcgtttcgaataaagcttagacatgataaataacaagtatgcttgtgactgtaaaatcgttctataaataaggcgctgtgt

SEQ ID NO: 101928 - DNA, 4785 bp, Zea Mays
tcaactgaagcacgcagtccacaccgaagcaacgcttcgctcctcttcgccgtagtctttctcggccctccgctcccatactggttgttctacttattcaacgcgcgcgacatacattggagttgcgatccaaactgctggtgcagttttacttgtcacaacccttggtggttcagcataaactccatgagcgacgacggcatggcctccgctgcggtggagccgcccaagcgggagcaaaattttctagtgaaggtggggatggaggcatggacgcagtcgttcgcggttgcacacaaagtcaggttggtgcacatcctcaagaatctccacacctcggaggtgaaaatctactccgacgcgtccaaggagttcataggagtactggatggtgagtctggcggcgaggtgctgcaggagtacgtgcaacagtcaccgcagcttggggagctgctcgaggcatggcggctccaccgggagaacccggggatggcgcacatacttttgctctttgcagctgtcctgggccaccctgatggtaagctgcggcgacatggttcggttaagaagagcttggacggtgtcgctaggatgatactggaggataaggagaagatgggggatgtgtatttggagctgaatagtggtgagttccgacggcagaatgcagcactggatttgcttgctgcaattgtcaggcgtggagggggtctagcgtctgaggtcgctgagagatttgattttaagatacctattttgccgcagctggctgggacaatgaagaagaaggggagcagggatggaaggaatcggcggaagggtgccgactttgggtccacaaggcggtcgtttattgggtttgccatgtcatttttggaggttgggaatccaaggctgcttagatgggtccttcaacagaaggaggtatattcaggggtgcttcgtgggattggaaatgatgatgctgagactgtcatctatgtcctctcaactttgcgagacaatgtcctggtagatgagtctcttgtcccaccagggctcaggagtgtcctctttggaagtgtcacattggagcagctgagcttgatctcaggaaatcttgaatcaggggaagcagctgacattgctcatgaggtattggtcatggtgtgcactgatccaaaaaatggattgatgccaggatcaaatttgagaggtaatgagaaacgcttactagatctcatgaaaaagttgaaagctactgaggttgttcatcacaaaaaattgttactggccattgtgagtaatagactgtctctttgttcggcgtacatgaatgagtttccttacaatattgaaccacgttcgtctccttcatggttttcagccatctcccttgcagctgatgtcatagcttcagcaaaatgcaatagcattgttcaaactctttcatccagttcacatggtctggtatctgtagatgatgaagaagttcaggtagtcttgaagtgcatggtgcccaatgtatgctctcgagcaatgataaatagggggttgctgcattctgatgatcttgtgaagcatggttctctgaggcttgtttttgaatcagttaacctgctttgttatatcactgaatccatcaattgcatggtatcaaaagggagactgaagtcagaattcattggctcagagaaagtaaccatgaaaatagatggtttcccagtattaagctgttctgatgctacagatgcatccttagttgatgaggttcaccagggagatgaaatgcaggtcaagaggtggacatctctaagagaatacatccaagatgaagttcatggagctatgcctgatcctcaagtctttctcaagttactctcttctaccagccaaaaacatcaaagttattctcagagcatacaaaagaataatgctcaactttctgagcctcctcaaaagaaacgaagatgcagtccttcctgtgaagttgatgatattattattggtggcattgatgttgagcaggataaggacgcatctgaagaacaaggcctggaattaaaaaatgaccgcacaaccaccttgtgtgagatatggagcttagataaacaagatccaaagacgaaagatgcaaatgttgtggaaaatgtcttccactcgaagttgctggatgttctcaggctttatttgggggtgatgcccagctcttttgatggatcatatgacttctttaagattataccacctaacccattggatctgtccatggatgagcaacagtccctgttatcttttttacttgaatattcaggccaatctagaggatgtttggacccagaaagagttccagaatcaatgtacaagtatctgcaacccttggtttatatcatgttgcattcacagattaagaacatccgtgatcaagcatatattttagttaaagctgctatggcaagttcgggtgcttttgatcataacttcacagagattgatgcatggttggttttcttgcctggttatgaggccaaatggtgtgtaagagagaacctaagaattggagcacctaataaattatcacacattgtgatcccttttctgtgtgatgctatttcggtagttggtaataacctgtataaataccaagagcacacacacaagcttatctctaaatcaggccagttggaaggccgttctccagatttcagccctctgattatttgtgttcttcagaaatgccttaggctactcgacacagcatctagaagtacaaagttacacgagaagtctacaatttcattgtatgtgtgcaacacgatccaccttattcttcagtctcaggtggacatgcatttattgcctgatcttataggtactattctaaaagaaagatttgataaattttcatcccaagaactgaactctaggatttatctggctgagtggaggccgttaacaaatatgctgcatttcttgaggaaaatttctgaccagcaaaattatagcctgttcaacacgctggaacattctcctgagtttgatggtaactcgttgtgctctgtatctagacaggttgaagaattgttgaatcaagaacaaactaattcgctggatgatgtagcaaccgcattcttattttcaatcatatgtgcacctccaaaagatgttatcagtgcctttccagatcttcttgatttggtgaaagcacattttccatctcatgttgctttcttgtcatcggttctttttctacaacatgattatctggctaaagttgctagttgttggccagatatattcttcagcagcatcagactgttcaaggatgatatcaatgctgaccatgcaaacacagttgaggacgaatgccagaacctctctgtttcaacagaatcagctccgctaagtacatttttaagtgtcagtcccttctgtgcgcttttaccttcagtattgagccttgcatgttcttcgccagatgaaatcatggaagcacataaggatgcacttctaagactccttgaagttaaattgtctgactgcacattcagtgagcttaccttgtatctgagagtcatcttgttctggactcatcacctactgtcatcatatactattaaggattcaaattcagatgatcttgagcaagtatgtcatttgtgctttggtcttcttgatagagtatttgagcgtattcaagttttgactgctgacccttcacagtcaaattctgaatacccgtactatcccgctcaacatatccaagacattgttgattctgttcttcggcatcctgttattaccctgtctttgtcatgctctttatccaattgccaaaatttagcagatgggagtttggaacatctggaagaagctttggctatttttgcgacggaaaatctgcaccttatagaccgtttcgttctaaaccttttgggtaaattgtatgaccttttgctaatgtttggtagctatggtggtaactactctacagataatgggccatcccatgagtcactgtttgctgctccaaatcttctgctggagaacataatattgttgttcaaggagaagtttgagctctgcgtggacaaactaaattttgaattgcttttgccaaatttctacatggttcgcacactgtcaaagttcttttctcctttcaaactcctggagcttgcaaattggatgttctcaaaattggatggtcacaacttcagttcacctgcttttgtttctgctgttttgatgtgcctatacattattgatgtcaccatggaaatgctgtgcttttatctgcaaaaaactgatcagagatcacaatcctatctatttcggcacttggagattcacaattctgatatcaatgccattcagcaagcctatcacatcattcttcattttgctactaaatggaatgttgagtttgctgatcattgcttgctgaagatgctgtgccatattcattacacagaaagatgcgcaggatggaacactgactatattgcattccatatggtattatctacaatggccatcaatactcccattgacattcttcatcactgcattttccccacatctaaggttaaagcaaaagcaatcctgttgcttttggaagcaagtcctatgcatctgaacctttttagccagatattcttggaaattttaaataaagacacttatgttttgcaagtcaaggattctgattccaacaatttgtgggctcaagaagatggtgctatacttctgttgcctgccgctttatcatgcttgaaatttcacagcaatgacaataggcagtgt

SEQ ID NO: 101929 - DNA, 2638 bp, Zea Mays
attggctcgcgctcggcagtcggcacgacggtacttggacttggctattcccaacgccaccccgcaaccgcaacgtctctctagcgtctagcctctgcctgcgctcccacaccagaacaccacaccgctccgcgtgcgtcgcccgcactcctcgcctctgcccgtctgcctaccgtgccgtgccgtgccgtgctccccacccgatgcagccgccgacgcgggccgtgccgagccacagccggagatgagctccaggaaccgttccgccgccgcctcgtccgctgccccggctctccggacaccgcgccgcctgaagcggcggccagttaaggcgtcggcgccggggccgggcagcgggcggcggagcgggcccgcgacgccgctgctgaaatgggacgtcggtggcggcggcgggcgcggtgaggggaggaaggctggcgccgacgaagcgggggacgccgcgcgggcgcgggagaccaaggcgaaggcgacggaggtgtcggtgcggaggctcgcggccggggtttggcggctgcgcccgccggaggccgtggccggcggcgggagcggggtccgcgtgggcgtcgagcatatcccaaggcatctacaagtccagcttctgaagcagaacacttcaggtcatcaccagagttcgaagaatgaggtttcaagccccatatctgttttggagcggaagagtggagagctccacaagggacaacttcatgctacttctgctatgctgcctgtcgctaccatggagaaggcaacgaaatgggagcctggggacataaagggaatggaatcgcatgatgcgtatctgatagccagccagctgaatcttcttgatgaacacagagacaccgcgtatgttgctgacctccagatggagcttcagcaagcacgtgataggataagtgcgatggaaactgagcgacggtcagctaagaagaggcttgaccacttgttcaagaaacttgcggaggagaaagcggcttggaggaacagagagcatgaaaaggtgcgtgctatcctcgaagatatgaaggcagaccttgaccacgagaagaaaaaccggaggcggctggagatgattaacatgaaactcgtcaacgagctgaaggaggccaagatgtcagcaaaacagctgttacaagagtatgagacagagaggaaagcacgtgagctcactgaggaggtgtgcaacgagctagcaagagaggtggatgaagacaaagctgagatcgaggccctgaaacgggactcccagaggttgcgagaggaggtagacgaggagcggaagatgctgcagatggcggaggtgtggcgtgaagaacgggtgcagatgaagcttgttgatgcaaaacttactctcgacgcaaaatacacacagctgagcaaactgcaacaggatgttgaggcgtttattgctgcatgcagtactgctaatggagacgtcacggtagtagagcaagcagagagcataatacaggcaatcaagtcagtcagagcccaagatgctgagttcaggtacgagccaccggccgcatcagaagacatattttccatttttgaagagctgcgtccaagtgaggagcctgtcatcaaggagatcgagccatgttacaagaatagctctgccaaatgtgaaccagaaattcaagaggttagcccaatgaccgatatattcctcgaaaagaaagccaaggcaaactcgaacaaaagccctaaagatgaaagcgacactgaagatggcagcagctgggagacaataagccacgaagatgtccagggttcaagcggttcacctgatggaagcgagccttcggtcagcaacaaggtctgcgacggaagcattccttggaagagcagaaatggattcgagcgtatggagagtgagaagctgaaggatgagtcagctgatgcctgcctgacaaacatgaaccagcccaagaagaaagaatcggccatttcaaagctctggaagtcgtcccgcccaaagaacagcgagatatgcaagaaagacgcagttgaaacggtaaatgcaagatcgtcaaacgtgcggctctcagtcgggacctattccactgttgaaagtggcatccaagaaatagggctcagtccaccgtgtgttgagcagtggagctcaccagactcgatgaacgtccaattcaaccggggattcaagggctgtatagagtacccgcggatgtcccagaagcacagcttgaaggcgaagctcatggaggcacggttggagagccataaggtccagctccgccaggtgctcaagcagaagatctagtgcaggccagaaccagaaggcgaaacattgtaaacctagcattcaatccaaggaataatgtaaaggagtacctagatgcttcgtttttcatgttttagagtaacctgtattgcatgtacaacaaggactagaaaaaaaaaggacagggctggtctttgaggtctatctggagcctttttctgcttctgtatctcactttagctttggtgttattgtttgatctgataggctatggtgagatccatcatgatgtataatacagacataaacaagtagcaacgttgagacaaattgcatacctttgtatgcagtttccctatgtttttctgtatc

SEQ ID NO: 101930 - DNA, 672 bp, Zea Mays
tgctctccccgcctccaccacaaaacacgaaatcggcaaatccattccgcccgcctattcatccctcaccaatatccggggcccacatggcagccacccgcaagctccacgcctcgtccgccgccaccagcggcgaccacctccgcttcctccgcccaggggccctcgcccgcctccgcgacgccaggctccgccgtgggagtcgcgccgcccgcctgccccctccctcatcgccggctccggcgccggcgtccccctcatcgcctcctcctgcggctggagacggcgagggcatcgtggccgtgccgtacttcacgcccgcctcgaggctgctcgcgccccggtgcccgcagcggaagaagctcgcggcggccaagtctgtggtgctcttcgctccgccgcctcccagcaccgatctgcccatcgaggcggttattgagttcctcagcgcgcctgacatggtggttgccgcccactagagtgtctcgccgtacttttgtgttagccttgtagatctattcgtcgcttatcttgttagcttagtgccttagggtggtatgaaattttcgtcgtttgtttgtactgatctggatgtgaaaatagagacatatacaaggaagcgcatgcttgatatgtagtaatacagaatactacaaaattgggtaacgaaaa

SEQ ID NO: 101931 - DNA, 104 bp, Zea Mays
ggaatatttgttattatcttattgtgaaccacctttgttgctatgccctgagttatactgatggggatgatctcacacctttttattatgctttgatggtcgtc

SEQ ID NO: 101932 - DNA, 691 bp, Zea Mays
ctcacacatgtgcgcgggcacgggaaaagcacgagtctacttttccctttcgatatgcggccgaggagagcctctctggcgaatggcgagtggcgagcgattcgtctagactctagacaagcccggctgcgcatttcgatgcaaatacgtggaggatggagtaaaatactaagtaagtgagagagaggatagaggaaggagagggtcttttcttttcttgacccaaggtccaaggaggggatcaggggggagtgagcgagggggaggttttgccgccggcaatggagacgaatctccgggctcagagcccgctctgctcccggacccgccccgcactcgccgtgcgcccggacgctgccgccactggcctcacgctgtctgtcataaggcgcagccgatttacgagaggcgggctcgttcgatgcatggtgtcaagttcagattatcataagagtagtccgagaaggacgtcgacttctaagagcaagggtgtcccttccggagggtatgcttcaagacctactgctgaatccagcacgaagaagatagaacagagcagcgacgatgaaggtgattttagcagaaccaatgggtcactctatggtgaggcagcggagcaggcaagtactgcagaagagtcgtctcaggtttactcgacaggagacatttcaagcagcgcagaaaggggcga

SEQ ID NO: 101933 - DNA, 845 bp, Zea Mays
cttagctagcgagtccaatgtttttgtaaaaggagcattcaatggttggagatggaacgctttcactgaaacaatgcataaaagtgaattaagaggggattggtggtgctgcaagctctacattcccaagcaggcatacagattagactttgtattctttaatggtgacactgtctatgaaaacaacaatcacaatgattttttcctggaaatagaaagtggcatagatgaacactcatttgaggatttcttggttgaagaaaaacgaaaggaactcgagaggctagctgcagaagaagctgaaaggaaaatacaagctgaggaggagcggaagcgaggggaagaaagggccgcgatggaggctgacagagcacaggcaagatccgaggttgagatgaagaaagagaaattgcgccagttgttgagttcagccagtagatatgctgataacttatggtacatagaaccgaacacctacagaggaggggacagggttagattgtactatcacagaagctcaagaccactaatgcatgacactgagatttggatgcatggaggttacaacaactggattgatggactctcaatagctgaaagacttgtcaaatctcatgaaaaggaaggtgattggtggtatgcagaagttacattacctgaaagggcattgctgtttgattgggtttttgctgatgggccacctgggaatgcaaggaattatgataacaatggaagacaggatttccatgctatcgttccgaataacatatcggatgatatcttttgggtggaagaagaacataggatctttacaaggcttcaacaagagagaagagaaagggagg

SEQ ID NO: 101934 - DNA, 209 bp, Zea Mays
taatgggatcggaaatggtcggattgtatttaccatccacaatcttgagtttggagcgcatcacattggcaaggcaatggcacattgtgacaaagctacaactgtatccgatacatactcgaaggaagtggccggacatggagctattgcacctcactactataaattccatggaattcgaaatggaattgatcctgatatttgggatc

SEQ ID NO: 101935 - DNA, 718 bp, Zea Mays
ttctcgttccttccatcttcgaaccttgtggtctaacacagcttattgctatgcgctatggatccatcccagttgttcggaaaactggaggcctgtacgacaccgtttttgatgtcgacaatgataaggatcgggctcaagcacaaggtctcgagccaaatggattcagtttcgaaggagctgatagcagtggtgtggattatgctctcgacagagccataaccacattttatgatgcacgcgactggttcaattccctttgcaagagggtaatggagcaagattggtcatggaacagacctgccctagactacatggagttgtaccattctgctcgcaaaagctgatagcttttaccactagggaaatcaggctcgttttgcccaggttagaagcatctcagcctcaggccttgtgcaaattcatttgtgcactgggaagaaaagagtaccgactggccttgagcatgcccgccgtctaaggatgcaacacacaccgtgtatagttagagaatgctactcgtcgtacgtttcatgcatgtgttttgtgtatacacctcatgtagcttgcaaaacaacagtacgacgtatcccggccgtctaccatgcctgagggcgtatataggctataggcttatgcaaagcatgtaccattaattaattattacatagtctttttatgtcaaagtagtggaggcaaccatgatcttccttcaccg

SEQ ID NO: 101936 - DNA, 555 bp, Zea Mays
gtggccttttacataagcaacccccccgacctcttttccctaccctctctttcgttacctacaggctacagctcccgtctctccgccgcttgcttggaaaacgaagaaaccctcctccaccaacccaatccagctacatccgtctgggtgaactccagggccaggagcagttcgccgccttcgttcgcatcacctacgcggttcgatccaactggcaggaaggaacgtgatggccaagacgagctcgttcaagctggagcacccccttggttcgtataatgttccccaatccccctttagttttggtgattctgcagaaaaccgttgatatctgttttttttttgggggggggggggggggtaaccatagtacagatttaagagggtaactttgcggattggtaatactctaaggaactgaacaactatctagttgtagttcaataaatttgtgatcaatcgtgatcggtggagtttccttatgtgatttactttgatttacggccaagttcacctgtcttcaaaaactaacaactgcaggttaaattatacata

SEQ ID NO: 101937 - DNA, 1035 bp, Zea Mays
gtgcgtctcttctatgctcttccatcaatcggcccagtctgggtgaactccagggccaggagcagttcgccgccttcgttcgcatcacctacgcggttcgatccaactggcaggaaggaacgtgatggccaagacgagctcgttcaagctggagcacccccttgagaagaggcagtctgaggctaatcggatcagagagaagtaccctgacagaattccagtgattgttgagaaggctgagaggagtgacattcctgacatcgacaagaaaaagtacctcgtccctgctgatcttacggttggacaattcgtgtatgttgttaggaagagaatcaagctcagtgctgagaaagctatcttcatctttgtgaagaacacccttccaccaacagctgctctgatgtcttcaatctatgaagagaacaaggatgaggatggattcctctacatgacctacagtggtgagaacaccttcgggctcctctagatggctcaccacaatcgggtctgccttgcccttgcttccctactgatgccctgcctcgtgtaaataagacctgccaagcaattgtgtatattctggtttcctcgctcaactgctggaagtctaaaacctaccttatcatggacaccgtttaaattaagtaattgactggacctgaatctggggggtcctatgacctatgtcgtttacggttactggtccttgtaaatgctgtaacgaggtcaattggattcgcagtatgctattgaatccgattgctgttgccgttttattgcttgactggtgcctgcagcctgctgcttggtgtctgctgccgacagcagcagctagtggaacggctcaccgtcaggcacgagggccttatgtcgccggtgccattactgcgtttgggctctgttgctgatggcggcagagtctggatggtgatgggcgtgtcaggatgaatgcatggaatcctggttcttgcgttggcgctatatgggctggtctgttgctgctagtctgctactagcatttagtttcggctgttg

SEQ ID NO: 101938 - DNA, 1084 bp, Zea Mays
atcaatcggcccaggttttcctccgattgccttccgccgatcgagggctttctctgatcgatctggtgcctgttttgtggttttagtctgggtgaactccagggccaggagcagttcgccgccttcgttcgcatcacctacgcggttcgatccaactggcaggaaggaacgtgatggccaagacgagctcgttcaagctggagcacccccttgagaagaggcagtctgaggctaatcggatcagagagaagtaccctgacagaattccagtgattgttgagaaggctgagaggagtgacattcctgacatcgacaagaaaaagtacctcgtccctgctgatcttacggttggacaattcgtgtatgttgttaggaagagaatcaagctcagtgctgagaaagctatcttcatctttgtgaagaacacccttccaccaacagctgctctgatgtcttcaatctatgaagagaacaaggatgaggatggattcctctacatgacctacagtggtgagaacaccttcgggctcctctagatggctcaccacaatcgggtctgccttgcccttgcttccctactgatgccctgcctcgtgtaaataagacctgccaagcaattgtgtatattctggtttcctcgctcaactgctggaagtctaaaacctaccttatcatggacaccgtttaaattaagtaattgactggacctgaatctggggggtcctatgacctatgtcgtttacggttactggtccttgtaaatgctgtaacgaggtcaattggattcgcagtatgctattgaatccgattgctgttgccgttttattgcttgactggtgcctgcagcctgctgcttggtgtctgctgccgacagcagcagctagtggaacggctcaccgtcaggcacgagggccttatgtcgccggtgccattactgcgtttgggctctgttgctgatggcggcagagtctggatggtgatgggcgtgtcaggatgaatgcatggaatcctggttcttgcgttggcgctatatgggctggtctgttgctgctagtctgctactagcatttagtttcggctgttg

SEQ ID NO: 101939 - DNA, 1023 bp, Zea Mays
gagttccccttgcacaaagacatttctatgtcccagctgtgaagttcccagttgctacggccttgttccatcatttccctgcaatacaatttagcttctttattcaggttacataactgaacccttaatctgtgtgatgccttttcttacagagaagaggcagtctgaggctaatcggatcagagagaagtaccctgacagaattccagtgattgttgagaaggctgagaggagtgacattcctgacatcgacaagaaaaagtacctcgtccctgctgatcttacggttggacaattcgtgtatgttgttaggaagagaatcaagctcagtgctgagaaagctatcttcatctttgtgaagaacacccttccaccaacagctgctctgatgtcttcaatctatgaagagaacaaggatgaggatggattcctctacatgacctacagtggtgagaacaccttcgggctcctctagatggctcaccacaatcgggtctgccttgcccttgcttccctactgatgccctgcctcgtgtaaataagacctgccaagcaattgtgtatattctggtttcctcgctcaactgctggaagtctaaaacctaccttatcatggacaccgtttaaattaagtaattgactggacctgaatctggggggtcctatgacctatgtcgtttacggttactggtccttgtaaatgctgtaacgaggtcaattggattcgcagtatgctattgaatccgattgctgttgccgttttattgcttgactggtgcctgcagcctgctgcttggtgtctgctgccgacagcagcagctagtggaacggctcaccgtcaggcacgagggccttatgtcgccggtgccattactgcgtttgggctctgttgctgatggcggcagagtctggatggtgatgggcgtgtcaggatgaatgcatggaatcctggttcttgcgttggcgctatatgggctggtctgttgctgctagtctgctactagcatttagtttcggctgttg

SEQ ID NO: 101940 - DNA, 132 bp, Zea Mays
aattcctctgaccgccgcatgaaacaaaatgatgagtgccatcgcactgtgcgctgttccttccctcaacaactgtgttctagctcgttgagcaacttagcttaatcagtctcttattggtgtgttcttcaa

SEQ ID NO: 101941 - DNA, 2076 bp, Zea Mays
gaactgcacaatgattctacagccgcgagcggccgatccggtcgctgtcggtgatgacgtgtgcgcgggttatctccctcagcgacgtgcagccgctgagcgccatggtgagctccagctcgtccctcagcatctgcagcaccttccgcacgccggcctcgccgtccaccgccagcgagaacagcacgggccggccgatctgcagcacgcaccaagcaacagcgtcaggtgccgggctcgaacgaaatagcagcgtttttagcaggcagtgggcgcgtcgtcgtcgtcgtccttacgaacactcctgaagctcccaacgccagggccttgaagacgtccgtgccacggcggacgccgccgtcgaggaacaccggtagccggcctttcgcttccctgacgacctgaattcacgtcgcactttatagtgaaaacctcagcagacaggaacatggaaagccaggaagcacaagcaagcttttcgcctttacccccctgaagactctgaagctctgaatcacagaaggatttggtcggcgtacctcttccaggcagctgatagtcgcaggaacataatctagctggcgcgcgccgtggttggacacgatgatcccagcagcgccatattcgatcgcaagcctagctgcatcgggtgtatgtttcgcgtgaaatgttacagccataacaaaagctgacgcgaaactgaaggttgcgcctcaaagtctgaaaccgagcacttactgtcttctgcagtcacgatccctttgactaggatcggcaacgagattagctgttatctgcaactaggaaggtattcgcaagaagaagaagaaaaataatgaagctaggaaggaagggtgtacgaataataccttccaggaaagggtgcggtcaacttgaccagcaacgtaggaagcaaggccggaatcatttgtctgatacgtcaagagatgtttggtaagaaaatctgaagaaataggtgcatctttatagcaagctcagcttccagataaccttgtccatcgtgccaagatccagcgcttggaagtttttcaacaccagatgtggaggtaaggcgaacctgcatggtttcagagtacatatgcagtgtgtataggactccttatagtgaaaaaaaaatgaaacgttcgtccgtgcagcactctgggttcagttcttagattagcacctgttcttaatgtcagcttccctgcggccaagtattggagtgtctaccgtgagtgcaatggccttgaagccagccatctcagcccttttcacgagttgccgtacgatattcctgtccttgtagacctgatggagatgacgatacacggtataaggtcagagtgtgatgaacagaagataagcaacgtttcttgtgagttcatgaaggaagataataatgcatacatagagctggaagaaacgtatgcccggcccaactgagttgacctcttcaacgctggaagtagaccatgaggacaatgtctggaaaaaccataagatcagcacaatggattagtgtttgggtcatgacttgaggtaccacaggcagtgtgatctttcaaaccattattgttcctgcggaagctgcagctcttgccgtggcaagctctcctgcattccagataaatttctccatgagaacttctctttggaaaatgagtagaaaactctgatgactgaacattcgtccgaaccatcaggatgagccattttctgcatggctgaaggagcgatcatgataggcatggaaatgctgaagcccagaatgtttgtggccatgtcgatacgggagacgtcgatcagtacccgtggcctaaacctgtaatcatttccacaaggaagcacaaaatgtggttttcagatatctagcaaaggaggcaaagagggattgctacacttcgtgtgccccggttatcacatgcaacgtctcctctaattttctcaaacatgagtcgtcgatgtcagtgtttgtgttgtggatggattaattctagcttactcttgtcacacatggagatatggatatggggatggttatagagttattaatgagcaaaaggtcttggagat

SEQ ID NO: 101942 - DNA, 1846 bp, Zea Mays
atgtgggcgcaactggccgtcgcgctgttcgtggcgttagccgtggctcccccggcccgtggctccgacgtgccttcgttcccgctgtcgcaggcgcagtccccatccaactcctcgtccccgtccaacgccgcctcgcggccgtgccacctggacctctcggccgagctcttcggtggggtagccgcggcgtgcggcgccggcggggggccgggctcgctggaccgcggccgctgctgcccggtcctggcggcctggctcttcgcggcgcacgcgcgcaccgcgctgtccgtgcccccggcgcctccgccctcggcgctagtgggggacgagggaatggggcccgacggcgacgacgacgggcccatggtgccgtacgacaaccagaggtgtgtcgacacgctgggcgcagcgctggagcggcgcggggtggcgctgccccggcccaacgcgacgtgcgacacggtgctctgcttctgcggcatccggctccaccagatcggctcgctccgctgccccgccgcgttcgccgtcaaaactggcgccgcggccaggaacgccacgcccaccgccgcggtgaaggccctggagaagagctgccgcaacgcctcctacgccggctgctcgcgatgcgtgcagtccctgcaaaaggtaaacctttcttgctagctttctctcctaatgccattgcttttgctcatcttttccgttcttgtctcttttggcttgatctcgcattccctatataactaatgtttgaaatgttacaccacgcatatcttgccttcttggattccaaaccactgatcgatttctacccctgcttatatatagacgaaaaccttcaacaattttgtcagttatacgtaccactcctgcagagcaatagtgcggcgcttcaagcgacgccttcactccttctttgcttgtttttttatctagcaaaaggtggccatttcgatggtatcccctttcccacaaagggtttccactgcgctttctaaccgcatcattgtttcaactttcgaactgatctgcttgttcttgagcttaccatcaccactaatcatttcctacttgattgcctttctctctgaaagcaaccatgggaaagggcaatcccgccaggtaaccaccggataggaccattccttgaaagcttgaacacgcatttgtggggacaaacctccttctttcgagcaagggcaaaggcggggtattcgccttcgtattcgccttcggcattgccccccgcctttggctccgggaagctgatcatggagggctccctgggcttcttcgaaaaaagagaagctgacagtgtccagatgcagaacgtgctgtccatcaggaatcctaaacctcctgatagagaagcctgcagcagcgtcagtcccggtgctgcgacagctacttgtggctcaaggagaagacgatctttttaaagattttcatgttctttagcttttatcctctactaggtaaatacccaggagaacaagtacttggcattaacctgagggtttatcttgtcaagctgcaaaacgatctcacccaagaacttgtacccagaaccatctttcgcgtggaagttcacaggtcgaaagcagggtgagacagcagcttctgaacatttgcaacatttccaggaatctctgaagtagcttgaagagcaaacaacttgcttacaacctatcagagtaaaacaaagaaacaacagaaatccaagagggcatcatcacgaacttggcctggattttgggataatgctgctaatgcagcaaactgctctgtcatgttagtcgcagacttgtactcatgcagtgcaagctcaacgaaatctggc

SEQ ID NO: 101943 - DNA, 247 bp, Zea Mays
tggggcatgctatgtcaacaatgcatcagtggccttgtcagttttattttgaccccctcaaggccttgcaaccatttcccaagccacagtatccaagagatggcagtgtcactcacagaagcagctgttcttagtatgtgatttaggaattcaatgaattatatctatgtatggttacacaagtcctatgctgacaatctgtaacatgtgtatgcttgtatttgaacctgaaacctgtgtaggctgg

SEQ ID NO: 101944 - DNA, 267 bp, Zea Mays
atgccagacgcagcgctcgtattctacggcttcccgagccgccatgccaacgccatgtccccgcctcgccgtcctctccgcctcgccatccagccgcgcagtcgcgtatcatcaggaagtattaacttgaatggtaaactcattgtcgaagttagaagacttggtggtgagactgtcatgtctaacatatttcacttagttgaagaagcccagacaagggtggtccctgttcaacgattggcggacaaggcgaatatttttgagtga

SEQ ID NO: 101945 - DNA, 815 bp, Zea Mays
acatcgccccgaccaaagcttccccagacggcaggagacagcagcaggccggacgccggactcctcctccctcccccgtacgcatccactgagatccttcctgtgcgaaggaaatctccagttcttcggccccggccaggttttcaagtgttgcttgccccgccggagttttcctctaacccgcaagtccaattggctaagaagttgatgggatcggggggacactggaaggctgtgtgagatcgcgaaggggaccgtgaattccttgcagggctgcggcgattcggctgcgctgctgtatgaactgtttcgtgaacctgggactcaactcgaactcgaaccactacgtcgcctgcctcctcatcttcctgctgcatttctccccccagttgttaaatccatccaattctaattcaaatagtaattgtgaaggagttcaacagagctgcacagatggcgaacaacagtaagtcctgctgcttctccgggagctctttgagttttgagcttacagttggcagatcggttcttccaatttaaaagatatatcttataatcgatgtgaattattaaagctactcaggtgaggaagaatcgattggcatactttattaggttgttgattaggtattcgtttggtggatctgacgcagcttccgtggcaaatttgaaattttccaacttaactttttgatagtggtttcgaatttttttcgttcgataaccaaaaaaatcggaggttcttatggttgttgggaggcacgcatgggcccgatggatggaagggccatggaccatgaagtcccatattcatt

SEQ ID NO: 101946 - DNA, 2411 bp, Zea Mays
acatcgccccgaccaaagcttccccagacggcaggagacagcagcaggccggacgccggactcctcctccctcccccgtacgcatccactgagatccttcctgtgcgaaggaaatctccagttcttcggccccggccaggttttcaagtgttgcttgccccgccggagttttcctctaacccgcaagtccaattggctaagaagttgatgggatcggggggacactggaaggctgtgtgagatcgcgaaggggaccgtgaattccttgcagggctgcggcgattcggctgcgctgctgtatgaactgtttcgtgaacctgggactcaactcgaactcgaaccactacgtcgcctgcctcctcatcttcctgctgcatttctccccccagttgttaaatccatccaattctaattcaaatagtaattgtgaaggagttcaacagagctgcacagatggcgaacaacagctcatatggtgaaaatgctaggagaaagccacacacaccatctgctattgttattggtggtgggtttgctggtcttgctgctgctgatgctctcagaaatgcatccttccaggttattctactggaatcccgtgataggattggtggcagagttcacactgactactcttttgggtttccggtcgatttgggagcatcttggcttcatggggtctgtgaagaaaatcccttggcaccaataattggaaggcttggacttccactgtaccgcacaagtggtgatgattctgtgctgtttgatcatgatctagagagttatgcactctatgacactaacggacgccaagtaccacaagagttggtagaaaagcttgggaaggtgtttgagaagatactggaagagactggcaaattgagggaagaaatcaatgaagatatgtctatcgcaaaagccatcgcaattgttatggctagaaatccgcacttgaggcaagaagggattgctcatgaggttcttcagtggtatttgtgccgtatggagggttggtttgccaccgacgctgattcaatttcactacagggttgggatcaggaggtgctgcttccaggtggccatggcctcatggttcgtgggtatcgtccggttataaatactctcgcaaaaggcttagatatacgcctcaaccataaggttgtggaaattgttcgccataggaacagggtagaggttaccgtaagcagcggccaaacgtttgttgcggatgctgctgtggtcactgttccgttgggtgtcctgaaagcgaaaaccattaaattcgagccgaggctgccagagtggaaagaggaagcgatcagagaacttacggttggagttgagaacaagatcgttcttcacttcgggcaggttttctggcctaacgtggagttcctcggcgtcgtttcctctagcacctacggttgcagctatttcctcaaccttcacaaggcaacaggccacccagtccttgtctacatgcccgccggccgccttgctcgtgacatcgagaagacgtcggacgaggctgctgcccagttcgccttttctcagctgaagaagatccttcccaatgcagctgagccgataaactacctggtgtcgcgctggggctcggacgagaacacgcttggttcgtacacgttcgatggggtgaacaaaccccgtgacctgtacgagaagctgcgcatccccgtggacaacctgttcttcgcgggagaggccacgagcgtcaagtacacgggcacggtgcacggcgccttctccacgggtgtcatggcggccgaggagtgcaagatgcgggttctggagcggttcagggagctcgacatgctggagatgtgccaccctgccatgggcgaggacagccctgtgtctgtcccgctgctcatctctcggctctaaaagcagacgagtagtagttgtgtatgggatggatcggcacctgagagtaggctgggacatcccactgattgccggagggaagcagggaggaagaagctcccctcgcttcgcttctcctcggcatgaggcatgtgcctggcgttacttgtggcgtgccaagtgccatatttccctaaacttattctgcgtgggaaccctctattatgtatgtatactgtgaatttgtgactgttcaggtaacacgagttatcgtgacatcttcgtagagaaagataccgtatgtatgatgtatgtatgatatacatatgatattatgatcaacaattgtagtagtagtaataataaataatacatatatgtgacttaactgtttggagtattgagtgattgtgacatgtaacacccttacatctaagcaagtataaagcaagtagtataagagcatctccaataaattagttaaatggctcgccgagccaaatttttgctactcaacaaaaaaataa

SEQ ID NO: 101947 - DNA, 2037 bp, Zea Mays
gtcaaaccgaagcgtactgggccacgcaaacgcaacgacgctcgcagtcgcagaagaaactgtccagccatcccatccgttccacccaagcacaccaacggtgctgatcccgtcctctctcggcgccgaccagactcgcccgctactcttccgaaaaaaatatcccaaatagttactccactcccctcacccctcccgactcccgtgctctctctctctctctctctcggatccgaattgccagcgcaccagtcgagctcgcgggaactcgccggcaccggcgatggcctccgccctactggccggacagggcggggcgcgccaccacggctggggggagacgcgcgccccactcgcgcccatacctcccaaccctaaccccagccagccccacccgcgcgccgacgggtccaagtccaagccgcgggcggcagcctcctcgccggcggccggatacgtgacgttccgcccggcgtccctgggcccgcgcgaggcccgcgcgctccgggaccgcctcgcgggggagctcacccaggtgcgcgccctcctctcccgcatcgacacctggcagcagcagggcccgccgcccgcggggctccgcggcgaggtgcggaagcggtgcgggcagatcctcaccaggctgcgcaaggacaagcggagcgtgtggttcaacgcgcccgtcgaggtggagcgcctcggcctccacgactaccacgccgtcatcaagcgccccatggacctcggcaccgtcaaggagggcctcgccgccgggaggtacgcctcgcacgacgacttcgcggccgacgtccgcctcaccttcaccaacgcgctgcggtacaacccggtcggccacgaggtccacaccttcgctggcgccctcctcgcctacttcgagaggatgtacaaggaggcgctcgcctgcttcgaggaagactgcaaacgccctgagccgccaaggccagtgccgcctgaattgacacctccacccgcagctgagcctgttgaggccaaggttaagccgagggcagggaatgtgaggatgcggaagcccaaggccagggagcctaacaagagggagatgagcctggaggagaagaacatgctcagggtggggctggagagtttgcccgaagagaagatgcataatgtgctacagattgtgcgcaagaggaacaacaatccggagatgctgggggatgagatcgagcttgatattgatgagatggatgttgagacacagtgggagcttgatcgtttcgtagctaacttcaacaaagcgctcaagaaatctcagcgtgctgtggtgatgaatggtggcgccgctgatgtaaccagtgctgctgtggctgagaatgacactgcacctgtcagcaatgtgcttacgttggttgacaatgatgatgtggagagagagaaacctgtgaggagcgctacaatggctgagcaggtggatgagtatgttgatattggggatgagatgccaacagccacttaccaatccatggaaatcgagaaggacgctgaaggtgcgactggctctcgtggttctggcagtggctcttcgtcgtccagtggttctgagtcgaggagctcaggggacagtgcctcaggagctggcaatgctcattctttggcttaacactaggatttgaaaatttggatgatctgagttctgttgttgggtgatttacgtagagctagtggtaattgtaagtatgtagctgtttctgagacgtgggtgtgcgtaggcttcgattacacagttagtagtagataacaaactggctttgtgggtgtctgttagcaccatgtgtatgtaagctggtggtggaaggtattggggtgttaaaagtagttgatcgaccttctggtatggagggggccagggctagtgtttgtgttctttgtagtacaattgttctggtgcagacctcttatgtaattaatgatttgtgcatgacattaaagtatggttgtataagtaacaatgcagtatcttttgttcggtgatggtttttgacctttttcggataggcc

SEQ ID NO: 101948 - DNA, 1696 bp, Zea Mays
gccgccacgcaacagacactccgctccgcgttgtgatgggatgaggattcctctcatcggacaaggattcccctcccccgtaccacccaccttcctcccgatctcctcgcagagttcaccgctactcgcgccctctcctaggctcctagctcccttctgaggtagaccgcgcacgggaatggaaaggcatcagcgaaggagcgatggctgcgcccacggaggaggagaggaggaggtccaggactccaggtacgcgtattccgccgacgagcagtcaaagccgccagagccgcttgccgtcgcctccgtgtggtcgccgccgcagacgcacgccgaggccaagggactgcgcagcctgcgaccaggcgtatgcggcgggggaggccgcgcggaagaagcgcagcggctccagcccagtggcggccacggcgagcgcgagcgtcgcgaagtagatggcgaggtagacctgcgccagcagcagcgcgcggtggaggagcagcaggtactggcccatgcgccgcaccagcgctgtgagcacgaagagtggcaccgccaccgccgcccaccggccgccgaggaccgagcgcacgccgtcggcgatccaagcgttcgccgccgacagatacgccttcgaagctctccaagacgaggatactgctgaacttacgaattaccagcacaagaatgaggtgatcaattcatctgagagattaacatatggtggacacgaagattgtaatgcatactgtttgtatgcaacaaaaaaatataaaaaaggggagcaggtccttgcttatggaacatacacaaacatgaaactccttgaacgctatagcatcatatgtgtttggattgttttgatttagttgtttgattgcttctgtgtttgccgctcccaagttttatgctggttaataaaactttgtaattctttaggtctagcccctcttgctgtttttggatatgttatggccacacacctccctctttatcctgcaattcacatcctacccgataagtaccacaacttatgtttgtgttttctatttcaatttaaatgttcaatcacattgctactaacctgcatagttgtctagtaaagatacaactctgtttcaggtcattctgttgctgggttatggtccagattctcctccaccaaaattatttcttataaaatggtcaagcgccagtgaaagttatgtgtcagacaatgataaaacaatacagttattcagcagttttcgcggaaaccagtatttcactgtatatttttgttgttcatctagtggtgccatttgttggtattgagcagcatgattttgaagaaagttggtggccttgagatgtttgaaaagtaagatgttataggctccttatccagccttcagtgggatgtgtttcgacatatattcaaagtgtggtcactgatgagccatgatgatgagatgaaatctgccctgtttcttcaaatgagcatgattaaccatgcagtccatgctatcggactttttgcacgatcatttgatggctacttaatagatcgtcttagatctcttggaacgacttcttttgttatatctcaatcggcctgtttctgctgctccgttatatgcatagtttccttctgcatcttttcattatataaatagcggtttagatatttcttgctgattatcaatctcaagtaggcttg

SEQ ID NO: 101949 - DNA, 847 bp, Zea Mays
ctccgctccgcgttgtgatgggatgaggattcctctcatcggacaaggattcccctcccccgtaccacccaccttcctcccgatctcctcgcagagttcaccgctactcgcgccctctcctaggctcctagctcccttctgaggtagaccgcgcacgggaatggaaaggcatcagcgaaggagcgatggctgcgcccacggaggaggagaggaggaggtccaggactccaggtacgcgtattccgccgacgagcagtcaaagccgccagagccgcttgccgtcgcctccgtgtggtcgccgccgcagacgcacgccgaggccaagggactgcgcagcctgcgaccaggcgtatgcggcgggggaggccgcgcggaagaagcgcagcggctccagcccagtggcggccacggcgagcgcgagcgtcgcgaagtagatggcgaggtagacctgcgccagcagcagcgcgcggtggaggagcagcaggtactggcccatgcgccgcaccagcgctgtgagcacgaagagtggcaccgccaccgccgcccaccggccgccgaggaccgagcgcacgccgtcggcgatccaagcgttcgccgccgacagatacgccttcgaagctctccaagacgaggatactgctgaacttacgaattaccagcacaagaatgaggtgatcaattcatctgagagattaacatatggtggacacgaagattgtaatgcatactgtttgtatgcaacaaaaaaatataaaaaaggggagcaggtttgttcttagtttcacaaatataacattattttgtctttattttgtcatctctgttttttatacactcatgtcatttc

SEQ ID NO: 101950 - DNA, 690 bp, Zea Mays
aggatttgggctggtgaccttgtaggtagatgatgattttattcagatgagtgcaatttagcaaatggtatacaattgtttttttaatgttttcccaggcacatcaattgtgatgttgtttgaaagggccaaattatcaaagtcaccaaatagtttgaaaacaaagaggattatagcaattagtgctgcttctgagagttatatggccctgagcacaattgtttttttttataatctcaactaggacctacctcatacctgtcagtacttgttacctagatcttttacttatgatcttctagcaccgaatctaattcgaagtatttgacagcatatattcaaagtgtggtcactgatgagccatgatgatgagatgaaatctgccctgtttcttcaaatgagcatgattaaccatgcagtccatgctatcggactttttgcacgatcatttgatggctacttaatagatcgtcttagatctcttggaacgacttcttttgttatatctcaatcggcctgtttctgctgctccgttatatgcatagtttccttctgcatcttttcattatataaatagcggtttagatatttcttgctgattatcaatctcaagtaggcttgtaatacttttgtttgttatgcccgcagccacatatcatgatgtcaaattaaaagatgtgttctgctaaa

SEQ ID NO: 101951 - DNA, 1033 bp, Zea Mays
tttttcttaggaaaacgaaaaatccttgagaaaatggatttctcaaactagcccttaatctatgaaagaaaacgtcaaggtgcgatgcgtaattacaccctaccgagacacgcggaagctagaaacgaacgagcacgaaagcgtcctctgaacctcaaatcgtcctgtgtggtcacgctattcgtgcctacctcttctctctctcggagcaaaaccggcacctcccttgtgtataaataggggcgtccccactccaggccaccccctcccgtctaattttatcaacgcttctcctgctggttactccgcgcgccttctctttctctcccggacgtcgatcgtgttcttcagcacgggctagctagctccctccctcccagccatggcgacgccggacaacaaggggcacgggcatccgctgcccaagtttggggagtgggacgtgaagaatccggccacgtccgagggcttcaccgtcatattccagaaggcccgcgacgacaagaagaccaccaccggccctggggctgggaacgcgcgcgcaggcattccgccggccttcaggaacggcggcggcgacggcgggtacaggcccgacttcggcgacggcaaccagtacacgccgcccaaacggaagaagtgggccttctgtggctgctgaatcgaagctcgctgtgctgctgtgctgactcgaaaggagaacggatcgtgcagcagctcaagtgatccaggatgatgggagcgccgagacacgatggaaggcattaattatttcagccatggtgtttcgccttgctttaaccttttgctcatctctaccgaggaacactagttccatcgggtaactgaacctgcaaatcttcatgatgaaactgtcgcatcatttgtttcatgtctcgttatggcccgtatttctacaaaactcgacgatcaccctgccggcggcggcggcgagcaacattgcaaaccgtcgcatctaatcattcgccaatcacaaagttttaactcattttaggacagtgatcacacctag

SEQ ID NO: 101952 - DNA, 1102 bp, Zea Mays
tttttcttaggaaaacgaaaaatccttgagaaaatggatttctcaaactagcccttaatctatgaaagaaaacgtcaaggtgcgatgcgtaattacaccctaccgagacacgcggaagctagaaacgaacgagcacgaaagcgtcctctgaacctcaaatcgtcctgtgtggtcacgctattcgtgcctacctcttctctctctcggagcaaaaccggcacctcccttgtgtataaataggggcgtccccactccaggccaccccctcccgtctaattttatcaacgcttctcctgctggttactccgcgcgccttctctttctctcccggacgtcgatcgtgttcttcagcacgggctagctagctccctccctcccagccatggcgacgccgttgcatctccatttcgttctggaattggggcgttgcacacccatgccgtcgcgttgccttgggttgtaggacaacaaggggcacgggcatccgctgcccaagtttggggagtgggacgtgaagaatccggccacgtccgagggcttcaccgtcatattccagaaggcccgcgacgacaagaagaccaccaccggccctggggctgggaacgcgcgcgcaggcattccgccggccttcaggaacggcggcggcgacggcgggtacaggcccgacttcggcgacggcaaccagtacacgccgcccaaacggaagaagtgggccttctgtggctgctgaatcgaagctcgctgtgctgctgtgctgactcgaaaggagaacggatcgtgcagcagctcaagtgatccaggatgatgggagcgccgagacacgatggaaggcattaattatttcagccatggtgtttcgccttgctttaaccttttgctcatctctaccgaggaacactagttccatcgggtaactgaacctgcaaatcttcatgatgaaactgtcgcatcatttgtttcatgtctcgttatggcccgtatttctacaaaactcgacgatcaccctgccggcggcggcggcgagcaacattgcaaaccgtcgcatctaatcattcgccaatcacaaagttttaactcattttaggacagtgatcacacctag

SEQ ID NO: 101953 - DNA, 1389 bp, Zea Mays
atattataacaaatgaattatgcattaagtacctggaaaaaaatagaaactatattctttagtttacacaaatttgaaacaagttctaaatatgccaacaatcgactgcatttgagccaaaattttcgtacaaatagcatcacctattcacctatcagttatttacctgggtcacaactagaaccccgaaaggacaaggaagactactttcagaattttgcgtctcgatgtagcccagactataggcacataacaataaccaccaccaaatcatgttacacatctatccatcagacaagttgaatctttgaggctccatcagatgcacggtccgggaccaccttcaagtgtacaacagagaactcacatatgatcctcagactgcttgtgcaataatggtctgaccagttccaagtgcttcctctgaaattctgctcctctgaaattcacttcatatgccaagctcatcactcttcttttcctctcctaactttgcatcgcaaagcataacatcatccatggaatccagctgcttctcattttcaacctcaatatcaggaactgcggtatccttctcggcaatatcaccaggttcagcttcttcctccttccattcaacaaactcaggttgactctcttttacatccggagttggtggtctgatatcatcttcgaatttgtcaacggtaccatttgccaagccggtggaaccagattctttgtttgcatctttgttgaagactggtagagttggttcagaaccttttatttcatctataatttcgccaagaatgacttcatcatgttcatcatcctcttttagtgcggatatttccgaatttggagatggggatgcttctgagctaaccaaaccatcattcagtgccttgtcctcgtcaaatgcaaaccaattggaatttgtaaagagcgaaccactgcaaacggcatcttcattagtccattcttattgcaaacatcaaatgtgcttacaaaaggaagaacagtaatcatattaaatagtaaagaataaacctttcttggtcgtctccaaggcgaagggaggagattacaacctctgcagattcatcatcaaaatatacatcctgtggcagatataataaccagaaaaaaacatcaaacatcaggagatacaatctgttcagttcaatgcaagatgatacaatgaatctaaacagtacttctgaatatacctcatcatcccgctcaagtgatgcttgagcctgcatgtataaacaaaagttactaaataaattttaaaaactgttaatgtgttggcatgttgcaactacagaacttggctgtttaggtccatcaaaattaaggatatcttttaatgtaattcggcattttggatctcagaaaaaaaat

SEQ ID NO: 101954 - DNA, 1384 bp, Zea Mays
tttcttttataagggggttccccatttctattactttcataatagaaatacagcagaggttaaagtagcatagcaggattacaaatcagacttaaacgagacatgcagttgaacatgttgcgcaacctactggactaacaaacagtgtttccagccaggcacgcaggcctgattcagaaggcctggactaacaaacagaaatgatcaaatatttcggagaataataataccttgctgtatgtttagtattttctgcctcctcatacgatgcagcacgagcagcatattccttcctgatgcgctccaaatcagcgatgctcggtgccgcagagactagctctagctcctctttgctggcccacgtagcaatgttcatctttcctagctgtatgccaagcgcagcgatttcttgccttgttttaagcctcgtctcagtatctgacaattcatttgcatgtacgccgcatttcctgtggaaaaatgggccatcgtctgtgcagtcttctccaggaggagatgctattgacctcccccctacaggtgttgacggtactgaacagttagggcttcgagttggtgtccttgaccctagtggagttccagttcttgaaggttcctggctaggtattggagtcatctctgtgcccacatctctcacggacaccgacgactggactgttggaatatctgcacacgttcaaaccagtgtcagttccaagacagggcttcacttcaatcgatgaaccagtatcagttgccttgtgatgctctgagttagcaccagcgttactaactggacagacatctgcatgcctaaccaacttaggctgatacgaagcgaaggacaacctctccagtatgctgcgcggagcagacaaagctggattcactctcttcattttctgcacgggacgagcagagattttgggcacaacggcgcccctggctgcggcggagctcatctggtttactgtctggttctgcaacgcgcccttggcgacgttgttcttctgactgacattctggcggctcacgatccatttctctgcgtcattccacttggaggaaatggaagtctgcctggacaagtacccggctgctggattctgcgtcgccgccgccttctccactccgtggaactcgaagctgctagtgctggcgttgtcgagaccactgtcgcattcggtagtgctgtcttcttccgcgggtctcagtgggtgtatctgtatcatactcgagctgcctgtcgctggcttagcagccgaactggtggaagcgttctgcacttgactgatgtccactgctggatccttttgaaccttttctacggcttcggttttgttagttgccgacgggtgttttgtgctatctgcgctgtctgaaa

SEQ ID NO: 101955 - DNA, 5156 bp, Zea Mays
atggggttcgacccactggagtggtactgccagccggtcaaggatggtgtgtggtcgcatgtggttgagaatgcgttcggcgcctacactccatgtggcactgacacccttgtagtctgcatctcatacctcgcactctttggagtttgcttctatcgtatatggaggacgacgagggactacacagtgcagcggtacaagttacgttcaccatactacaactacctgcttggactgctcgtggtgtactgcatagcagagccgctttatcggatcatcactggtacctccatcatgaacttggatgggcagcctggccttgctccatttgagattgtctcattgatcattgagtctgttgcttggtgctgtatgcttgtaatgattctgcttgaaacaagaatttacatcaatgagttcagatggtacatccgatttgtggttatttacatgatggttggcgaagctgctatgttcaatcttgtgctctctgtgaggcagtactacagttcaagttcaatcttttacctatactgcagtgagattgtatgccagttcttgtttggaattctcatggtggtttatctgcctagcttggatccatatccgggttataccccgatcaggaatgaagtgttggttgataatactgattatgaacctcttcccggcggtgagcagatttgccctgagagacatgccaacatatttgccagaatattcttttcatggatgactcctttaatgcaacaaggatttagaaggcccattacagataaggatatctggaaattggatagctgggatgagactgaaactttgtatagccagttccagaaacgctggaatgatgagcttcaaaaaccaaacccttggctgttacgagctcttcatagtagtctttggggaaggttctggctgggtggatttttcaagattggcaatgatgcttctcaatttgttggtccacttgtattgaacctgttgttagagtctatgcaaaaaggtgatccatcttggagcgggtacatctatgctttctcaatctttgcaggagtgtcacttggggttcttgctgaggcacagtactttcagaacgtcatgcgtgtgggtttcaggttgaggtccacattgattgcagctgttttccgcaaatctttgcgactaactaatgatagtcgtagaaagtttgcttctgggaggattaccaatttgatttcaactgatgcggagtcccttcagcaagtgtgccagcagcttcacagcctatggtctgctcctttccgcattgttatttccatggtccttctatatgcacagcttggtcctgcagcattagtcggtgcactcatgctggttcttttgtttccaattcagactgtaatcatcagcaaaatgcaaaaacttactaaagaggggttgcaaaggaccgacaagcgaatcagtctcatgaatgaagtattagctgctatggatacagtcaagtgctatgcttgggagcaaagtttccagtcaaaagtgcaggacatccgtgatgatgaactttcttggttccgcagggctcagttgcttgctgcgctgaatagctttatcctgaacagtataccggtcgttgtcactgttgtttcatttggtgtatattctctactgggaggtgatttgacaccagcaaaggcgtttacttctctttcattatttgcagtcttaaggtttccacttttcatgctcccgaatctgataactcaggtggttaattgtaaggtgtcattgaagcgtctggaagatctcctgttggctgaagagagattacttctgccaaatccacctattgatcctgatcttccagccatttctatcaagaatgggtatttttcatgggaatcagaggctcagagaccaactttatcaaatgtcaatctggatgtacctgttggaagtttagttgcaatagtaggaagcactggtgagggtaaaacttctctcatatctgcaatgcttggagaaataccaccagtatctggatcaggtacctcagtggtcattcgtggatcggtggcttacgttcctcaagtttcctggatcttcaatgctactgtacgtgacaatattttgtttgggtctccctttcaacccccacgatacgagaaagcaattgatgccacttcattgcggcatgaccttgacctactcccaggaggcgatctgacagagattggtgaaagaggagttaatattagtggagggcagaagcaaagagtttcaatggcaagagctgtgtattctgattcagatgtgtacatatttgatgatccactcagtgcattagatgcccatgttggccggcaggtatttgataaatgtatcaaaggcgaactgcagcataaaacccgggttcttgttaccaatcagctgcattttctgccatatgtcgataaaatactgctaattcatgatggtgtaattaaagaggagggtacttttgatgaacttagcaacagtggggagctcttcaagaagctcatggaaaatgctggaaaaatggaggaacaggtggaagaggatgaaagtaaaccaaaggatgttgcaaaacaaactgtgaacggtgatgttacaatagctgatgaaggttcacagaagagccaggatagttctagtaaaacaaaaccaggaaaatctgtccttattaagcaagaggaaagggaaactggggttgtcagtgcgagggtcctttcacgttacaaaaatgcactgggagggatatgggtggtgtccatactcttcttttgctatgcactgactgaagttcttcgcatttcaagtagcacatggttgagcatttggactgatgagggttctctgaaaattcatggctctggttattataatttgatctatggaattctttcctttgggcaggttctagtcacactctcaaattcatactggttgattatatcaagtcttcgggcagccaaaaggcttcatgatgccatgctccgatcaatattgagagctcccatggtattttttcatacaaacccacttggacggatcatcaacagattttcgaaggatatgggtgacattgaccgaaatgtcgctgtatttgtcaatatgtttatggcacaaatatctcagttgctctcaactttcgttctcatcggctttgtcagcaccatgtctctttgggctatcatgccactcctgattttgttttatgcagcttacctctattaccaggcaacatctcgcgaggtgaagcgtctggattccattaccaggtctcctgtgtatgctcagttttcagaggctttgaatggtctgtccacaatccgtgcctataaagcctatgatagaatggcaaatatcaatgggagatcaatggacaacaacattaggttcacacttgtgaacatgggtgcaaataggtggctagctattcgtctggagacattgggtggcatcatgatatggtttacagcaacatttgctgttatgcaaaatcaacgagcagagaatcagaaggcctttgcttctacaatgggtcttcttcttacttacactctcaatattaccaatttactcacagctgttcttcgtcttgctagtcttgctgaaaatagtttaaatgctgttgaacgggtcggaacatacattgagttaccttcggaagctcctcctgtcattgaggatcataggccaccccctggttggccatcatcaggtgtcatcaagtttgaagacgttgtgcttcgatatcgaccagaacttcctcctgttcttcatggcatatcttttgttattaatggaagtgagaaggtaggaatagttggcagaacaggtgctggcaaatctagcatgcttaatgctttgttccgtatcgtggagcttgaacgagggagaatattaattgatgattgtgacacttctaagtttggaatttgggacttgcgcaaagttctaggaataataccacaggcaccagttctattctcaggttctgttcggtttaatctggatccctttaatgagcacaatgatgcggacctctgggaggctctggaaagggctcatctaaaagatgttataaggaggaattctttaggattggatgctgaggtttctgaagctggtgaaaatttcagtgttggacaacgacagctgttgagcttagctcgtgcgctgctgagaagagcaaagatacttgtccttgatgaggcaacagcagcagttgacgtgcggactgatgctcttattcagaaaacaatccgagaagaattcaagagttgcacaatgctcataattgcccaccgtttgaacacggtcattgactgtgacaggttgcttattctaagttctgggcaggttctggaattcgactctcctgagaatcttctaagcaacgaggggagtgctttctccaagatggtgcaaagtacaggacctagcaacgcagaatacctcaagagtcttgtatttgcaagtggagaagagaggtcccggagggaagaaatcaagctgcaagatatccaaaggagatgggttgcatctaaccgatgggctgaagctgcccagtttgcgcttgctagaagcctcacatcatcacatagtgacctccttgcattagaagctgccgagggaaataatattctgaggagaacaaaggatgctgtaatcactctgcaaagcgtactggaagggaagcacaatactgaaatcgatgaatctctaactcagtatcaggtcccagctgatcgatggtggtcttcactttacaaagtgatcgaaggcctcgccacaatgagcagattgggccgcaaccgtctgcagcaaccttcttataattttgagaacaacaattctattgactgggaccaaatgtagatgtagaattctggatcacaacagcattgtggagtaggctggaggtgtagttatttctggcggatttgattcctgcggtgtgtaaacgctgcagcaacacgtaacttgcgaataaggaacgagttttgccacagcaggacgatccttgtaccgtcgtccgcaagggttgtaatttctcagggaccgttacgacacgattgtatgtcaggttttgacagtttgagccaatgcaattcttctaatgaaaaagacaagtgcatgtgaatggttag

SEQ ID NO: 101956 - DNA, 943 bp, Zea Mays
agaagccatactaacatcaacatcgtattggcacaagatgactacaaaagcaatcattcagcttctgttctttgctttggtttttgccacatttacggcgcatggggcttggggagagaagggttgctacgatgaaaaagaaaggttcaagcgtgaatgcagcacaagctatgagcgtccaagtaagtcttgttgcgacactgtgcggtcggtcgacatggcctgtgttcgccgtaccatgacctccgaggaggagacgggattaagtgttcaaaagatctcttttctttcaatggcttgcaacaactcagtgcgagtcgtcgggaaaaaatacggagatattcctaaacgaccaatgtggcagtcattctcgccgccgccgccacatagggcacatccatgagagataccgagggaggggtagcaaacaaggcacaagcatatatagcttgtgagttattaacatgtactccctctatttctttttagttgtcgctagatagttcaatcttacattatccaacgacaactaaaataaaacggagggactattatgtcatgacaatgcaaccgcagcaagtatccatataaataaatgtccatattgtcaccatgataaaaaaaaagaacggtgtcgctttcctttatttgttagactagatagacggatcaatcgctggacagatggatcgactccgtcgtcgtccggggcgagaggaatgggagtggtgctgtgattacaaacggttaacagtggggtcgtttcgatcggcccttatagcatgttctaacctagcgtcgtcgtctcaccgtacatgattgattacaacgcgcgaattcaataatgtgcaccaaataaaaccgggagagacaaggaaataaaacaccatgcacgtatacacgtatcctcttggctgcagtgccctgctgcactgcacagatc

SEQ ID NO: 101957 - DNA, 921 bp, Zea Mays
atgggaagattcaacgtggatattctctgtggccacaacgaggatgtacgtgatgtgttccttttggtatcagcaaatctgatattcaccagcggtcgtgattctgtggttaggatgtcgaaaatggaggaagggttattgattgatacatcccgtgcacttggtggcaccatccgggcgattgcagctgactctaggcttttagtgagtggaggaactaatgcctatattcagtgctggatgtggaaggcaatgatcaattatttcacatctctggatgtggggcatgaaggtcccgtgacttgtcttgctctggattcactaagaatttatagtggttatttggacatgactgttcgtgtttggtacagagcccagatggagtgtgtgcaaaagttcatgcatgcagattgggtttgggctcttgctctgcgtggaaatactattgccagtactactggcataaatgcatatgtatgggatatcagggacgacaatttaacaagcttaatttccaatgcccatgttggtagcacatattctatagcttggacacacctggcagatgtgttgtttactggtggagaggatggcgctattcgcttgttcaatgtttctgatgtctctgatgatgaggaggatattaaaccagtggcaacttgggtaccacattcagcctcgagtggtggcaggattgcactcattgatttgaggaagcttccgacccccaaaagatcatcaaaggataggattgtatctgcgggcgaggatggctctgttagaatctggaacttctcagaagcattggatattgagaggagggcacaggccctaaggagtttgaggcaggagaaccgcatgaggcggaggaaggcgcagtgtgtattgatcaagtcaaagatacgtccatcaaatctttga

SEQ ID NO: 101958 - DNA, 166 bp, Zea Mays
ttcttttcattttcttacacttgttgtgtgagttgcacgtgaaatcagcttaagtattcaagtttatgtggggacttgaggttatctccataaaatctaaagattgccaacataacctttacttcactttctcattttcatgtggggacttgaggttatcttctta

SEQ ID NO: 101959 - DNA, 3715 bp, Zea Mays
cgattttccccacttggtttccctcctctttctgcctgtgcttctgtctctcttctgcccttctccaagaaaccggataatccatccatccatccgcgatccgccccgcccacccaaggaaggaaccgatcccgactcgccgcgggctcgaccccccgcgccgacggctacgcgtggcaggcacagcaagcgcgccgcttcgccgacgtccacgccgcctgctctggctgtgggcggaatgcgtcagctgtagaggacggccacggcacctttcagccttttcctcgtctgctcctcctctcggccgggctcagtcggtcggtaacgactcctgctgtgctgtgctccagcctccggcagcgcctgctccgcaaacagttgcctctcctgtgctcacccaagggtcaaggggccagtccatccatccgcccgtccaggaaggaaatcgttcatccccagaagacaaagcgatccacttggataccggataagccctgtcctggcggcgtcgcatcccctctcgattcccgcgacaggtcgcagtgaatgacgacggaaatcagcggcccttgaagcgaagactcccccccgccttcgctgctctccaccgatccgacgaaggcagcgctcgggcactgctgctggttccccttcgcccaattcggtctgacgcaggatctcagtttctgcggcggcggagtagtagggggcagacggtgattttctgattctctcaccttggctctgtggactaaatgtgacctgcaagagctaaaagtggcagcgattgactttcagatgagtccatttgtgctggccgtggtgagcgttgcattcctcagcttgcggtttttgcaggctcatggaagcgggttgcttctgagctgtggctcgaacagcactgtcgatgctgatgggcggagatggatcggcgacataacccctgaggggaattttaccttgagcagccctgggcttgcggcgtcactggtcgggaagagcagttctgatgagatattcggaccgctttacagctctgcccgtttcttcaacgcggcaacttggtataccattagtgtgctgcctggaagttactgtgtcaggttgcatttcttcccttcgaccttcgggaatttgagcgcgaacaactccgtgtttgatgtcacggcaaatgatttcaagcttgtttcaaaattcaatgcgtcagaggagattgcttggagagcctctgtgagcaattcggtcaccagcgcagttgtcaaggagtactttcttgtagtcggtgctcgtggcctgagtattgagtttgatccaagacctgggtcgtttgcctttgtgaatgcgattgaggtcatgctgaccccagataatttgttcaatgatacagtgagcaaagttggcagtccagtcacgcagcttcctcttggtttgaggggcagaggtgttgagacaatgtaccggctgaacattggaggtcctgcacttaaatcgcccagtgatcagtatctccacaggccatggtacactgacgaagcgttcatgttttctacaaatgctgctcagactgtgtctaatgcttcaagcatagtgtatgtatcaagcaacgagtcgacaattgcgccgattgatgtttacgagaccgcaagaatcatgggcaataacatggttgtggacaagcggttcaacgtgtcgtggcggttctatgtccacccaaactttgattacttagtacgccttcatttctgtgagcttgtctatgacaagcccagccagaggatcttcaagatctacatcaataacaagactgctgctgagagctacgatgtgtatgctagggctgggggaattaacaaagcatatcatgaggacttctttgacaactcgacgcagcaggcagacacactttggcttcagctaggccctgactccatggccagcgcttcaggtgctgatgcacttctgaatggtgtggagatattcaagctcagcaaggattccgacctttcttatgtgcttggtcatattgacacgggcaaccagatggattcttcaaaaggggggaagattaaaggcctatgggaagaacttggtattggctcagcatcttttgttgcggttacaagcgttgttctgttctcatggtgttacataagaaagaaacgaaaagctgtcaacaaggaggcccctcccggctggcatccgttggttctccacgaggctatgaaaagcaccacagacgcccgtgcagccagtaaatcgtcatcggctcggaatgcctctcccattggtcataggatgggaagaaggttcggcattgcggagattagggctgccacgaagaacttcgatgagtccttagtcattggaacgggagggtttggaaaggtctacaaaggtgagattgacgagggcgctacagtggccatcaagcgcgctaacacattgtgtggccagggcctgaaagaattcgagacggagatcgagatgctttccaagcttcggcaccggcaccttgtggcgatgatcggctactgcgaagagcagaaggagatgattctggtctacgaatacatggcgaaggggacactgagaagccatctgtacgggagcagccttcctcctctgacatggaagcaacggatcgacgcgtgcattggcgcggcccgcggcctccactacctccacacaggagcggaccgaggcataatccaccgggacgtgaagaccaccaacattctgctggacgacagtttcgtcgccaagatagccgacttcgggctgtcaagaaccggaccaacgctggaccaaacccatgtcagcaccgcggtgaggggaagcttcggatacctagaccccgagtacttccggaggcagcagctgacgcagaagtccgacgtgtactcgttcggagtggtgctcttcgaagttgcctgcgcgaggccagtgatagaccccacgttgcccaaggaccagatcaacctggcggagtgggcgatgaggtggcagcggcagcggtcgctggaggcgatcctggaccctcgcctggacggcgacttctcgcccgagtccctgaagaagttcggcgagatcgcggagaaatgcctcgccgacgacggcaggagcaggccgtccatgggcgaggtcctgtggcacctcgagtacgtgctgcagctccacgaagcttacaggcggaatgtggtggagtccgaatcgttcgggagcggcgagctggggttcgctgatataccatccttcttcagccttccccacgtcatcagggagggggaggaggaacaccaccaccgatcgaagaagccgtcaagtatcagagaggaactagacacacgtgagaacttctgacttcagcaaaacaaaaacaaaaaaaaatcttgctttgtagccatgatcatgatgtaaagttgtgttacatcgttctctttaggttttttttttttttgcttcttattccattggggcgttctcttgcttgacaagagtagcataatagatttttttttcttctccttgtgtgtgtagattaccaaccccctcatccctcccaacagaaagaagacacagaggtgtcaagagtttccttgacaactgtatgatgcaatctgcatggccaccgttcatgcaccgctgcctgtgtgacctgtataaatggcactgatataattactgcctttgaggttttgatgtagcaaacgggatt

SEQ ID NO: 101960 - DNA, 1985 bp, Zea Mays
ccggccgtcgccgccacggctcccacaacccaacaccgccatttctttttttaaaaccagtcgcctcgccagtcgccccacccgccatttatatttgttaagccgccgaaaccgccaaggaacggacggaaaacaaaccgaggcgagaacgagagctgggagggaaatttgtgcggcggagtagctgctggattcacacgggtgagggttgagcaagagacggggaggaggagcttgggggcgaggacaagtcaaaggacaaaggctcgcactcccccggcgccttctcgtcagcttctcccccttcgtcgtcttcgtctgctccgcccgcctaccacgcacgttttcgcttcccctcttttaacaacgcccagcaccgccgcctccgcagtcgagcagagcgcccctccctcttcctccctccccctctttctcgctcgcctcccacttgcgggcgtctcgctgaactggttgcgccgtaccagctgcgctccgtctccacagaaactgcttccaagtctctagctctctgcgggtgcatctgcggttgtatttgtaaagatgggttgctgctttatgttcggaaagaaagctaagcaggccgttgaaggcgatgaagatctacatagcgtcaaggtgttttcttacaacgacttgaggaaggctacacaagatttcagtgacgcaaacaagattggcgagggcggtttcggttctgtcttccggggagtgcttaaagatgggacactagtggcagtgaaagttctatctgctacttcaaggcaaggcgtccgcgagtttctgactgaacttacagcaatatctgatatcaagcatgcaaatctcgtcactcttatcggttgctgcgctgaaggctctcacagaatcctggtttacaattacctcgagaacaacagccttgcgcagacattgctaggatccagatacagtaacattcggttcaattggcgggctcgtgtcaaaattgcagttggcattgcctgtggacttgcgtttctccatgaggaaatccgtcctcacattatccatagggacataaaggcaagcaacattcttcttgacaaggacctgaccccgaaaatttcggatttcgggttggcaaggctcctaccacccaacgcgacgcatgtgagcacccgagtagcaggcacattaggatacttggctcctgaatacgcaatccgtggtcaagtgacaaagaaatccgatatctatagttatggtgttcttcttttagaaattgttagtgggagatgcaacaccaacacaagattacctagtgaagatcaattcctccttgagaggacatgggcactctatgaggaagggcgtttagaagacatcatagatattgacatcggcgatgacctggatgttgatgaggcatgcaggttcatgaagattggcctgctatgcacacaagatgcgatggcgcgtcgtcccagcatgaccaatgtcgttcggatgctctcaggggagaagagaatcaacgtagaccagatcactaggcctgccatgatcactgattttgctgatctcaagatcagcaacaaggagcaaagaccaggcgagacacgctctcccacgacaactcctacgacgaaatcattcaccaccaccgaaccattctcgtcgtcagagacgcccacgcagtcatccatgtgaaagtgtgggcgtaagaagcagttttttttgttgttgtttttagtttgtatagtgtgtgaatgtggtagatgggccaggttacatgaattttttttgaagagtttattgtttgttttgttatgaggaaacatctcataggtctcttattgcatctttgttgctgtaaatatttgaaaatgaagatggtcaagataagctttgcacgattctcattcttgaactcctgcaactgccgtgattatttggatcagttcaccttgtatctgacttttgtcccagagaatacgaaggagagctgc

SEQ ID NO: 101961 - DNA, 1978 bp, Zea Mays
ccggccgtcgccgccacggctcccacaacccaacaccgccatttctttttttaaaaccagtcgcctcgccagtcgccccacccgccatttatatttgttaagccgccgaaaccgccaaggaacggacggaaaacaaaccgaggcgagaacgagagctgggagggaaatttgtgcggcggagtagctgctggattcacacgggtgagggttgagcaagagacggggaggaggagcttgggggcgaggacaagtcaaaggacaaaggctcgcactcccccggcgccttctcgtcagcttctcccccttcgtcgtcttcgtctgctccgcccgcctaccacgcacgttttcgcttcccctcttttaacaacgcccagcaccgccgcctccgcagtcgagcagagcgcccctccctcttcctccctccccctctttctcgctcgcctcccacttgcgggcgtctcgctgaactggttgcgccgtaccagctgcgctccgtctccacagaaactgcttccaagtctctagctctctgcgggtgcatctgcggttgtatttgtaaagatgggttgctgctttatgttcggaaagaaagctaagcaggccgttgaaggcgatgaagatctacatagcgtcaaggtgttttcttacaacgacttgaggaaggctacacaagatttcagtgacgcaaacaagattggcgagggcggtttcggttctgtcttccggggagtgcttaaagatgggacactagtggcagtgaaagttctatctgctacttcaaggcaaggcgtccgcgagtttctgactgaacttacagcaatatctgatatcaagcatgcaaatctcgtcactcttatcggttgctgcgctgaaggctctcacagaatcctggtttacaattacctcgagaacaacagccttgcgcagacattgctagatacagtaacattcggttcaattggcgggctcgtgtcaaaattgcagttggcattgcctgtggacttgcgtttctccatgaggaaatccgtcctcacattatccatagggacataaaggcaagcaacattcttcttgacaaggacctgaccccgaaaatttcggatttcgggttggcaaggctcctaccacccaacgcgacgcatgtgagcacccgagtagcaggcacattaggatacttggctcctgaatacgcaatccgtggtcaagtgacaaagaaatccgatatctatagttatggtgttcttcttttagaaattgttagtgggagatgcaacaccaacacaagattacctagtgaagatcaattcctccttgagaggacatgggcactctatgaggaagggcgtttagaagacatcatagatattgacatcggcgatgacctggatgttgatgaggcatgcaggttcatgaagattggcctgctatgcacacaagatgcgatggcgcgtcgtcccagcatgaccaatgtcgttcggatgctctcaggggagaagagaatcaacgtagaccagatcactaggcctgccatgatcactgattttgctgatctcaagatcagcaacaaggagcaaagaccaggcgagacacgctctcccacgacaactcctacgacgaaatcattcaccaccaccgaaccattctcgtcgtcagagacgcccacgcagtcatccatgtgaaagtgtgggcgtaagaagcagttttttttgttgttgtttttagtttgtatagtgtgtgaatgtggtagatgggccaggttacatgaattttttttgaagagtttattgtttgttttgttatgaggaaacatctcataggtctcttattgcatctttgttgctgtaaatatttgaaaatgaagatggtcaagataagctttgcacgattctcattcttgaactcctgcaactgccgtgattatttggatcagttcaccttgtatctgacttttgtcccagagaatacgaaggagagctgc

SEQ ID NO: 101962 - DNA, 106 bp, Zea Mays
tgttttttttccaatttccctttctttttctctcctattatcctctttcaattccaaattcaaatttcctgttcagtttaactttcgttcaaaaattcaatttctc

SEQ ID NO: 101963 - DNA, 936 bp, Zea Mays
atgcccctcggccgcggccggcgcggcgcggcgcccgccgacgccggcgtgctcgagcagcgctccaggccgcggaacaccacgcgtccggacgcgctcacgcgcgggctctccgcggccaccgcgggccgggacggacgagaggggccgcgcggccgccacggccccgcgcccgcgcgagggttcctgcaggagtccgaggaggacgccgaggacgaagaagacgaggctcgggccaggagcgggtgcgcgcccgccggctcctgccgcttcgggcgcggcggcgcgtccgggccggcgccggccttgtcgccgccggtaggtttcgtcctggacgacatgaggtggagcaggttcgccacgggcgccgaccgcgtccgaagcggggaacacgacggcggcgcgcggcgcgcgttctttcccgagtcggccgaggacgccgaggacgaggacgaggacgagtcccgcgagaggagcggccggaaatgcgtctcccgtaccgcgtgcagatacccacccgccgcgcggttgctggcgtcggcggcggtagccttgggtttcctggagccggagacgaggaggaggaggtcgcgccagcggcgcccggcgcatcgcggggcgcgaggcgacgtcggctcggaggacgcgggctccacgtccaggcacggcggaggggagcagggcgccgatgcgggcgccggccggtgcaaaggcacgagcttcccgccggagaagagctcgtcggcggccgagagcgctgccgcggcggctggcacgacgtggaactcgaactcgccgacgtcggcctcggccggagcgacggggcagtggaacgcgaaggggtccggcgacgtcaccgctgcggctgccattgccgggggtaccggggcatggacgcgtgaggcgaggccgcgaggtggcgagcggcaactttaa

SEQ ID NO: 101964 - DNA, 1089 bp, Zea Mays
atgcccctcggccgcggccggcgcggcgcggcgcccgccgacgccggcgtgctcgagcagcgctccaggccgcggaacaccacgcgtccggacgcgctcacgcgcgggctctccgcggccaccgcgggccgggacggacgagaggggccgcgcggccgccacggccccgcgcccgcgcgagggttcctgcaggagtccgaggaggacgccgaggacgaagaagacgaggctcgggccaggagcgggtgcgcgcccgccggctcctgccgcttcgggcgcggcggcgcgtccgggccggcgccggccttgtcgccgccggtaggtttcgtcctggacgacatgaggtggagcaggttcgccacgggcgccgaccgcgtccgaagcggggaacacgacggcggcgcgcggcgcgcgttctttcccgagtcggccgaggacgccgaggacgaggacgaggacgagtcccgcgagaggagcggccggaaatgcgtctcccgtaccgcgtgcagatacccacccgccgcgcggttgctggcgtcggcggcggtagccttgggtttcctggagccggagacgaggaggaggaggtcgcgccagcggcgcccggcgcatcgcggggcgcgaggcgacgtcggctcggaggacgcgggctccacgtccaggcacggcggaggggagcagggcgccgatgcgggcgccggccggtgcaaaggcacgagcttcccgccggagaagagctcgtcggcggccgagagcgctgccgcggcggctggcacgacgtggaactcgaactcgccgacgtcggcctcggccggagcgacggggcagtggaacgcgaaggggtccggcgacgtcaccgctgcggctgccattgccgggggtaccggggcatggacgcgtgaggcgaggccgcgaggtggcgagcggcaactttaaactcgcgagaggcaagagccgatcgagtacgtacgagagtggagagcagttggttttggttcggcgacggcggtgcctgccggtggcgtgccagcgcggaagtagttcggttcgatccaccgtgtactgaaaagttcccatgatatacgggcg

SEQ ID NO: 101965 - DNA, 3623 bp, Zea Mays
gtgccttggagatagaagaaaaaaaaattgcaagtggaatggcatcctggaagaacacttgctcttactcttacactccagtgtcaaatgccgttgcgatgctagctctagcgttgctggtcctggcggcgccggcggcgtccgcagtccccgacgcgtccgcgtccgtgcacctcgaggcgctgctggcgttcaagaaggccgtcaccgccgaccccaacggcacgctgaccagctggacggtggggtccggcggcggcggcggcggcggccgctacccacagcactgcaactggaccggcgtggcctgcgacggcgccggccacgtcacgtccatcgagctggtggacaccgggctccggggcacgctgacgccgttcctgggcaacatatcgacgctccagctgctggacctcacgtcgaaccgcttcggcggcggcatcccgccgcagctcgggcgcctcgacgggctcgaggggctcgtcctcggcgccaacaacctcaccggcgccatccctccggagctcggcggcctcgggagcctccagttgctggacctcagcaacaacacgctccgcggaggcatcccgcgccgcctctgcaactgctcggcgatggcagggttgagcgtcttcaacaacgacctcaccggcgcagtccccgactgcatcggtgacctgaccaacctcaacgagctggtactctcgctcaacagtctcgacggcgagctgccgccgtccttcgcgaggctcacgcggctcgagacgttggacctcagcggcaaccagttctccggcccgatcccgccggggatcggcaacttctcgcgtctcaatatcgtccacatgttcgagaaccggttctccggcgccatcccgccggagattggccgctgcaagaacctgaccacgctcaacgtgtacagcaaccgcctcaccggcgcgattccaagcgagctcggggagctcgccagcctcaaggtgctgctcctgtacggcaacgcgctctcgtcggagattccccgctcgctcggccggtgcgcgtcgctggtttcgctccagctgtccatgaaccagctcaccgggtccatcccggccgagctcggagagctacggtcgcttcggaaactgatgctccacgccaacaggctcaccggagaggtgccggcgtcgctgatggatctcgtcaacctgacatacctgagtttcagctacaactctctctccggacctcttccggcgaacattggatcgctccagaatcttcaagtgctcgtcattcagaacaactcgctctccggccccattccggcgagcattgccaactgcacttcgctgtacaacgcgagcatggggttcaacgagttctccgggcctttgcctgccggccttggtcagctacagaacctacacttcctgtccttggcggacaacgacaagctgtccggcgacataccagaggaccttttcgactgcagcaacctcaggacgttaaccctggccgggaacagcttcaccggcagcttgagccctcgcgtcggcaggctcagcgagctcagcttgctgcagttgcagggtaacgctctgtccggggcgataccggaggagatgggcaacctgacgaagctcatcgccctgcagctcgggggaaacgggtttgtcgggcgcgtcccgaagagcatctccaacttgtcgtccctgcagaagctcacgctgcagcagaaccgcctagacggcgccctgcccgacgagatcttcggcctgcggcagctcactgtcctcagcgtcgcgtcgaacaggttcgtaggcccgatccccgacgccgtgtccaacctgcggtccctctccttcctcgacatgtcgaacaatgcgctgaacggcacggtacctgccgcggtgggaagcctcgaccatctcctcacgctggacctctcccacaaccgcctcgccggcgccatccccagcgcgctgatcgcgaaactgagcgccctgcagatgtacctcaacctgtcgaacaacgggttcacgggcccgataccgaccgagatcggcgccctcacgatggtccagtccatcgatctgtccaacaaccgcttatccggtggtgtcccgtcgacgctggcagggtgcaagaacctctactcgctcgacctctctgccaacaatctcaccggcgccctgcctgccggcctcttccctcacctcgacgtcctcacaagcctgaacatctccggcaacgagctagacggcgacatcccttcaaacatcggcgcactgaagaacatacagacgctggacgcgtcacggaacgcgttcacgggggccctaccgtcggcactggcgaacctgaccagtttgaggtcgctgaacctctcctggaaccaatttgagggtcccgtgccggactccggcgtgttctcgaacctgagcatgtcgagcctgcagggcaatgctggcctctgcggctggaagcttctcgctccctgccgccacggcggaaagaaggggttctcgaggacagggctcgcggtcctagtggtgctgctggtgctggccgtgctgttactactggtgcttgtgacgatcctctttctcggataccggaggtacaagaagaagggaggctctaccggtgcaaacagtttcgcggaggacttcgtcgtgccggagctgaggaagttcacttgcagcgagttggatgccgccaccagttcattcgacgaaggcaacgtcatcggtagcagcaacctgagcacggtctacaagggcgtgctcgtggagcccgacggcaaggtggtcgccgtgaagcggctcaacctagcgcagttcccggccaagtccgacaagtgcttcctcaccgagcttgcgactctgagccgcctgaggcacaagaacctggcgcgcgtagtcgggtacgcgtgcgagcccggcaagatcaaggctgtggtcctcgagttcatggacaacggcgacctcgacggcgcgatacacggcccggggagggacgcgcagcggtggacggtcccggagcggctgcgcgcgtgcgtctcggtggcgcacggactggcgtacctgcacaccgggtacgactttcccatcgtgcactgcgacgtcaagccgtcgaacgttctcctcgacagcgactgggaggcgcgcgtcagcgacttcggcactgcgaggatgctgggcgtccatctgacggacgccgccgcgcagtcggcgacgtcgtcggcgttcaggggcaccatcgggtacatggcgccagaattcgcgtacatgaggacggtctcggcgaaggtggacgtgttcagcttcggcgtcttgatgatggaactgttcaccaagcgacgcccgaccgggatgatcgaggaggagggcgtgccactgacactgcagcagtatgtggacaacgcgatctcgaggggcctcgacggggtgctcgacgtcctggaccccgacctgaaggtggtcaccgagggcgacctgtccacggtggcggacgtgctgagcctggccctgtcgtgcgccgcgtccgatccggcggaccggcctgacatggacagcgtgctttcagccttgctgaagatgagcaagcaatggcttattggtggggagaaggaataa

SEQ ID NO: 101966 - DNA, 499 bp, Zea Mays
gacgcgtagatacatcaccacgcaacagaaaatgcaaggtagctataaaggtacatgacaaagacgcgaacgcggcaacttgttcggctcaggagcaggagccaccccgagcggcaccatgcttggcctacagacctagctcgcgcacggtcacgctcacgtactcacggagacttgtcggactcacgagccggagggatcccaggaacgacgggcgggagcggcaccacggggccgagcacgggcggcagcggcgggatcagcggcaagcccgtggccttctcgtcgcccccgctactaccaccaccgttggcggcggcaccgccgcccgacgccgccgcgccgctcgctttcagctccctgccgtcgcaatgggctagcagcagcagcgcttccaccagcaggagagcaacagcggcctgcagaaccttggccattcttgctgttcgattacacagtgatagctaccgatcgatgctcaccgcgagctatcgctcgt

SEQ ID NO: 101967 - DNA, 2407 bp, Zea Mays
acggacccttataaacttagtttccgtctgggtatgcgcccttggattgctgttgcatattcagctcctgttgcagctgctactgctgttttcttgatttaccctattggtcaaggaagtttctctgatggtatgcctttaggaatatctggtactttcaactttatgattgtattccaggcagagcacaacatccttatgcatccatttcacatgttaggtgtagctggtgtattcggcggttccctattcagtgctatgcatggttccttggtaacctctagtttgatcagggaaaccactgaaaatgagtctgctaatgagggttacaaatttggtcaggaagaagagacttataatattgtggctgctcacggttattttggtcgattaatcttccaatatgctagtttcaacaattctcgttctttacacttcttcttggctgcttggcctgtagtagggatctggttcactgctttaggtattagtactatggcattcaacctaaatggtttcaatttcaaccaatctgtagttgatagccaaggtcgcgttattaatacttgggctgatatcatcaactgtgctaatcttggtatggaggtaatgcacgaacgtaatgctcacaacttccctctagacctagctgctcttgaagttccttaccttaatggataaggtttttctcctaaacatataggaatttttgaaggaaggaaagccagaaatacccaatatcttgttccaacaggatattgggtatttctttgtttattctgaatctttctattctgaattcaattaacgacgagatttagtatcctttcttgtactttcataactcgtgaaatgccgagtaggcacgaattcccccaatttgcgacctaccataggatttgttatgtaaataggtatatgttcttttccattatgaatcgcgattgtatggccaaccattgcgggtagaatgctagatgcccgggaccacgttactattatttctttctcctccttcatattgaccttttcgatttttgccaataaatgacgagctacaaaaggattcgttttttttcgtgtcacagctgattactcctttttttcattttaaagagtggcatcctatgtccactatctcgatcgaggtatggaggtcagaataaatagaataataatgaatggaaaaaagagaaaatcctttagctggataaggggcggatgtagccaagtggatcaaggcagtggattgtgaatccaccatgcgcgggttcaattcccgtcgttcgcccatcgcattattgcaaattccaaaaatgcaattttccatattcctagttacgtatttacttacggcgacgaagaataaaactatcactatattttttccttttcctagttcttcttccaagcgcaggataaccccaaggggttgtgggtttttttctaccaatgggggctttcccttcaccacccccatgggggtggtccacagggttcataactacccctcttactacggggcgtttacctagccaacacttagatccggctctacccaaacttttttggttcaccccaacattacccacttgtccgactgttgctaagcagttttgggataccaaacggacctccccagatggtaatcttaaagtggccaatttaccctcttttgcaatcagtttcgctacagcacctgctgctctagctaattgcccaccccttccacgtgtgatttctatgttatgtatggccgtgcctaagggcatatcggttgaagtagattcttcttttttctcaaaaaaccccttcccaaactgtacaagcttcttccaaagcatacgactttctagatgtatatgacgatctctagacagatggatcttatatgaatcgtatgatgaagtaccacatgagtggatatatagaaaaggaatccaaatccgccgaatcgctcatgttatgatcttctacatcctaggtctccgcgttccgtcatctggcttatgttcttcatgtagcattcagatcgaatgactctatgaaattacgtcgatacttccacatattatgggtaacgtaggagacatccctattttcacccgggggtcttaattaccactgcttaactttcaattcgcctctgaccatcaaattaaatgtgaataacccgtcctcctctctttgaaacaaggggcgcttccggttctgtgcgtgcttcaaacaattttgtcttctccatattaccatatctctagagtcaataattttctatgaggaactactgaactcaatcacttgctgccgttactcaacagttttctgttgaggtctatcccgtagaggtagtcaaattggatcagtgatcgatttctaggtttcgtcgtaagggattggagccccg

SEQ ID NO: 101968 - DNA, 282 bp, Zea Mays
atgacgccacccctgctgcatccatgggtgccaggaaagatggctaggactggtattagagaaatccacttcttgcccttcaaccctgttgataagaggactactctcacatatattgataccgatggaaactacaccgtgtcagcaagggtgctcctgaacagcactaagacaattagcaaggctcttgttcttggtgttaacgtcaagatgattgcgggtgatcagcttgctattggtaaagagactggaaggaggcttggcatgggcaccaatatgtga

SEQ ID NO: 101969 - DNA, 1509 bp, Zea Mays
gttctgttatcttcacccacatttttcaaccatatcgtcgtacgtgcatgcacatatgtaattccacaaaggatatatatatcaggcacgtgattatattacaaacagcaagtggaactgtaacaacaagacacaaatagggctagcatcgatcgtggatgcctactcaaactacacagtgagtgagtgagtgatggatggtgaattgtggagctagcagatcgagcgtgcaagcagtccactactgcacagttacctttatgacagtataaattggtgtcctggctgctggcaagtgttgtagagcagacgaagcagctcgatcgagcacacacacacttgatcactactaatataaacacattgcgcaaaggccgccatggcttaccgcgcctttgctacgctgcttgcagtgctagcatttgtgggcttcgcttcagttccccgtggtctggcaactgacccgacccagctccaggacttctgcgttgctgataacaagaaccctgtgctggtgaacggggtggtgtgcaagaacccgaacgtggtgaaggcaaccgacttcttcttcaggatagtgccgatggcgccaaacgggcagggctccgccgtgacgccggtggcggtgaacgagatcccggggctgaacacgctgggcatctcgctggcgcgcatcgacttcgtccccggcgggcagaacccgccgcacacgcacccgcgcgggtccgagatcctgacggtcatccagggcacgctcctcgtcggcttcgtcacctccaaccagctgctcaacaacacgctcttcaccatgcagctgaacatgggcgacgtcttcgtgttcccgcaggggctcatccacttccagctcaacaacggcaagacccccgccgtggccatcgccgcgctcagcagccagaaccccggcaccgtcaccatcgccaacgccgtgttcggggccaagccgcccatcctggacgacatcctcgccagggcgttcatgctcgagaaggccaccgtcgactgggtccagcaggcgttcggcgcggcaccagtggccggcggcggcggtggcctgcccggaggaggtggctatcccggcagcggtggtggcctgcccggaggaggtggctatcccggcagcggctttccgggctaccccggccgtagctgatcggtacggtggtggctccacggcggcgccgcctagctagcatgctgcacaagtgcagccgcgcgcgcggatcaggccgtcatacacaaagtatacttatatatagtacctcaaagtcctcaagcattaagccacgtgaagtgaaggctatacgtattaagttcggttgtaatggtcaggtgtaccaaacacccaccaacacctagctagtgagcaggcgcaatgcggcgtctgtgttgatcgagccgtagctctagctctagctcgatcgggttgaataatttgcggcaaaacttatagatatatatggaataaaatcgaaaagtttcatcgtttta

SEQ ID NO: 101970 - DNA, 627 bp, Zea Mays
atgtccattgaacaaaagaatgagaaaaataggaagcgtcgtgaagcacgtcaacgaaatacaggactacccctaaagtctgagtcatctagaggtcctattaaaaacactccattggctggtaattctatcgaacgaaagaggcaaagggatagagaaaggcgtgcaacaatgtcggttgaacaaaggaatgagtacaataacaagcgtcgtcaaatgcgacgacgaaataagggacaaaatgtgatgcccgatgtttcaggagatggcgacaacaaagtaaatgtggatctagatgatgatagcgactggctgcatcggaacgagacattccagacaaacgactatgtcgcaacgacagaccttctgtcaccaggcagtgtgcatgaatctgttggtgtcattggggaaccgagtatcggcgttagggagtataggcttgaacgccttaggttgtataatcagacaccaaagcgaaaagaggcaaagatagagtacatgagaaaacgtagagtgctacaggctgacactctgaatgttgcgtccatcgccatggaggacccaacatatacccctgaggttgtgcaccctgcaacggaaccttcaacagttaccacctgcgactag

SEQ ID NO: 101971 - DNA, 1160 bp, Zea Mays
atgccaattaataacgcaccccttgggtggagtatattcattgacctgcctgtccctggcctgcggggcccacgtgtctgccagggcggcggcccggcggtatatatacccaccgcttcgttcctccacccgcagccgcagtccaccagagcgcacgcgcaaacaagaggaggagagaagctgccattgccgacgaccgccaaggaagggattccggaaggagggggaacccacgggaggcccagcgctgggatgttggccgcggacgtcagctccgtcgcgaggctgctccgcggggaggcggtgaagaagggcgggccggagatcgtgacgatggatcttctcggcggttgtggcggcggcgtggcagcggaggacgaggtcgtggacctcgatgtcacggtgcctgccggctgggagcgacggcttgacctcttgtccggcaagacgttcctgacccctcgccaccagagcgtgcaaggcggtcaccaagacctcaaccttcctcctccggcggcaggatccgcgtcggcgccaaacaccaacaactcgtcagcagcggtctgtaccctcgacatggtccgctccgccctcgagcgcgcgactgccggaaggaccgccgcgtcgcctgcaacgtcttccacatcgtccgcgtccacctcgtcgtcctcctccgcgggaaagcgcaaccgccggtcgccgctgcccgcgactcccgcgatgcgcgcagccgcgtgcccgtcctgcctcacttacgtgctcatcgccgaggcggacccacggtgcccgcgttgcgcggccagggttccaccgctccgcggtaaggccgccggcgccgctaccgtaggtagtggcaagaagccgaggattgacctgaatgcggctgctgatgagatggagtgaacggagaaaaagattagaggaaattggaacaggaaatataatcaggaaacgggtttcttttcggcaaaacctttgtctgatagaaccgtctgatcatagtatagggggcctctatgtttatatttattaaagttcgatcatagatagaaaaaaactggtgggttacagagtataggagcagattttatttagtttattccagttttgttggttataacgttgtgcttatgctgctatattaaagcatcaattgcatc

SEQ ID NO: 101972 - DNA, 321 bp, Zea Mays
atggatcagaaagatgaagggtttgaaggagaagaaggctcacctcatggagatccagagaaggatgagatgattgacaagaaggtcgtgactctccgccagtccctgctgaagcagacctctcgactagccctagagaggagatcaagctcaagttcatcgacacctcgtctcatggtcggatctaaggagtgggcaaggtccgctactgcctcgtccaagtttgggcatgggcgcttccagacaaacagaggttctttggcaagctcaaggcctaagctttctgctgctgcttctgctggagatatcaggagaacatga

SEQ ID NO: 101973 - DNA, 589 bp, Zea Mays
atggcgggtgcggcatcggatcacggcagcggatcacgggatctgggaggggagcagaggggcaggagggcgtgtgcgacagcggaccacggcggcgacgaaagcgcgagcgagagcggggcggagggggaggaccgctccaagatggtgctgctcgaggagcccgccgcgcaggccaagcgcctcctcgagcagcggcgcgccgacaaggtggagcgggccgccaagtccatctcccgcatctgcctcgacgtcgacaagcttgccaccaaggcaaggaaggggtgcattgtgtggggtaggcgagcatcgcgtggggagggtgatggggccaagaacgggggcggggtggcggcctcttccaagatctgtgtgtgcggggagggtatggcctcgtggggatggtagcgaggatcgcggggcgtcaatggcgcccttccatcgacggagagccgaggggcggtgagtgggtatggaaggaagaggatggaaagaagcgcggcgggcgggatgcgaggagcgtgcgcggtcgcggcggcggtggggaggagggcggggatccacgaccgagacgggagcggcagaaccg

SEQ ID NO: 101974 - DNA, 378 bp, Zea Mays
ctgcaaatcagaatgtttgcagccccacacaaaaataaggattgactatacccgcagcagcaataacacaactaaaacattatctaaacctacaggtagggtctatccttattttttattaggggctgcaaacatagctggctgcaccaattttttttccgggatttaggccacgtttggagccctagagttaatagttagtagtcatctaattagttaacaactagccacagtattagttttggtgtttagcagctatgtttaacaggtaacttttctagaggtttcaaacatggccctatagtttcgggacgtttgagctgatcacatgcaattgatcatccttttttcggttgactctgaccaaaaaaaaaaaaa

SEQ ID NO: 101975 - DNA, 1783 bp, Zea Mays
agattacgcgtggaattgtggcggcggcggctgtatcctcccgagctgctccctagacggcggccggtcctctacaggcggctccccagcggctacccagtcggcggtcgggactcccaagacgccgctcgtcttgctccccaggcgctaggcggccgcggctcgtgttcgtccccaggcagccacgcctcctgttcctccccaggcgtcaggcggccgtgtcctccccagccgtcggttcttgacttcgtagggtatttgacactggaccaagattgtttgaggaactattggtgtgatgcaaatgttacatatctcattaatatctgcaaaaaagagatagaagatgacaataggcccatgggagttttcactaggacaggttgaaaaaatttggttacaaagtatgaagaaaaaacaggcctaaagctaacaaagaaacaattgaagaataagttggacaacatgaaaaaggagtatacatggttcatggagttcaagaatgcgaccactggtcttggatggattgaggcaaaacaaactgttgactgctccaaagattggtgggatgaacacctagcaagatgtaacaatccggataaaggtatcaaatgcaaccatgttaggttcagaaaacaaggaccaaaacatcttgatgatctacatatgttgtttgataagatacatgttagcgggacaagtgcatcatgtcctggagatatttcatctgatgactcaagtgatgatgtgctagagatagaaagaactccagaaaatgatgaagtcaaagtggctgtttcgaaaagatccaaaccagtgaaaaggaaacgcaaggcctcatgtactgctgctgaggagaaggaagagaagagtccattctttcgactatataagaacacatgtttgaagatagaaacagcagcagagaagatatccacaagtgttgaagcatcatcaacacatccaacaagccaagtgcctagcattgcagagactatgaagatggtgaaagattgtggggttaaagagaaaacagctctaatgcatacaactacatttttgattgtgaagcctgaatttagagaggtcttctgcatgctggaaacaaatgaaggaaggtttgacttacttgagagggagcatgcaaaggaaatgatgaggcacatgtagaagattttgaattatttatttatattaatgtgttgtgagaactatttgtttgcttgctatgtaagcaccatttggaatgatgatattgtgtccataatctttgttttctgtgcacagtttgctttgttgtgtgcaattttgtttgttgtctacatattcatttgctattcaatttttgttataaatattaatatattaatatattgtgtagatggctgacaacatggcaactttggccaaacaagcaaacaagggtctattgtatcttgctgaactgtcccagcaagcagttgttattggtgaaatgggtgaagagtacaatcagagatacttgcacaaaggagagtacagggaaaccccagaaactggaatacaatgggttacgaattgcatgggtcgtccaaggtacttttataagatgtttcgcatgagcacagatgttttcatggcactacatgacttgctcgtctctagttacgacttaacatcaactaataatgtatcatcaatggagtcactagcaatgtttttgtggatcgttggaggaccacaatcattttcacaagctgaaaatcgttttacccgatcactatggacagtgcacaccaaattt

SEQ ID NO: 101976 - DNA, 101 bp, Zea Mays
gtttgtcagttattattcttcatgagtccatatattacttgtggtcctgtaatgtaggtcattattatagtggcttagatgatcgttaatcactattagcc

SEQ ID NO: 101977 - DNA, 645 bp, Zea Mays
atgcggcctggatcgacctccagaccttctccgcgccggtgcctctatgtctatggctccgcctccgcgctcccgaagctgctgctgctgcttctagctgcatcatcatccgcgcaagcccagcaagcggcgaggatgaagaccgatccagtcgaagcggcggcggtgaacgcggtgttcgccaagctccgccagacagcgtcgtcggaatggaacatcagcggcgacccctgcaccggcatcgccacggacggcaccgtcatcgaagacaacggcaacttcaacccgggcatcaagtgcgagtgctccgaccagaacaacatcaccgtctgccacgtcaccaagctgaagatatacgcgctcaatgccgttggccccataccacaggaactgcagaatcttacgcgcttgatcaatctggatttaagcaagaattacttaacaggttctttgccatctttcctcgggaatttgactgctatgcagtacatgactttgggcaccaatgcattgtctggatctgttccaaaggagcttgggaaccttgtgaatcttgtatctctaggctttggctcgaactacttaaatggcccccttccttgggagttgggaaacctggcaaaactggagcaattgtgcgtctag

SEQ ID NO: 101978 - DNA, 3031 bp, Zea Mays
atgaggaagcccaggctgagtgtcggcggcggcggcggcctcctccatggctttccctcccccgtgctgctgttcttgctgctgctgctgctgagttcttggagggtggctgcccaggcgcagcaggcgcctcagactgatccggtggaagcggcggcggtgaacgcgatcctgagcaagctgaggctgagcgcgccgccgtcgtggaacatcagcgggaacccctgcagcggcgccgcgacggacgacacgtccatcgacgacaaccctgcgttcaacccggccatcaagtgcgactgttccgaccaaaacaacacgctctgccatgtcactagactgaagataaacacactggacgcagttggccccatacctgaggagctgcggaacctcactcacctcgttaaactgaccgtgggcatcaatgcactatctggacctgtcccaaaggagcttggaaatcttaccaatctcttatcactggcattgggctcaaataattttaacggcacacttcctgatgagctggggaaactgacaaaacttcgacaaatgtgggcatcagacaataatttcagtgggcagattcctgattatcttgggagtttgactaacttgacccaactgaggctccaagggaactcttttcaaggtcccattcccacaagtctttctaatcttgtcaacttaaaaaaattggacctgagtttcaacaatatcacaggacaaatacctcaatcaattttgaatcttacatctcttagttatttagatttttcatacaaccatatctcaggaaactttccttcttgggctactgacaaaaatttacaattgaaaacatactgcttagttattgcacacaaaacctgccgattcaatataacaattccaattaaacagtactctgaaaatttggatgcagctgcgtcctttgcggtggactgtggtggtagtagagcaatatcaggttcagataattctgtctatcaagctgataatgccaaccttagtgctgcatcgtactatgttgcgggtgcacctacatgggccgttagcagcgttgggttattcttggacgcagatgcacccaatgcaagttacatcatctacagttcacgccagttcgagaacaccctagactctgcactgttccaaacagcaaggatgtcgccatcatccctgagatactatggcattggacttgagaatggaaattacacggtcacacttcaatttgcagagggagagcgcaaggagcagaactttgacattagaaaggcagctggagggaaatctttcactgctgttaagaagcagtatgttgttccagtaaccaaaaacttccttgagattcatctcttctgggctggcaagggcacttgttgcattccttataagggatactatggtcctgcaatatcagccctgagtgcaactccaaatttcgttcctacagtccgtagttctgaagacagcaagagcagccataaaactggtgtgatcgctggggttgcagttggtgtttcagtttttgcattgatcgcactggccggaatcttcttgtggtgtcagaaaaggagaaagctattgttagagctagaagaattgtataccatagttggaaggccaaatgtcttcagttacagtgagcttaggtcagctacagagaacttttgttctagtaacctacttggtgaaggaggatatggatcagtttacaagggtaagttgagtgatggaaaagtggtggcagtgaagcagctctctcagtcctctaaccagggaaagatgcagtttgcggcagaaatcgaaaccatttcccgagtgcagcaccgtaacctcgtgaggttgtatggctgctgccttgagagcaaaacaccattgttggtctacgagtacctggagaatggaagcctcgatcatgctttgtttggaaaggggagcttgaatctagactggccaacacgattcgagatatgtttgggcgtagcaagaggtatagcttatctccacgaggagtcaaccatccgcattgtgcacagggacataaaggccagtaacgtgttgatcgacgccgatcttaacccgaagatctccgatttcggccttgccaagctctacgacgacaagaagactcacgtcatcacaaatgttgctggcacgtttggttatctcgcgcctgagtacgctatgagagggcatatgactgagaaggttgatgtgttcgcgtttggcgtggtcgcgctggagattgtcgctggtgaatcaaactatcagaatgctctggacgaaggcacgacctatatctttgaaagggtgtgggaactgtacgagaacgggcggccgctggagttcgtggacccgaagctgacggagtacgacgcgtacgaggtgctgcgggtgatccgcgtggcgctccactgcacccagggctcgccccacaagcggccgtccatgtcgagggtggtcgccatgctcaacggggacgccgacgcggccgaggacgttgcgaagccgagctacatcacggagtggcaggtgatggcggccgacgtcagcggcagcttcgcgagcagccacgtcgggtcgtcgtcgacgcagacgcagccaacgtcttcgtccggcggccacggcggcgcccaggcgagccctgagcccggggacctgacgcccgcggtcccgtcgccgctctacacctccatcatcgaggagggcaggtgacagctagcttgcctcggaatcgcgaatgcctggcagtggcatgcatgcttgcctcggaatcgcgaatgcgttgctgtgctctccagttttgtggctaatacaatactgatgtcgggtcgccatggttgatgttgttgtgaggaatttacttgaatgtgaggccgcaagcagcagatttgatttgggaggcacactgaaatggcagccgacgcagattttgggatggcgtgcgcgtccctgtcaagaatgggatggcgtgtgcgccggcgccaggcctgcctcgccttgcttgccggcggcagcgtga

SEQ ID NO: 101979 - DNA, 1160 bp, Zea Mays
atccatgtacccggaccggaccccctcaattcaaatcccccctccgtcatcatctcgtctcgtcatactcctcgccccccacctccaccccctcgtgattatctccccggattccaaatcccatctccgattcactcggccccagagccgccgccgggttcttcgcgcggacgatggcgggggctgccgagggcgccggcgcggaggcggtggagagggcgcacgggctctaccgcggcggccgccaccgggaggcgctggagctctactccgccgcgctggctgcggcgcggggccccgcgcagcgcatcgcgctccacagcaaccgcgccgcctgctacctaaagctccacgacttccacaaggcagcacaagagtgtacatctgtcctcgagttggatacggagcatgctggagctctgatgttacgtgcccagactctcgtcactctgaaggattatcagtcagctctgtttgatgtcaacaggctcgttgagataaacccgtcgtctgaagtgtatcggaacctgcaggcacgattgaagacacagctatcactggccccaattcctgagtgcgaagaggagtccctttgtcgtgaagaggaagacgaagaacttcctccacgagttcagaagaccgacacttcttctatcgctaagcctgaccaaccagcaaccaaactggtcctcgagaacaaaccttcagctggaccaattctccacagaaaacctgcaactgaacctctaaaggctgtggttccgtccacttcgccttcaaaaccccagggttgggaagccatcccaaaaccgaagagtcattcaggccttgactactcaaaatgggacaaaattgaagaggattcaagtgaagacgaggacgatgaggaagatgagctgccacagtacaagtttaaagtcagaagtgttggtgtgcggtctgtaaagtgaacagggttagcaatagattcagagtgtggtctgtgtacagtctaatagatgcccactgactagggtgccacttattcctctttattagttgagttatttggaatgaacaactatatattggttgatatttgcttgaatcagagataagaggatctccaagagtctccctaattccctcgtaattgctataaatgggtattttgatgaaaa

SEQ ID NO: 101980 - DNA, 1757 bp, Zea Mays
ccattctagatcatatgggaggaatagagtgtagctcctaccaactcaccaataataatacggatgtaagaaacaaaagaatgtacaaagaaaatccaaatgaataaaaggagaaacaatgagtggaaaatgatatggagcacccaacagtatacgcatacgccaggcaccacatgtccatccgcgactccgcgtcggtatccgtcaagaaattttcaacaaaaaaaaaacttaattttccactcctattcttccccgacgccggggaccagcgccagcgccaccaagaagtgacccacccaggtagccaggtaggtaaccgcccgtgccccgtcgccggcgatggcgaggtacgaggcgtcggcggccgcgccgggcgtagactttcaccttcccgacgagatcctggccgtgatccccaccgacccgtacgagcaactggacgtggcgcgcaagatcacctccatggccatcacctcccgcgtctcccgcctcgaggccgactctgggcgcctccgccgtgacctagccgaccgcgaccacgccgaggccgagctccgtgcccgcctcgccgactccgacgcgcgcctggccgccgctctcgacgagaacgcgaagctagcgaaggaaagggactcgctcgccgcgacgaccaaaaagctgaccaggaatttggcgaagttggaggcttttaagaaacaactgatgaaatcgttaagtgaagataatctattgcaactgtctgaaaccagtcaagatcacaacggagaagatattttgacagctcgagtcccgtattggaaagatgaagtttgtagcagtaacacttcttcagatacctccatcagatctacaataactgaatccatccatggtggaggataccagttctcaatcaaaacatatgtgcctccaaaattaactcctggctcaacacctatgatttcgtcttctagtggttctccccgagcttattcaactggcccaccctctcccaacttcttctctggtccgacttctcctacaaaagctcgatctgagggccaattgacattttcgtcatggcaaggatcatcaagtcatcagtattcagcacctacctctcctcaacgccactcattcacagggcggccacgtatagatgggaaggaattcttccggcaagcacggacaagactttcttatgagcaatttggagcatttttggccaacatcaaggagttcaatgctcaaaaacaatcacgggaggacaccctgtcaaaagcagaagagatttttggaacagaacacaaagacttgtacatttctttccagaatatgcttagtcgcaaccagtcatgaaaaatatgtcagaagcggtattttctgtctctaaatcaagcagggaagaatttgttgcaataaacgaggcccttccatagtttttttaaaaaaaaaaatgctttcataggttctcaagatcacattgtagagatctgtatgttggcaatcttaatccgaggcgtccgttctcaatgatttggagcggtgacttgagaatgaaattctcataactgccggaaaattagcccgtttgatttagcatacatccaatcattccctggcattcaagacttcttgtttgtctttctgctgtaaaggtattcattgaaaaactgaaaaggggttcagcgtacattgtgcaaagcagtaccaggtgcttagctgaggaggcaccggctaaataaaaaaatgttgggttattatctcatcggaca

SEQ ID NO: 101981 - DNA, 1691 bp, Zea Mays
ccattctagatcatatgggaggaatagagtgtagctcctaccaactcaccaataataatacggatgtaagaaacaaaagaatgtacaaagaaaatccaaatgaataaaaggagaaacaatgagtggaaaatgatatggagcacccaacagtatacgcatacgccaggcaccacatgtccatccgcgactccgcgtcggtatccgtcaagaaattttcaacaaaaaaaaaacttaattttccactcctattcttccccgacgccggggaccagcgccagcgccaccaagaagtgacccacccaggtagccaggtaggtaaccgcccgtgccccgtcgccggcgatggcgaggtacgaggcgtcggcggccgcgccgggcgtagactttcaccttcccgacgagatcctggccgtgatccccaccgacccgtacgagcaactggacgtggcgcgcaagatcacctccatggccatcacctcccgcgtctcccgcctcgaggccgactctgggcgcctccgccgtgacctagccgaccgcgaccacgccgaggccgagctccgtgcccgcctcgccgactccgacgcgcgcctggccgccgctctcgacgagaacgcgaagctagcgaaggaaagggactcgctcgccgcgacgaccaaaaagctgaccaggaatttggcgaagttggaggcttttaagaaacaactgatgaaatcgttaagtgaagataatctattgcaactgtctgaaaccagtcaagatcacaacggagaagatattttgacagctcgagtcccgtattggaaagatgaagtttgtagcagtaacacttcttcagatacctccatcagatctacaataactgaatccatccatggtggaggataccagttctcaatcaaaacatatgtgcctccaaaattaactcctggctcaacacctatgatttcgtcttctagtggttctccccgagcttattcaactggcccaccctctcccaacttcttctctggtccgacttctcctacaaaagctcgatctgagggccaattgacattttcgtcatggcaaggatcatcaagtcatcagtattcagcacctacctctcctcaacgccactcattcacagggcggccacgtatagatgggaaggaattcttccggcaagcacggacaagactttcttatgagcaatttggagcatttttggccaacatcaaggagttcaatgctcaaaaacaatcacgggaggacaccctgtcaaaagcagaagagatttttggaacagaacacaaagacttgtacatttctttccagaatatgcttagtcgcaaccagtcatgaaaaatatgtcagaagcggtattttctgtctctaaatcaagcaggttctcaagatcacattgtagagatctgtatgttggcaatcttaatccgaggcgtccgttctcaatgatttggagcggtgacttgagaatgaaattctcataactgccggaaaattagcccgtttgatttagcatacatccaatcattccctggcattcaagacttcttgtttgtctttctgctgtaaaggtattcattgaaaaactgaaaaggggttcagcgtacattgtgcaaagcagtaccaggtgcttagctgaggaggcaccggctaaataaaaaaatgttgggttattatctcatcggaca

SEQ ID NO: 101982 - DNA, 98 bp, Zea Mays
tctcttatattttttttttctaattccatctaatccacatagactagaaataaccaaacaatggctaaatcggacggaatgggaactggaccggaatc

SEQ ID NO: 101983 - DNA, 1035 bp, Zea Mays
atggcggccggatttcacttcttctccctcaccttatcttactcgtggcctcccgggatgcaggctgttgcggaccaggcgacggggccctccgcgtcccgccgtaccggctcctcccgcgcttcctcgccacgccgctgcacctggaggcgaatggtggtgacggtcagcagacggaggtggagggagaacggagaaggacgcatccgggcggtgcatacaaccggcaacagtggccagatgccgacgggacccggtggtggggtggcggaggtggagcggcgatggctggagacagcagggcccgacggtggcaaggcggaggtgcttctccggccgacggtggaaggcgtcaggacccagaggcgaggaggaagaagtggaggcgagcgagaaccggaggggagggagttggggcgccggccgcgcgaggggagagagaccggggtgagagatggaggtgataaggaagaaggcacgatttccgtctgcatcgctgtcagtgccgtagccgccactcctatctccggtgagctctctccttctctcttcttcctcaacaatggcatcatgatagacagctcgccgaggcaggccatggcgaaggggtgcgacagcacgctgcggcacgtgtcgagcaccttgttgaaatggcgcacggcctcgtcggggaggccggcgtccagtgccgccaccgcggcggtggaggacgagcttcacgtgcgccggcagctgcgacacggactccgcccttgtattggcgggcgccagcaggttcgacgggggcgggaacctgtcctccgaccagcacacgctctcgcgccggaacatcacggaggcgaggcggtggtcggtttggagaagcaccaacgcgtcctccatcaggccgaggtggaagcaagcctggcccaggaccaagtacctccattggtgggcgtggatgctggagaaggtggcgaccaggcgacgcttgaggctggacacgtcgaggcagcacaggaagcggccagcgtcggggcggtcgtggtccggtga

SEQ ID NO: 101984 - DNA, 887 bp, Zea Mays
cttgaactcaacgcgcctaagcaacttttgggcgacggcggcgccagcaggtcaccactagccaccgcgacgcggtttccagctcggcggccgtggctataaaaggtcgtcgtccggcttcggactgtaccatccaccaccatcctctgccttgtcgatcatccatcgaccgcctcctgctcggcttcccaccccgcctgcctgcgttgcacaccagggaggagctcctccgaccgaccggccatgagctaccaggctcctcctccgggcacctcagcctacccgccgccgggcacggcctaccctccgccaggccagccgcaggcgtacccgccgccggcatacggcgcgccgccacccatggccgccggcgggtaccctcccccgccgcagcaggactctaagggcggcaacgacggcttcctgaaaggatggtaaggatctgcctatccacctgccatgcctggtgccagccgcttcaacgtttcgttcgccgcttctgaactctacttactgaccctgtcctccgtccttgttcgatctgcagcttggccgctctctgctgctgctgcatgctcgacatgtgcttctgagttcgtcgtcaggggctcagggcacggggatggcgcgcctagagtccagaccgatctccatcatgcagtcaggcgaaaaacaatgcatggagctgttctttttttttccttcctttctgaatcatgacgatgatacatctttgtttccgtttccatcctgtatatgctttcccgtgctatgcatggaaacttcactagctaccccagcagggattatgttctctggcgttcatgcgcgtgtgttcttgagctctgaagtctgaaatgaaaacatctgcgatcggattcgtattt

SEQ ID NO: 101985 - DNA, 797 bp, Zea Mays
cttgaactcaacgcgcctaagcaacttttgggcgacggcggcgccagcaggtcaccactagccaccgcgacgcggtttccagctcggcggccgtggctataaaaggtcgtcgtccggcttcggactgtaccatccaccaccatcctctgccttgtcgatcatccatcgaccgcctcctgctcggcttcccaccccgcctgcctgcgttgcacaccagggaggagctcctccgaccgaccggccatgagctaccaggctcctcctccgggcacctcagcctacccgccgccgggcacggcctaccctccgccaggccagccgcaggcgtacccgccgccggcatacggcgcgccgccacccatggccgccggcgggtaccctcccccgccgcagcaggactctaagggcggcaacgacggcttcctgaaaggatgcttggccgctctctgctgctgctgcatgctcgacatgtgcttctgagttcgtcgtcaggggctcagggcacggggatggcgcgcctagagtccagaccgatctccatcatgcagtcaggcgaaaaacaatgcatggagctgttctttttttttccttcctttctgaatcatgacgatgatacatctttgtttccgtttccatcctgtatatgctttcccgtgctatgcatggaaacttcactagctaccccagcagggattatgttctctggcgttcatgcgcgtgtgttcttgagctctgaagtctgaaatgaaaacatctgcgatcggattcgtatttgtacttggtctgctgctttatta

SEQ ID NO: 101986 - DNA, 757 bp, Zea Mays
atccaccaccatcctctgccttgtcgatcatccatcgaccgcctcctgctcggcttcccaccccgcctgcctgcgttgcacaccagggaggagctcctccgaccgaccggccatgagctaccaggctcctcctccgggcacctcaggtacgtgtcccgctgcgacacggggtcatcaagatgcaacctttattactactgcagcctgcccctgatcgattttgcctcggctgtgcagcctacccgccgccgggcacggcctaccctccgccaggccagccgcaggcgtacccgccgccggcatacggcgcgccgccacccatggccgccggcgggtaccctcccccgccgcagcaggactctaagggcggcaacgacggcttcctgaaaggatgcttggccgctctctgctgctgctgcatgctcgacatgtgcttctgagttcgtcgtcaggggctcagggcacggggatggcgcgcctagagtccagaccgatctccatcatgcagtcaggcgaaaaacaatgcatggagctgttctttttttttccttcctttctgaatcatgacgatgatacatctttgtttccgtttccatcctgtatatgctttcccgtgctatgcatggaaacttcactagctaccccagcagggattatgttctctggcgttcatgcgcgtgtgttcttgagctctgaagtctgaaatgaaaacatctgcgatcggattcgtatttgtacttggtctgctgctttatta

SEQ ID NO: 101987 - DNA, 2033 bp, Zea Mays
gatccgcgccgccgcatcctctctggtgccaagaatcgcggacgtcgcttcccacctcaccgaaccgtccgcaatctccgtctcctggccccgcgtcgttgcgtccgcgctctcctcctgccccgcgccgttgcgtccgtaatctcctcctccagccacgccgttgctctcgcgctccgctgctctcgcggaatcactcgcggaatcactgctccgctgctctatccgccatcagatttctggagtagtcatggaaggtgccgctcttgatttctaaacagtgcgccaccaatggcgcctgagcccccgccaccatttcatccccttcccgcccagtgtacacaccctacctcgccccgcgtctagatgcacgcgtgcccgcggatgtctctggtgcccccgctcccatcctcctcgcgtcccatccccgtcggcacgggcgcacgacccccatcctcgatgtcgtcctagctgctgcgtgtgcatctccacgcgaacccctaccatcctcgacgtcgtcccagttgcggctgtcgcatctccgtgtgcatctccacccaaacatgcaaggtcaccgggggcccaaacctcaggagcagcgccgcccgcggatcgtgtggattcctgtcgcgtctgcctcggcgaggcctgccgagggatacgacaacgaggattatccatgtcggggccggtcgctttgcctccctgctggccgtctctgccccgccagctccgccttaacgccggatttctccgtgtctgcctccgcatcagggcacgccacgcgcatcgcctcggcggtgggccgcgttgctctctctaccttgtcgcagcacccttggaggacggctacactggcatggaggttcatgtgcgtctgcttggtcgagcgagctccccatctttctccgtcaaccccgtcgtccattttgccccaccacgccacgcaatacgcagttgaagatgagacccaggtggtggcgctgaagcgactatcgcggcatcacggctcgaacgtgatgacgatttggcgttcttccctatgggccgatccctctggtcatcttctcgccgcactggcgatggagccgggcttgccgcgcctggtggttctcgtccgcccacggcccccgattagcatgagcctccgcgccagtatcattggtcttcctaatgttggcaagtcaaacctcttcaacgccattgttgtccgatgctttgaggatgacgatatagttcatgtcaatggaagggtcgagcccggatcagacattgatgtcattaacctagagctgatattttcagatctttaacagatagagaagaggttagataagcttaacaagagcgatacacaagtaaaagtgaaggaacaagcagagaaatcaggattggaaaaaattcagtaggcacttatggaaggaaagcctgcaagatcggtcgatttggctgagcatgagaaagaagttataaaacatctttatctgctaactatgaaacctgtcatttctgttgctaatgtaatagaatctgatcttgctgaacctgatatcaatcctcgtgtcaaagaggtggctaaagcagcatcatatttgcagtatggtatggttacaatactagctcagattgaaactgaactcgctgagctaccattggaagagagagtagagtatttaaaatctcttggtgttgctgaaagtggactaggaaatttggtaaaagcaacatataatctattggggttaagaacttatttcacaaccggagacaaggaaacaaaagctcagactattttttcaggcccttcttcctcacaattatttctactgtaatatttgaagaggtttttgtaatcattataactgcatgtgattctacatataggcgtgactgcgccacaagcagctggagttattcatagcgactttcagaaaggatttattagagttgaaactgtatcctacgatgattttgttgcagctggttttcttggagtagcaagggagaaaggactggtaaaaatactttatttg

SEQ ID NO: 101988 - DNA, 1379 bp, Zea Mays
atttgggtgtgggatcagaccgcgatgaccttgtactccctgtgcggctcgtcgacgttgctccagcactggcgatggagccgggcttgccgcgcctggtggttctcgtccgcccacggcccccgattagcatgagcctccgcgccagtatcattggtcttcctaatgttggcaagtcaaacctcttcaacgccattgttgtccgatgctttgaggatgacgatatagttcatgtcaatggaagggtcgagcccggatcagacattgatgtcattaacctagagctgatattttcagatctttaacaggtaatttggtcaacggatttcactttgtcttgctatcacgcatttcaaaagaaacttctttgctacctgtgtaataaccgtagatagagaagaggttagataagcttaacaagagcgatacacaagtaaaagtgaaggtaagacatacaaattctttcgttctgatgacctttttgttctatgtgctaattgattgcaccacttaggaacaagcagagaaatcaggattggaaaaaattcagtaggcacttatggaaggaaagcctgcaagatcggtcgatttggctgagcatgagaaagaagttataaaacatctttatctgctaactatgaaacctgtcatttctgttgctaatgtaatagaatctgatcttgctgaacctgatatcaatcctcgtgtcaaagaggtggctaaagcagcatcatatttgcagtatggtatggttacaatactagctcaggtttgttgtatacatcgaagtacaagaacctttgaagaaatttctgctaaataattttatattttttatgttgcctacccatatgtgtccacctatgctaacaaaatcatggaatgtataaaaagattgaaactgaactcgctgagctaccattggaagagagagtagagtatttaaaatctcttggtgttgctgaaagtggactaggaaatttggtaaaagcaacatataatctattggggttaagaacttatttcacaaccggagacaaggtgcatcatttgtgctgttaaagttttttccccgtcagttaaaagaaactgacagacctttaactgtgtccttttaggaaacaaaagctcagactattttttcaggcccttcttcctcacaattatttctactgtaatatttgaagaggtttttgtaatcattataactgcatgtgattctacatataggcgtgactgcgccacaagcagctggagttattcatagcgactttcagaaaggatttattagagttgaaactgtatcctacgatgattttgttgcagctggttttcttggagtagcaagggagaaaggactggtaaaaatactttatttg

SEQ ID NO: 101989 - DNA, 1305 bp, Zea Mays
ttcaaaaggtgaaaacacaaggtttcccggaagctgatctagtgatcttgaaacaactccgttaatggttggacagagaaaactgatcaagaccactttatcgctacctgcattgttttgatatagggggattcagcattgtgcttgtgcatatcaagtctcacaacaaaactgcaggggataccacctaacatcctacaattgctgaatcaagttttaccatagtacatgataaggcttgtgccaggaaactgcagctacggctgcaggttcagtctgctgaaccacaggtcaccttcttcggactactttatgactcaatgcggagacgctgaaatgagtgcgtcacttctccaggtcaagctcggattctgtgtcagtgcgaagccgcttggcctcccggtcacctaggtgaagcgacatggcgagttcttcctctgacggattgttcaggttcgcgatttgcctcggagcatcctggtcgtcgcgtacaggggacatgccgacaaagtttgagatgaactggcgctcttccacattgatcacagctgcctcatccccttccgtcgtcgccgaaacgtcgtgccgaggcagctgctcgattttgatccccagaggctcgaagatctccaccttttcttctggggcaggaacagctgctgtcgacgactccccaacagcagagttagctgcagccaccaacgcgagcctttgctgctgcacggcatctttatcgaggataaattctgtcagttatctgtcatggaacaaaaaacaacagaagcatacagactcgattttgtaatcataataagggactgttttgatcccacgagataaagcaaaagtgactaaagtttaggagctaaagatcccaacaggaagagctaaaagtgactacaataatcttttagtcgcttttatctcctaaagaggagctaaaatttagtcagtttgctttagcacttgggatccaaacagaccctaattctggacgctagtggattctccgatgtctaagtgatgcaaaaattgtgtaaaacacataactgaaaacaagggaaatgccgaacctttgagtgattcattggttatgataaggtcaagttcaagacgatccagaaggcggccaagatcaactccactggtccaattttcagggccatggtcacacctaagctttagcctcccacggtttgctgtgccaccccatattatcccaatgggacacggcttctcattatcctggccagtcaggataataaggcttccactatcaccttctagatcaaaagtttggcggtt

SEQ ID NO: 101990 - DNA, 992 bp, Zea Mays
gcagcagcgtgctgaggagctggaactacaagtagcagctcttaaacaacagctccaagaagctgagatccattataagcaaaaggaagaacaagtttctctaagggaggttcaatgggaagcggatcaaaatcattccctggatgagcttaacgctcagcgtcagtatgccacggacttggagaaacaaatcgaagatctgacacagaagttaacatcagctgatgcacactacaagcagaaggtgacagaagagagggacaaacttgccgaggtcaccaaagagttgagcgagttgaaacaaaaagtaagcgagagtgttgaattggagaggaaggtgcaggaccttgagcagaagctgcagctagcttattccaagtctgacgaacaggcagtggatactgtggagtcgagatcccgtgaattcagcctggattcatcaacgagttcaggcaagcagcaagacaaaactcaggctgtctcaccaaacccaaccctgcaaggagtgcaagaaccttccggcatcatggccttcaagttcatcctgggagttgccctgctgtctgtcctaatcggcgtgtttcttgggaagcggtactagcgctcaggtcgtgctgaaagggctcagccagcggcaagtttgaaaggattggtggccttgatggtaatggttcgacgacttcctgggagaagggctcatcggcgtgtttctttttgccgtaattttcacttttcgggtaagggtaggggggccaaggaatttgatttttgatcattcctaccctttcatgcaaatggccaactgcatgcgactggttttgcctacagcaagtttccgtatacatttcttgtccgtaaagatcacaagtccagcgacgaaacatgaagcatttgctactatatgtctgtctatatgctcgtatggagagagtgcaagttttgctaccttgtacagattccaccaatccagtgcttttgatgattcagattct

SEQ ID NO: 101991 - DNA, 3152 bp, Zea Mays
agcagcagcagctaccgcatcccttgccatggcgccaagctccccgtcatccgctaggcccacgcgcgcctccggccggaagcgctccgccatggccgaggagatccaccagaaccaggaggaggaggaggaggttgtggctgcgtccaccgccaagcgcagacgcaaggcggcgtcttccgggaagaagcccaagccgacgcccaagcaggccaaaccggccgtggcggggatgaagaagaagggggagaccgagaagacggagcccgttgtggacgacgtgtgcgccgaggagcccgacgaggaggagttggccatgggcgaggaggaggcggaggccgaggagcaggccatgcaggaggtggtggccgcggtcgcggccgggtcgcccggtaagaagagggtggggagaaggagcgccgccgcctcgggcgaccacgtgcccgagttcatcggcagccccgttgctgcggccgaggcgcacagcaactggcccaagcgctacgagcgcagcactgccgcaaataaaccggaggaggacgatgagctcaaggccaggtgccactaccggagcgctaaggtggacaacattgtctactgcctcggggatgacgtttatgtcaaggctggagaaaatgaggctgattacattggtcgcattactgaattttttgagggcactgatcgatgccactattttacttgccgttggtttttccgtgcagaggacacggtcatcaattcgttggtgtcgattaatgttgatggccacaagcatgaccctagacgtgtttttctttccgaggaaaagaatgacaatgtgcttgattgcatcatctccaaggtcaagatagtccatgttgatccaaatatggatccaaaagctaaggcccaactgatagaacattgtgacctatactatgacatgtcttactctgttgcatattctacatttgctaatatctcatcagaaaatgggcagtcaggcagtgaaaccgcttcgggtatttcttctgatgatgcgggtttggagacgtcatctaatatgccagagaggacagcaacccttcttgacttgtattcgggctgtgggggcatgtccactggtctttgcttgggtgctgctctttctggcctgaaacttgaaactcgatgggctgttgatcttaacagttttgcgtgccaaagtttaaaatacaatcatccacagactgaggtgcgaaatgagaaagctgatgagtttcttgctctccttaaggaatgggcagtcttatgtgaaaaatatgttcatcaagacgtggattcgaatttagcaggttcagaggatcaagaggatgctgacactcttgacaaggatgaatttgttgtacagaagcttattggaatacgctatgatggcactggaaggaaaaaaggcgtatattttaaggtccaatgggaaggatatggtcctgaagaggatacatgggaacctattgataacctgagtgactgtccgctgaaaattagagaatttgtacaagaagggcgcaaaagaaaaattctcccgcttcctggtgatgttgatgtcatttgtggaggcccaccatgtcaaggtataagtgggtttaatcggttcaggaaccgtgatgagccacttaaagatgagaaaaacaagcaaatggtgactttcatggatattgtggcatacttgaagcccaagtatgttctcatggaaaatgtcgtggacatactgaaatttgctgatggctacctaggaaaatatgctttgagctgcctagttgctatgaagtaccaagcacgccttggaatgatggtggcaggctgctatggtctgccacagttcaggatgcgtgtgttcctctggggtgctctttcttccatggtgctccctaagtatcctctgcctacatatgacgttgtagtacgtggaggagcacctaatgccttttcgcaatgtatggttgcatatgatgagacacaaaggccatccctgaagaaagctttgcttcttggtgatgcattttcagatttaccaaaggtcgaaaaccatcaacctaacgatgtaatggagtatggtggttcccccaagacagagttccagcgctacattcgacttggtcgtaaagacatgttggattggtcgtttggtgaggaggctggtccagatgaaggcaagctcttggatcaccagcccttacggcttaacaatgatgattatgagcgggttaagcaaattcctgtcaagaagggagccaacttccgtgacctaaagggtgtcaaggttggagcaaataatgttgttgagtgggatccagaagtcgaacgtgtgtacctttcgtctgggaaaccactggttcctgactatgcgatgtcattcatcaagggcaaatcactcaagccattcgggcgcctgtggtgggacgagacggttcctacagttgtgaccagagcagagcctcataaccaggttatattgcatccgactcaagcaagagtcttgactatccgggagaacgcaaggttacagggcttccccgattactaccgattgtttggaccgatcaaggagaagtatattcaagtcgggaacgcagtggcagtccctgttgcacgggcactgggctactgtctgggtcaagcctacctgggtgaatctgacgggagtcagcctctgtaccagctgcctgcaagttttacctctgtggggcgaaccgcggttcaggcgaatgccgtttctgttggcactcctgcgggggaggtagtcgagcagtaaaaggatagcggagcaaccctggttggtattttgattcgagcccatccagtagcatgtttaccaataaataatcattggtcgtgctgattcttatggttggagatgaatgtatgtagggtgtactcgagctcgagtgcttgttgtactgtaggttgaggtttctcatccattggcctgcctatttgtggatgacgtttcatttcagattagcaatgtgcttatttaaggtttcgtcatgtacctgtattctacaatccactattgtttccaaagacagcatttgatccttgttcaacgcgagcagattttcgtccaccaaagctgtgtagggatcgaaatgtcaacaatgaattgagtcattcaatcatttgtctaa

SEQ ID NO: 101992 - DNA, 3005 bp, Zea Mays
gtcttccttctcctcgcgcagctctcgtgcttcgccttttcggagacggtcgtggcgccagcggcgttaaaattcgatttccggcgagcttgtcggaggaaaagttggttttttttttggttgggattgctcgtggctacaggaaaccgtggcccatttctgcttcttgatttcggtccgtgctgttagtttggcgtgatttttggccactaaactgttggaccgaagattccattttcgtttcttgcaaacaccaaagcggtgctagtggggagatttggctacaaggcttggtgtttgcaaacaccaagaagtcaagaaccgaatgcaccggcgctggtgacgagattcgaatccattttgagtgtgagatcaagcacctgtgaactctgaataccggttctaaagacaagattttccattcgaggaactgtcgctgaggggagatgagctcaatggcatcgctgtcagaaagtgagctgacaaaccggggaagcatgtgggagctagatcagaaccttgatcaacccatggatgaggaggcaggcaggctgaagaatatgtacagagaaaagaagttctcatcagctttgttactacggttggcatttcagagccttggggtggtctttggtgacttgggcacgtcacctttatatgtgttctataatatatttcctcgtggaataggtgagggtgaggatgaggatgttattggagctctttccttgattatttacaccctcactttcataccgcttctgaagtacgtttttgttgtcttgagggcaaatgacaacggtcaaggcggtacatttgctctttattccctgttatgccgtcatgcaaagatcaacaccatacctaatcaacacaggaccgatgaggaattaacgacgtatagccggcaaacatatgaagagaattcagttgcagcaaaaataaagagatggatagagtcacatgcatataagagaaacattcttcttgttcttgttttaattggtacttgtacagcaattggagatggaatccttacgcctgctatatctgttctttctgcatcaggtggcattagggtccagaatcagaatatgagcaccgatgttgttgtgctcgtcgccgtggtcatcttaattggattatttagcatgcaacactatggaacagataaagtgggactgctctttgcaccgatagttctcctatggttcatcttaattggaagcgtcggagctataaacatacacaagtataataactctgtgctaagagcatacaacccgatatctatataccgttttttccaacggagaagaaattatgacatatggacgtctcttggaggaatcatgcttagcatcacgggaaccgaagcgttatttgctgatctctgtcactttcctgtattggcaattcagattgctttcaccttgattgtgtttccatgccttctactggcgtacacaggacaggctgcctacataatttccaacaaaacacatgtggctgacgccttctatcgatcaattccagatgccatatactggcccgcctttgtcatagcaactgctgcagcaattgttgcaagtcaagctaccatatctgcaacctactcaatcataaagcaagctcttgcacttggttgcttcccccgcgtgaagatagtccacacctcgaagaaattccttgggcagatttacatgcctgacatcaattggatccttctggttctctgcattgccgtgactgcaggattcaagaaccagagccagataggaaatgcatatggtactgctgtggttatagtgatgctagttaccacattcctgatggtgccaataatgctgctggtatggaagagccactggatcctcgtggtgaccttcatcgtgctgtcgctcatggtggaggttccctacttcgtggcctgcatactgaagatcgaccagggtggctgggtcccactcgtcgtggcgacggccttcttcctcatcatgtacgtgtggcacttctgcacggtgaagcggtacgagttcgagatgcacagcaaggtgtccatggcgtggatcctggggctgggcccgagcctgggcctggtgagggtcccagggatcggcttcgtgtacacggagctggcgagcggcgtgccgcacatcttctcccacttcatcaccaacctccccgcgatccactcggtggtggtgttcgtctgcgtcaagtacctccccgtgtacaccgtgccgacggaggagcggttcctggtgcggaggatcgggcccaggagcttccacatgttccggtgcgtggcgaggtacgggtacaaggacctgcacaagagggacgaggacttcgagaaggtgctgttcgactgcgtcctcttcttcgtccggctggagagcatgatggagggctactccgactcggatgagttcagcgtgccggagcaggcgcccggcatcggccgcgcggcgttcttgagcgtgggcgagcggacctgcgcgactgtgtgctccagcggtgatctgagcttctcgtcacaggactcggtcgtgcccgccgccgcgcagtcgtcccgagcgccgacggggctgcgggtgctgcactactcggcgtcggcgtcggcggcggggcagggcagcagcggcggaacggtgggcgacgagctggagttcctgaaccggtgcaaggacgccggcgtggtgcacatcctcgggaacaccatcgtgcgcgcgcggcgggattcgggcgtcgtgaagaagctcgccgttgactacatgtacgctttcatgaggagggtgtgcagggagaacagcgtcatcttcaacgtgccccatgagagcctgctcaatgtcgggcagatattctacatctgaatatctgtctgatgagagatagatagccttgttcttcgtccttttgtgtcccgggtacggtaggatatgtacactattgtcttgtatcgtacacttgtacagaataaaacagtgagcttttagtggggc

SEQ ID NO: 101993 - DNA, 2249 bp, Zea Mays
attcccctcggtgcgccgccgccagtccgccccgccccgccccgcccagcagacagcgcagccatgccgctccacctccacctgctgtcgtccccggccaccgctgccaagctcgcggcaggtctgcgcgcggcgcctctccgccggtgccacagcttggccccggcgccgcgccacacggatcgcgtggcccttgcgtcgtccctctcggcggtggcgcggtctgctggccccgccgtggcagcggcgcagaccaagcccagcgtttcaggaaagaaacaagtattgatatcgttgtcggataaaacggacttggcttatcttggcaatggtcttcagggtttggggtattccatcgtttccactggtggaacagcatccagcctggaagcagcaggagtcagtgtaacaaaagttgaagaaatcacacatttccctgaaatgcttgatggacgagtgaaaacattgcacccaagtatacatggtggtattcttgccaggagagaccaggagcatcatttgaaggcactaaaagatcatggaattgggacatttgatgtggttgtggtgaatttgtatcccttttatgacaaagtcacctctggtaacatctcttttgaggatggcattgaaaatattgatattggtgggcccacgatgatcagagctgcagccaagaaccataaggatgttcttattgtggtggatcataatgattatcctgctttactggagtaccttaaaggaaagcgagacgatcagcagttccccaggatgttggcatggaaagccatgcagcatgtcgcctcttatgattctgcagtgtcagaatggttgtggaagcaatcaaataaaggagagatgttccccccaagctttactgtgccactggagctgaagtctacactccggtatggcgaaaatcctcatcagagtgctgcattctatgctgacaagagcctttctcttgttggtgctggtggtattgccactgctattcaacaccatggaaaggaaatgtcttacaacaactacttggatgcggatgctgcatggaactgtgtatcggagtttgatagtcctacttgtgttgtggtgaagcacacaaatccatgtggtgttgcctcacgaaaggacattcttgaagcttacaggttagctgtaaggggagatgctgtcagtgcatttggtgggatagttgcattcaacacgactattgacgaggatcttgcgaaggaaattcgtgagttcaggagtcctacagatggtgagacgcggatgttctatgagatagtggttgctcccggctatacggagaagggtcttgaggttctcagaggcaagtccaaggcactgaggatactcgaggcgaagagaagtggaaaagggatgctttcacttaggcaggtgagtggtgggtggttagctcaggagtctgatgatctaacccctgaagagatcacctttaccacaaagtctgagaggtctccgcaagaaaacgagcttgccgatgccaaatttgcctggctttgcgcaaaacatgtcaagagcaatgcgattgtgatagccaagaacaactgcatgctgggaatgggcagtggtcagccgaacaggcgagagagcgtccgaatcgccttcaggaaggcaggagaggaggccaagggagctgcattggccagcgacgccttctttccttttgcctggaatgatgccgtcgaggaggcgtgccagaacggcatcggcatcatcgcccagccaggaggcagtaagaaggacgaggacgccgtcgcgtgctgcaacaagtatggtgtgtcgctcgtcctcaccggcgtcaggcacttcaagcattagccgtcatgccccatggctggtcatcttagcttagggagttacggaaaaaaaacaaagcttcggaggctgcagcttgtggagctgccctgatgtttagctttctgcaaagtgcaaaaactgcaaattttggtttctgtaaggcgtaggctttgctgggtgagctcgtggggaaggtaatgtttctcctggagtcgaataagctgatgggtgtaccgcgagtgacaattgaacccaacctaaggactttcaggttggtacttttttctgtcacaaaatcagccgtgcgcctatgcaccaggagaaacatcgatgtgacctacacctcaacggccatcgatgtgacctacaatctttggactacaaaccattgaaaaataaaaagagaaaaggtgcctggg

SEQ ID NO: 101994 - DNA, 79 bp, Zea Mays
caggggagttttttcacaactgaagaagcgcggagacggcacaagctgtatgatgaacttgcctctggtgggaaatgtc

SEQ ID NO: 101995 - DNA, 2219 bp, Zea Mays
acagggatcacgccaggtatataaacacgcaagtggcccacccaccggcgacggcttcgatccgagaacaatccgtcgtccgagttggcatctttggccagaccagtatcattgcccaatcacggatctctcggatctctccctcctctttctaatctctctctctctctctctcacacacacatttcccactacctgctcctgcttcttgcctgttcggtgtgcgctgcgcgaggtgaggagcggagcagggaggtgaaggggatgaaggaggagatgatggtcggcctgtcggcgccggagccggtggggaggtggggcgccgcgccgccgcaggcgatgctggagaggatgaaggactacggccaggagggcgccttcgcgctctgggacgatctctcgcccgaggaccaggagctcctcgtccgggacatcgagagcctagacctctcaaggatcgatcggatcatccggcgctcccttggatcacaaggcatcccattgcctgctgtcgagcccgtgccggaatctagtgtctccaaggtggagggcaggtctgcagaggacaaagaaagatggtggaagaaggggttgaaagccatctcggaggggaagctggccgttgtccttttggccggtggtcagggtactcgactgggaagctcagatcctaagggatgtttcaatatcggacttccatcaggaaagtcacttttccagctccaagctgaaaggattctgtgcgttcaaaagctggctgctcaatctagcgaaagcccgagtaacactgtgccgatccactggtacataatgacaagcccctttacagatgctgccaccgccaaattctttgaaacccgtagatattttggcttagaccctgaccaagtgacatttttccaacaaggcacacttccatgcgtttctgccgatggtagatttattatggagacaccatatagggtagcaaaggctcctgatggcaacggtggagtttatgctgcactgaagtccaagaagttgatggaagatatggccgcgcggggtgtgaaatacgtagattgctacggagttgacaacgcgctggttcgagttgcagatcctacgttcttagggtacttcattgacaagggcgcatcttctgccgccaaagtggttaggaaggcttatccgcaagagaacgttggggtgttcgttcaacgaggccgtggtggaccgctctcggtggttgagtacagcgaaatggatgcggctatggctaccgaaatgaatcagtcgacagggcgactccgttactgttggagcaacatctgcctgcacatgttcactctggacttcttgaaccaagtggcaaacagccttgagaaggacagtgtataccatctagctgagaagaagatcccttccatccatgggttcacgacgggcctgaagcttgaacagtttatattcgacgccttcacatactccccgtccacggcacttttcgaggtcatgcgggaggaggaattcgcgccggtaaagaacgccagcggcgcaacgtatgacacccctgatagcgcgaagctcatgctgctccgcctccacagcagatgggtagtcgctgctggcggcttcttgacgcactctgtgcccttgtatatgacaggcgtcgaagtttctccgctctcctcctacgccggagagaacctggaagccatctgccgtgggcgaacgttccatgcgccgagcgagatctcgttttaggaggtagacctgttcatgggactggagtagcagttgtgtgatcatctgtaaaacgagcgtaaaggatgggcaggctgttgtgtactgcgtgttgtagatgtaacatctcggacggacaccaaattcatctcgagttttctctccatctctgtgttgctcccccgtaggctgtagatcgtttcgacatttgagtcaccctattaaaaacagaaagaccgttcgtccaatttaatttgctaggctgaccagcaagttgaaacaagtcatacgagaggattgcagattggcaggtacaaatgatgaagaaccgtaaagcttcgttctcccatttcagcacatgatagtgttgacgtatgatcttaaacacagcgagaaacataacgaatcggtaaaactaatacaaggatcggccaaatcaacattgacccaattcttcgtcagtaagctctcgaatactactttctagaaagacc

SEQ ID NO: 101996 - DNA, 1841 bp, Zea Mays
gatctctccctcctctttctaatctctctctctctctctctcacacacacatttcccactacctgctcctgcttcttgcctgttcggtgtgcgctgcgcgaggtgaggagcggagcagggaggtgaaggggatgaaggaggagatgatggtcggcctgtcggcgccggagccggtggggaggtggggcgccgcgccgccgcaggcgatgctggagaggatgaaggactacggccaggagggcgccttcgcgctctgggacgatctctcgcccgaggaccaggagctcctcgtccgggacatcgagagcctagacctctcaaggatcgatcggatcatccggcgctcccttggatcacaaggcatcccattgcctgctgtcgagcccgtgccggaatctagtgtctccaaggtggagggcaggtctgcagaggacaaagaaagatggtggaagaaggggttgaaagccatctcggaggggaagctggccgttgtccttttggccggtggtcagggtactcgactgggaagctcagatcctaagggatgtttcaatatcggacttccatcaggaaagtcacttttccagctccaagctgaaaggattctgtgcgttcaaaagctggctgctcaatctagcgaaagcccgagtaacactgtgccgatccactggtacataatgacaagcccctttacagatgctgccaccgccaaattctttgaaacccgtagatattttggcttagaccctgaccaagtgacatttttccaacaaggcacacttccatgcgtttctgccgatggtagatttattatggagacaccatatagggtagcaaaggctcctgatggcaacggtggagtttatgctgcactgaagtccaagaagttgatggaagatatggccgcgcggggtgtgaaatacgtagattgctacggagttgacaacgcgctggttcgagttgcagatcctacgttcttagggtacttcattgacaagggcgcatcttctgccgccaaagtggttaggaaggcttatccgcaagagaacgttggggtgttcgttcaacgaggccgtggtggaccgctctcggtggttgagtacagcgaaatggatgcggctatggctaccgaaatgaatcagtcgacagggcgactccgttactgttggagcaacgtatggttctatccttcgcttctcgttctctttcgccctccctccatccaaaaactgttctctccttttttttttttttgtagatctgcctgcacatgttcactctggacttcttgaaccaagtggcaaacagccttgagaaggacagtgtataccatctagctgagaagaagatcccttccatccatgggttcacgacgggcctgaagcttgaacagtttatattcgacgccttcacatactccccgtccacggcacttttcgaggtcatgcgggaggaggaattcgcgccggtaaagaacgccagcggcgcaacgtatgacacccctgatagcgcgaagctcatgctgctccgcctccacagcagatgggtagtcgctgctggcggcttcttgacgcactctgtgcccttgtatatgacaggcgtcgaagtttctccgctctcctcctacgccggagagaacctggaagccatctgccgtgggcgaacgttccatgcgccgagcgagatctcgttttaggaggtagacctgttcatgggactggagtagcagttgtgtgatcatctgtaaaacgagcgtaaaggatgggcaggctgttgtgtactgcgtgttgtagatgtaacatctcggacggacaccaaattcatctcgagttttctctcca

SEQ ID NO: 101997 - DNA, 1970 bp, Zea Mays
atgaaggaggagatgatggtcggcctgtcggcgccggagccggtggggaggtggggcgccgcgccgccgcaggcgatgctggagaggatgaaggactacggccaggagggcgccttcgcgctctgggacgatctctcgcccgaggaccaggagctcctcgtccgggacatcgagctgggtatcctcagacagagttatgtggtgttcatcccaatcacaggcatcccattgcctgctgtcgagcccgtgccggaatctagtgtctccaaggtggagggcaggtctgcagaggacaaagaaagatggtggaagaaggggttgaaagccatctcggaggggaagctggccgttgtccttttggccggtggtcagggtactcgactgggaagctcagatcctaagggatgtttcaatatcggacttccatcaggaaagtcacttttccagctccaagctgaaaggattctgtgcgttcaaaagctggctgctcaatctagcgaaagcccgagtaacactgtgccgatccactggtacataatgacaagcccctttacagatgctgccaccgccaaattctttgaaacccgtagatattttggcttagaccctgaccaagtgacatttttccaacaaggcacacttccatgcgtttctgccgatggtagatttattatggagacaccatatagggtagcaaaggctcctgatggcaacggtggagtttatgctgcactgaagtccaagaagttgatggaagatatggccgcgcggggtgtgaaatacgtagattgctacggagttgacaacgcgctggttcgagttgcagatcctacgttcttagggtacttcattgacaagggcgcatcttctgccgccaaagtggttaggaagccgattgaacactcaacacaacaggcttatccgcaagagaacgttggggtgttcgttcaacgaggccgtggtggaccgctctcggtggttgagtacagcgaaatggatgcggctatggctaccgaaatgaatcagtcgacagggcgactccgttactgttggagcaacatctgcctgcacatgttcactctggacttcttgaaccaagtggcaaacagccttgagaaggacagtgtataccatctagctgagaagaagatcccttccatccatgggttcacgacgggcctgaagcttgaacagtttatattcgacgccttcacatactccccgtccacggcacttttcgaggtcatgcgggaggaggaattcgcgccggtaaagaacgccagcggcgcaacgtatgacacccctgatagcgcgaagctcatgctgctccgcctccacagcagatgggtagtcgctgctggcggcttcttgacgcactctgtgcccttgtatatgacaggcgtcgaagtttctccgctctcctcctacgccggagagaacctggaagccatctgccgtgggcgaacgttccatgcgccgagcgagatctcgttttaggaggtagacctgttcatgggactggagtagcagttgtgtgatcatctgtaaaacgagcgtaaaggatgggcaggctgttgtgtactgcgtgttgtagatgtaacatctcggacggacaccaaattcatctcgagttttctctccatctctgtgttgctcccccgtaggctgtagatcgtttcgacatttgagtcaccctattaaaaacagaaagaccgttcgtccaatttaatttgctaggctgaccagcaagttgaaacaagtcatacgagaggattgcagattggcaggtacaaatgatgaagaaccgtaaagcttcgttctcccatttcagcacatgatagtgttgacgtatgatcttaaacacagcgagaaacataacgaatcggtaaaactaatacaaggatcggccaaatcaacattgacccaattcttcgtcagtaagctctcgaatactactttctagaaagacc

SEQ ID NO: 101998 - DNA, 1879 bp, Zea Mays
gctcgatctcatccgtccgctggtaagccataagccaaagaccacaatagatctcgtctccctccgttcccctcctgtccgtcattttctcgtcacctacatatctccggctcgccgtcggcgtcgccgcctcctcctccttcgcccgctggaggcgcccatagcgacctcaccggtgggtttgctgaagtgacatcggccgaggtggaactggttggggggagtccatttcgggttcgagcagcctgagccggcgcgccggcagcgacggagtcgtgcagttgagttgagatggcaaacattccccactccttcgcaggggcctcgcctccgtccccctctccgatggctggcagcagcagcggccccgccccgggccaggcagccaaggacaagaagatggcgtccgcggaacagctggtcctggaactctgcgaccctgaactgcgcgagaacgctttacttgagctctccaagaaaagggagatttttcaagatcttgctccgctgctttggcactcatttggcacaattgctgcgttactccaggagattatatccatttacccgtcactatcaccccccacactgtcacctggagcatcaaaccgagtttgcaatgctcttgcacttctgcagtgtgttgcatcgcaccctgagaccaggatccttttcctaaatgctcatattccattgtacctgtaccctttcctcaacactaccagcaaaacgagaccttttgagtacctaaggcttactagcttgggggtcattggtgctcttgtcaaggttgatgatactgaagtcatcagttttttgctgcaaactgaaataattcctctgtgcttgcgaaccatggagatgggtagtgagctatccaaaactgtggcaactttcatcgtccaaaagattcttctagatgatgttgggctgcgctacatttgcgccactgctgagcgtttctttgccgtaggcagtgttttagcaaacatggttgtttcacttgctgatcagccctccacaaggctgctgaagcacatcattcgttgttacctccggctgtcagataaccctagggcttgtgctgcattgcagagctgccttccagacatgctcaaagatgggaccttcaataactgccttagggatgatccagcgacaaggcgctggctccaacagctcctgcacaatgtgactggcggaggcatgggaggtgctcctcaaccaggaatggatcccatgaacatgggaatgtgatgtgcattctagttgttgcaattcactgcaataacacatcacctctcagtgaattacaactagagaagatctggccactgtccagatgaaacttagtatggtgtagcctgactttctgccggggtaaaaataggaatgttgtttggtattgccataagctaagctgtagaaacaagatcggcaggcttctgttattgtgttcttgcaccggagctcttgtgcgttgacccttcagaacctgagaacaaaggaggaaacccccgtcccgtgaagctttgtcgcagtgccgatcgatcaagatcttgaattgcttcagatgatgccataagaaagcatactgaaaagaagtgtatgccgtgtgctatattttacgagtttatgggttgcttttgtctttctagtggcgtcgtgtaacaaagtccgctgttcttaatttgttcaggtaacaattaattaatccagcaatattttttcccaggttaccgagcaatcaattaatcgctccagtaatatattcgtatgtcattgaaggggcatggttgggatgcatgaaatgaaatagtcaggaattgaatatgttcctcctagctggaactcaagttctcagcttggaacataaaaa

SEQ ID NO: 101999 - DNA, 1833 bp, Zea Mays
gctcgatctcatccgtccgctggtaagccataagccaaagaccacaatagatctcgtctccctccgttcccctcctgtccgtcattttctcgtcacctacatatctccggctcgccgtcggcgtcgccgcctcctcctccttcgcccgctggaggcgcccatagcgacctcaccggtgggtttgctgaagtgacatcggccgaggtggaactggttggggggagtccatttcgggttcgagcagcctgagccggcgcgccggcagcgacggaggggcctcgcctccgtccccctctccgatggctggcagcagcagcggccccgccccgggccaggcagccaaggacaagaagatggcgtccgcggaacagctggtcctggaactctgcgaccctgaactgcgcgagaacgctttacttgagctctccaagaaaagggagatttttcaagatcttgctccgctgctttggcactcatttggcacaattgctgcgttactccaggagattatatccatttacccgtcactatcaccccccacactgtcacctggagcatcaaaccgagtttgcaatgctcttgcacttctgcagtgtgttgcatcgcaccctgagaccaggatccttttcctaaatgctcatattccattgtacctgtaccctttcctcaacactaccagcaaaacgagaccttttgagtacctaaggcttactagcttgggggtcattggtgctcttgtcaaggttgatgatactgaagtcatcagttttttgctgcaaactgaaataattcctctgtgcttgcgaaccatggagatgggtagtgagctatccaaaactgtggcaactttcatcgtccaaaagattcttctagatgatgttgggctgcgctacatttgcgccactgctgagcgtttctttgccgtaggcagtgttttagcaaacatggttgtttcacttgctgatcagccctccacaaggctgctgaagcacatcattcgttgttacctccggctgtcagataaccctagggcttgtgctgcattgcagagctgccttccagacatgctcaaagatgggaccttcaataactgccttagggatgatccagcgacaaggcgctggctccaacagctcctgcacaatgtgactggcggaggcatgggaggtgctcctcaaccaggaatggatcccatgaacatgggaatgtgatgtgcattctagttgttgcaattcactgcaataacacatcacctctcagtgaattacaactagagaagatctggccactgtccagatgaaacttagtatggtgtagcctgactttctgccggggtaaaaataggaatgttgtttggtattgccataagctaagctgtagaaacaagatcggcaggcttctgttattgtgttcttgcaccggagctcttgtgcgttgacccttcagaacctgagaacaaaggaggaaacccccgtcccgtgaagctttgtcgcagtgccgatcgatcaagatcttgaattgcttcagatgatgccataagaaagcatactgaaaagaagtgtatgccgtgtgctatattttacgagtttatgggttgcttttgtctttctagtggcgtcgtgtaacaaagtccgctgttcttaatttgttcaggtaacaattaattaatccagcaatattttttcccaggttaccgagcaatcaattaatcgctccagtaatatattcgtatgtcattgaaggggcatggttgggatgcatgaaatgaaatagtcaggaattgaatatgttcctcctagctggaactcaagttctcagcttggaacataaaaa

SEQ ID NO: 102000 - DNA, 1585 bp, Zea Mays
ctccgttcccctcctgtccgtcattttctcgtcacctacatatctccggctcgccgtcggcgtcgccgcctcctcctccttcgcccgctggaggcgcccatagcgacctcaccggtgggtttgctgaagtgacatcggccgaggtggaactggttggggggagtccatttcgggttcgagcagcctgagccggcgcgccggcagcgacggagtcgtgcagttgagttgagatggcaaacattccccactccttcgcaggggcctcgcctccgtccccctctccgatggctggcagcagcagcggccccgccccgggccaggcagccaaggacaagaagatggcgtccgcggaacagctggtcctggaactctgcgaccctgaactgcgcgagaacgctttacttgagctctccaagaaaagggagatttttcaagatcttgctccgctgctttggcactcatttggcacaattgctgcgttactccagtgtgttgcatcgcaccctgagaccaggatccttttcctaaatgctcatattccattgtacctgtaccctttcctcaacactaccagcaaaacgagaccttttgagtacctaaggcttactagcttgggggtcattggtgctcttgtcaaggttgatgatactgaagtcatcagttttttgctgcaaactgaaataattcctctgtgcttgcgaaccatggagatgggtagtgagctatccaaaactgtggcaactttcatcgtccaaaagattcttctagatgatgttgggctgcgctacatttgcgccactgctgagcgtttctttgccgtaggcagtgttttagcaaacatggttgtttcacttgctgatcagccctccacaaggctgctgaagcacatcattcgttgttacctccggctgtcagataaccctagggcttgtgctgcattgcagagctgccttccagacatgctcaaagatgggaccttcaataactgccttagggatgatccagcgacaaggcgctggctccaacagctcctgcacaatgtgactggcggaggcatgggaggtgctcctcaaccaggaatggatcccatgaacatgggaatgtgatgtgcattctagttgttgcaattcactgcaataacacatcacctctcagtgaattacaactagagaagatctggccactgtccagatgaaacttagtatggtgtagcctgactttctgccggggtaaaaataggaatgttgtttggtattgccataagctaagctgtagaaacaagatcggcaggcttctgttattgtgttcttgcaccggagctcttgtgcgttgacccttcagaacctgagaacaaaggaggaaacccccgtcccgtgaagctttgtcgcagtgccgatcgatcaagatcttgaattgcttcagatgatgccataagaaagcatactgaaaagaagtgtatgccgtgtgctatattttacgagtttatgggttgcttttgtctttctagtggcgtcgtgtaacaaagtccgctgttcttaatttgttcaggtaacaattaattaatccagcaatattttttcccagg

SEQ ID NO: 102001 - DNA, 1800 bp, Zea Mays
ctcctgtccgtcattttctcgtcacctacatatctccggctcgccgtcggcgtcgccgcctcctcctccttcgcccgctggaggcgcccatagcgacctcaccggtgggtttgctgaagtgacatcggccgaggtggaactggttggggggagtccatttcgggttcgagcagcctgagccggcgcgccggcagcgacggagttgagttgagatggcaaacattccccactccttcgcaggggcctcgcctccgtccccctctccgatggctggcagcagcagcggccccgccccgggccaggcagccaaggacaagaagatggcgtccgcggaacagctggtcctggaactctgcgaccctgaactgcgcgagaacgctttacttgagctctccaagaaaagggagatttttcaagatcttgctccgctgctttggcactcatttggcacaattgctgcgttactccaggagattatatccatttacccgtcactatcaccccccacactgtcacctggagcatcaaaccgagtttgcaatgctcttgcacttctgcagtgtgttgcatcgcaccctgagaccaggatccttttcctaaatgctcatattccattgtacctgtaccctttcctcaacactaccagcaaaacgagaccttttgagtacctaaggcttactagcttgggggtcattggtgctcttgtcaaggttgatgatactgaagtcatcagttttttgctgcaaactgaaataattcctctgtgcttgcgaaccatggagatgggtagtgagctatccaaaactgtggcaactttcatcgtccaaaagattcttctagatgatgttgggctgcgctacatttgcgccactgctgagcgtttctttgccgtaggcagtgttttagcaaacatggttgtttcacttgctgatcagccctccacaaggctgctgaagcacatcattcgttgttacctccggctgtcagataaccctagggcttgtgctgcattgcagagctgccttccagacatgctcaaagatgggaccttcaataactgccttagggatgatccagcgacaaggcgctggctccaacagctcctgcacaatgtgactggcggaggcatgggaggtgctcctcaaccaggaatggatcccatgaacatgggaatgtgatgtgcattctagttgttgcaattcactgcaataacacatcacctctcagtgaattacaactagagaagatctggccactgtccagatgaaacttagtatggtgtagcctgactttctgccggggtaaaaataggaatgttgtttggtattgccataagctaagctgtagaaacaagatcggcaggcttctgttattgtgttcttgcaccggagctcttgtgcgttgacccttcagaacctgagaacaaaggaggaaacccccgtcccgtgaagctttgtcgcagtgccgatcgatcaagatcttgaattgcttcagatgatgccataagaaagcatactgaaaagaagtgtatgccgtgtgctatattttacgagtttatgggttgcttttgtctttctagtggcgtcgtgtaacaaagtccgctgttcttaatttgttcaggtaacaattaattaatccagcaatattttttcccaggttaccgagcaatcaattaatcgctccagtaatatattcgtatgtcattgaaggggcatggttgggatgcatgaaatgaaatagtcaggaattgaatatgttcctcctagctggaactcaagttctcagcttggaacataaaaa

SEQ ID NO: 102002 - DNA, 1692 bp, Zea Mays
ctcctgtccgtcattttctcgtcacctacatatctccggctcgccgtcggcgtcgccgcctcctcctccttcgcccgctggaggcgcccatagcgacctcaccggtgggtttgctgaagtgacatcggccgaggtggaactggttggggggagtccatttcgggttcgagcagcctgagccggcgcgccggcagcgacggagttgagttgagatggcaaacattccccactccttcgcaggggcctcgcctccgtccccctctccgatggctggcagcagcagcggccccgccccgggccaggcagccaaggacaagaagatggcgtccgcggaacagctggtcctggaactctgcgaccctgaactgcgcgagaacgctttacttgagctctccaagaaaagggagatttttcaagatcttgctccgctgctttggcactcatttggcacaattgctgcgttactccaggagattatatccatttacccgtcactatcaccccccacactgtcacctggagcatcaaaccgagtttgcaatgctcttgcacttctgcagtgtgttgcatcgcaccctgagaccaggatccttttcctaaatgctcatattccattgtacctgtaccctttcctcaacactaccagcaaaacgagaccttttgagtacctaaggcttactagcttgggggtcattggtgctcttgtcaaggttgatgatactgaagtcatcagttttttgctgcaaactgaaataattcctctgtgcttgcgaaccatggagatgggtagtgagctatccaaaactgtggcaactttcatcgtccaaaagattcttctagatgatgttgggctgcgctacatttgcgccactgctgagcgtttctttgccgtaggcagtgttttagcaaacatggttgtttcacttgctgatcagccctccacaaggctgctgaagcacatcattcgttgttacctccggctgtcagataaccctagggcttgtgctgcattgcagagctgccttccagacatgctcaaagatgggaccttcaataactgccttagggatgatccagcgacaaggcgctggctccaacagctcctgcacaatgtgactggcggaggcatgggaggtgctcctcaaccaggaatggatcccatgaacatgggaatgtgatgtgcattctagttgttgcaattcactgcaataacacatcacctctcagtgaattacaactagagaagatctggccactgtccagatgaaacttagtatggtgtagcctgactttctgccggggtaaaaataggaatgttgtttggtattgccataagctaagctgtagaaacaagatcggcaggcttctgttattgtgttcttgcaccggagctcttgtgcgttgacccttcagaacctgagaacaaaggaggaaacccccgtcccgtgaagctttgtcgcagtgccgatcgatcaagatcttgaattgcttcagatgatgccataagaaagcatactgaaaagaagtgtatgccgtgtgctatattttacgagtttatgggttgcttttgtctttctagtggcgtcgtgtaacaaagtccgctgttcttaatttgttcaggtaacaattaattaatccagcaatattttttcccaggttaccaataataatataaaaatatattctataaaa

SEQ ID NO: 102003 - DNA, 1404 bp, Zea Mays
actcagaacaacaatctttcccacaggcttcgctgcagctttgagagccactcaaatcccctcccccttctctacacacacgacgaacgcaagctcccaataacgcatccccattggatttgaaagcttctacatgggacaccgagcctcgtagacgaagcagaggaaaccagcgaaatcgaagagcaaggaagcaagaagcagggcgccatggcgttcctccttcccaagctcacaacgccgtcctgcaagttgcccccaagtcccctcctcaagccccagctcgctcagccggtccacggcggcggcaagattcaaggctccgtcttcggctctgttgcggcgcaggtcgcggccccgggccacctcagtctcctgctcctgctcagcgcctcgcagcaggcagccgccccggcggccaaatccacggcgaccaagaaccggaccaagggcggcggggatccgcaaaggtcggatttttacctcaacctcgggacggcggtgcgcacgctgcgggacgacctgcccgacgtcttcgtccgggaacccaactacgatatctaccgtgaagacatcacatttgtcgacccactaaacacttttcatgggattgacaactacaagactatcttctgggcgcttagattccacgggcgcctactattcagagaaattgggcttgatgtatcacgcatttggcaactgacagagaattcaatagttgtccggtgggagctgtggggcactccacgtgttccatgggaatcgtatggctgcttcagtgggacgtcgagatacaaggttgacaggaacgggaaaatttacgagcacaaagtcgacaacttggcattggacttcccacgatcagtagcgaaagtgggcagcattgctgacatggtagtcgccacaccgagccccaatttaacgttctggaacgtggttgggacaggtgatggttgctcatggacaaagctgtatgaagccgtgctggaagctgtggaacgggaagagcatagttccacaggcattggcgttggagctctaggccctgttggctgcggatgtggctgcagtttttgaactggaaaactactgtagcttgaactgctgcagccagttcaagcgaagagggcccttaatcactagttcataggatggaatgagctccgggactagttgcttggtagtagttcttaggggaaatgtatagaagaatatatatatatatatgggcacatgaatcacgataccactaatatttctctgtatactgtagctataggacagcaaatttagataaaacacatactaggtggctacatttgattacccttgtgaccttgtctcatacagtcatactgaggtagtgctttcactgctttcatatgcgatacatggattttg

SEQ ID NO: 102004 - DNA, 1490 bp, Zea Mays
tcctatataaagcacaaaccatatgcctctctcatcgcaactcatactagaacatacagcatttcacaagacacaacataagcaatagccatgggagctgtgaagcatacattgaaaatgctttcatggctcctactcttcgcacaattggctgcggccaccacctccaagtgcacaaatgccacaaatgggactgagactgacagcctgggtgcaatgaaactgaagctgattgccattgcatccatcctcacagctggagcagctggtgtgctagtgccagtacttggccgctccatggccgcgctacatcctgatggtgacatttttttcgctgtcaaggcatttgcagccggtgtcatcctggccacgggcatggtccacattctgccagcagcatttgatgggctgacatccccatgcctctacaaaggtggcagtggtgggaacattttcccctttgcaggactcattgcaatgtctgctgcaatggccactatggtgatagactcactagctgctgggtactaccgccggtctcacttcaagaaggcacggccaatcgacatcctagagatccatgaacaaccaggagatgaggaaaggtctgggcatgcacaacatgtgcatgtgcacacccatgcaacacatgggcattcacacggagaggtggatgtcatcagttcaccagaggaggcttcaatagctgacacgatccggcacagggtggtatctcaggtccttgagctcggaattttggtgcattcagtgataattggggtgtccttaggtgcatctgtgaggtcatcgaccataaggcctcttgttggtgcccttagcttccatcaattctttgaaggcattggcctgggtggttgcattgtgcaggcaaatttcaagttgagggctaccgtcatgatggcaatttttttctccctgactgcacccattggcattgcattagggattggaatttcatcaagctacaatggccatagcactacagcgttcattgttgaaggagtgttcaactcagcctcagcaggaattttgatctacatgtcattagtcgatcttctggccacagatttcaataagcccaaactgcagacgaatacaaagcttcagctgatgacatatcttgcacttttcttaggtgcagggatgatgtccatgcttgctatatgggcatagattttcagaccatcaaaggatggctagagttgaagaaataagtttatttgtccaagagttctccattttctcaaacaagatgcccttggtgaagggttcatcatattaatccacgagttctccatcttccgtacgatatagcctcagatagtccttttgtacttcataatgtgagattacatgatttgtcatttgttggcatagtccattatcctaaagctatgatagtcattagctgtggttcatgtgctgaacattcagtcataaagacagagctaagccaattctatcataca

SEQ ID NO: 102005 - DNA, 97 bp, Zea Mays
gcctattaggctattgaataaaatcatgcagcatttttcaacaaaatcccatctatcctacaataaagaatacatggaaggttgctataggtcaaaa

SEQ ID NO: 102006 - DNA, 3385 bp, Zea Mays
caaccagcagtagttctgatgagtatcctgactaaaacaacattgaacagagtttccaaatcaaataggtacaaaaggttcaacttcatattgctccatagccataactgtcaagatttacagcaaaatcataaattgtgaaaggttgcggtccttgtgatggtgtggcataactattcctcctaaataacatgcacttaacatacacgagacctaagccaacatgctacagcttactcgacctttcccttccccttggaatcatcactcactcgagaggatgttggctggttgatactcgctttggctttctccaggaaggtgggatctggctgtggctcttggtgtggagtctccttcatcgccatgaatatgtaaaagccgatcactagattaactgatatgacagccaggaacccactggcaagtgtctgcgccgaggatgacatctgactcacctggaaacacctggtagtaaaacccatacatgatcgcaacaggggccatccacatcaccatggatgtaaccgcgaactttgtgatcactcctgacattgcttctcctgactgggatgcgacaaaagatgaagtcagttcaatttccgattggatctccgctcgacgctgggcctgcagaggtgagggcagcaacggctcgaatcccggaagaactccttccgggcggctagtagagtgtggtcactggccggatgagattcgacgccgagagatagaagaagcgacgagaggagaggagcggtggctgcggagtcgtcgacgtcgattggatcggaacccaccacgacggggaaagagacgcagactggatcactggaccacaacagtaggccgtctcgaatgggccaaaatttctgtttgggctacctcgctcattctgtcattcatgggatgggaggatcctttgcaatctggaccgttgaatcgcgcttgccgttgccgaatgtccacctccacctgatggcagcggcgaccaaaccaccgagtgagacagggagaagagatgctgctccgcgttggcctcgcgcgcagcgcccgccttcgcggcggcggtggcggcgtctccctctccttagccatagcgcggcatctctccttcgagtcgccgccaccagtgcccccgtcccggcccgaccccgagtggacggacacggtggactacctggacgagtcgggcgcgctgctctcctcggcgcgcggggcgcggccggccgtgccgggcgccgaccccaccatcctatccggcgcctccgcgcacccgctcccgcgccccgcagcggcggcccgcctcgcggcgctcgcgctccggcaccgatcgggcgcgactctctccgccgcgctctccgcactgccctccccgccagaccccgcgctgctcctcctcgcggccgcctcgctcccggcttccgaccccgtcccgctcatctcccttgtcgcatgggcgcgcctccagccgtggttcgtcccctccgacgacctctcctcgctcctcgccgcgcgtctcccgccggcaactcactcctccgaactcctcgcgctcttcgacgacaccctcgggctctccgacctcgccaccttccccaagaccttcaacgccgtcgtctccgcgctcgccacccacggccttctcgagccggccttctactgcttcaagcgcctccgcgacgtcagcttcaggggcctcgagacgcccgcctacaacgccctcctctctctgttgctcaccagggggcttgcattcaaggccttcgaagtgctcgacgaaatggcgacctcgggctgcgccctcgacgagggcacataccagctcgcggtgcctgcgctggcgcgcgccgggaggatcgacgccgcccgcaagatgttcgatgaaatgaagcaaagggagggaattgggcgggcgccggtgggcgtgtattcggtgatggtggacgtgctggccaaggcagggaggcttgatgcggccatgggaatgtacagagagatggtggtggtcgggcatcgggtaagcacagcagtgagcaccgccatggtggaggcactggtgagatctgggaagctggatgctgggatggagctttgggaggagatgaggaggggagggctccgaccaagctttggcttgtacacgatggtggtcgaggccaatgcacggtctggaaggttggacatggccgccaagttgttcggtgacatggagaagtctggctttttccctacgccggccacatatgcctgtctggtggaaatgcatgcctccgcagggcaggtggatgcagcaatgcggttgtatcactccatggcgaattcagggacaaggccagggcttagcacgtttacagcgttgctcacaatgctggcgaataagagtctgctggatttggctgcaaaggtgctgttggagatgaaggcgtcaggtttcccgatagaggtgaccgcaagtgacctgctgatgatctacatcaaggatgggtcaactgaccttgcactccggtggctacggttcatgggttcggctggcataaggaccaacaacttcatcattaggcagctgtttgagtcttgcatgaagacggggctgtatgactcagcgcggtcgttgcttgaggcttatgtcgctggggcagccaaggtggacttgattctctacacatccatcctcgcgcacttggtccggtgccaggacgagagcagcgagcgtacaatcatggacatcctgggcaccagcaagcacaaagcacatgacttcatgtgcgggctgttcactggtccggagcagcggaagcagcccgtgctctctttcgtgcgcgagttcttccagggcatcgactacgacaacgaggagagtgcagccaggtactttgtgaacgtcctgctcaactacctggtgctcatggggcagatgaaccgtgcccgctgtgtttggaaggtcgcctacgagaataagctgttcgccaaggcaatcgtttttgaccagcacatcgcctggtccctggatgtcaggagcttatccgtgggcgcagctctcgtggctaccgtgcacacactgcatcggttcaggaagcggatgctctactacggggttgtgccacggcgcatcaagctggtgactgggccgacactgaagatggtggtggcacaggtgctggcgtcgctggagtcgccgtttgaggtgagcaaagtcgtcttgcgggcacccggcgactcggtactggagtggtttaagaagccgattgtccagcagttcctcctgaacgagataccatccaaggccgacgtcttgatgcacaggctcaacgtgatgtttccaagttcggctccggaggtccggtccttgtccattccaagatcccttggcatgcctaggtga

SEQ ID NO: 102007 - DNA, 2449 bp, Zea Mays
gcggcgaccaaaccaccgagtgagacagggagaagagatgctgctccgcgttggcctcgcgcgcagcgcccgccttcgcggcggcggtggcggcgtctccctctccttagccatagcgcggcatctctccttcgagtcgccgccaccagtgcccccgtcccggcccgaccccgagtggacggacacggtggactacctggacgagtcgggcgcgctgctctcctcggcgcgcggggcgcggccggccgtgccgggcgccgaccccaccatcctatccggcgcctccgcgcacccgctcccgcgccccgcagcggcggcccgcctcgcggcgctcgcgctccggcaccgatcgggcgcgactctctccgccgcgctctccgcactgccctccccgccagaccccgcgctgctcctcctcgcggccgcctcgctcccggcttccgaccccgtcccgctcatctcccttgtcgcatgggcgcgcctccagccgtggttcgtcccctccgacgacctctcctcgctcctcgccgcgcgtctcccgccggcaactcactcctccgaactcctcgcgctcttcgacgacaccctcgggctctccgacctcgccaccttccccaagaccttcaacgccgtcgtctccgcgctcgccacccacggccttctcgagccggccttctactgcttcaagcgcctccgcgacgtcagcttcaggggcctcgagacgcccgcctacaacgccctcctctctctgttgctcaccagggggcttgcattcaaggccttcgaagtgctcgacgaaatggcgacctcgggctgcgccctcgacgagggcacataccagctcgcggtgcctgcgctggcgcgcgccgggaggatcgacgccgcccgcaagatgttcgatgaaatgaagcaaagggagggaattgggcgggcgccggtgggcgtgtattcggtgatggtggacgtgctggccaaggcagggaggcttgatgcggccatgggaatgtacagagagatggtggtggtcgggcatcgggtaagcacagcagtgagcaccgccatggtggaggcactggtgagatctgggaagctggatgctgggatggagctttgggaggagatgaggaggggagggctccgaccaagctttggcttgtacacgatggtggtcgaggccaatgcacggtctggaaggttggacatggccgccaagttgttcggtgacatggagaagtctggctttttccctacgccggccacatatgcctgtctggtggaaatgcatgcctccgcagggcaggtggatgcagcaatgcggttgtatcactccatggcgaattcagggacaaggccagggcttagcacgtttacagcgttgctcacaatgctggcgaataagagtctgctggatttggctgcaaaggtgctgttggagatgaaggcgtcaggtttcccgatagaggtgaccgcaagtgacctgctgatgatctacatcaaggatgggtcaactgaccttgcactccggtggctacggttcatgggttcggctggcataaggaccaacaacttcatcattaggcagctgtttgagtcttgcatgaagacggggctgtatgactcagcgcggtcgttgcttgaggcttatgtcgctggggcagccaaggtggacttgattctctacacatccatcctcgcgcacttggtccggtgccaggacgagagcagcgagcgtacaatcatggacatcctgggcaccagcaagcacaaagcacatgacttcatgtgcgggctgttcactggtccggagcagcggaagcagcccgtgctctctttcgtgcgcgagttcttccagggcatcgactacgacaacgaggagagtgcagccaggtactttgtgaacgtcctgctcaactacctggtgctcatggggcagatgaaccgtgcccgctgtgtttggaaggtcgcctacgagaataagctgttcgccaaggcaatcgtttttgaccagcacatcgcctggtccctggatgtcaggagcttatccgtgggcgcagctctcgtggctaccgtgcacacactgcatcggttcaggaagcggatgctctactacggggttgtgccacggcgcatcaagctggtgactgggccgacactgaagatggtggtggcacaggtgctggcgtcgctggagtcgccgtttgaggtgagcaaagtcgtcttgcgggcacccggcgactcggtactggagtggtttaagaagccgattgtccagcagttcctcctgaacgagataccatccaaggccgacgtcttgatgcacaggctcaacgtgatgtttccaagttcggctccggaggtccggtccttgtccattccaagatcccttggcatgcctaggtgataacacgacagaccttgttgcttgaacactgcaagctgaagcatagct

SEQ ID NO: 102008 - DNA, 1343 bp, Zea Mays
gcagactgcagtgcacagggaccgtaccggggagggccggcggcagccatggcgcgcaaggacacagtgccgcttgtcactgcttccggcttcgtggtggcgtcgctgctgctcctgctctgcgccactcgctgcgaagcgagggtcatggcggcgagcaggagcaggagcaggagcaccagcccgctgctcaacgtgctgttcaagctcaacttcatccgcacggtggagccaccgcgccgacttcccactccgaccgccgacgccaccgtcagcctcgccgcgggcgacaccaactcgccgttctgcgtcaacccaccagacgcgccgtcgtccacgacgcctccgtccacgtcatccacgtcatccacgacgcctccgtccacgtcgtccacgccttcgttgccgggccaggcccaggcgccgccgctgccgccgatcacccccgtgccgccgtccttcgagcccagcccgccggagaacggcgccccgggtggaggccagggaggaggagatcaaggccagggaggaggaggtcaaggccagggaggcccaccggcatccacgacaccgaactcgccgccgcaggcaggtccgggagcgccgtttgggtcggtgccgccgagccccatcgtcatggtgccgagcccgccaggattcggccctggtcccggctccggctcaggcggtggctcgggatccggcgacggcggcggcccgttccagccgccgatcgtgtacccacctccgctggcgccgccgatgctgccgggcgccgggcagacgctgtggtgcgtggccaagcccacggtgccggaccccatcatccaggaggccatggactacgcgtgcggctccggcgccgagtgcgactccatcctgcccagcggcgcgtgctaccaccccaacaccgtgctcgcgcacgcctccttcgcgttcaacagctactggcagcagaacaaggcgaccggcggcaccgccaccattatcaccagagacccgagctacgagaagtgcaaatttgaccttctgtgacgagggagggtacgtagatatgcaggagaacagactgcagataccaaattttttccccaagcttcagttggagttaacattcattttgcttctaggccacaccgatgcacattttgtaactagctcttcttcactagtatggttttgaattttgtaagcctgatactgcgcaaaaggggaaactaaaggtgattccttgacatatttgatatacaagctcttgctcagactgcagcttgccatctttccactttcagacctttcgcccaattatttttgagccaagcatgctaacttgatgctcacgc

SEQ ID NO: 102009 - DNA, 2425 bp, Zea Mays
ccggtagtacgtagcgtaggtatcgtccactcgtccggccgtcgcgcgcgctgctcctgccttcttcctctcgctgatatattggcgacgcacttacgatcgaggccagcagctggggttggacttggatagctagctagatggccaagccactgaacctgactcctgccttcctctcgctgatggccaccagctgccgcttcagctccggcgggcatgcgcaccgcttcgcctcgtcgctaccgtgcgggaggacgacgccgacgccacggaccacgtcgtcgtctacgcgccctgcggctcaggttagccctgacagaagcaagcaacgcgatgacgaagcagcatcggagactacgataaggcagcagctccagcaagtcgatgtgcttgagaacacggggatttctcggcattttgctggtgaaatcaagtgtatccttgacaggacatacagatgttggttagagaggcacgaggaaattatgcaggacacaacaacatgtgcgatggcatttcgtattctaaggatgaacggatatgatgtctcttgtgatctgttgtatcatgttgttgaaacatccgggatccatgatccacttaggggacatttgaatgacacaagaaccttgttagaattacacaaggcctctacagttagtatctctgaagacgagtctatcctggatagcataggcttaaggtcaagtaccttactgagggaacaaatggagtctagtggtgctctacaaaatcctccactctttagagaggtggaacatgctctgtaccatcccttctacgccacattggaccgtctaacccacaggtggaacattgaaaatttcaatactacagagcaccagatgctagacacaccatacttgtccagtcgatataccagtagagatattctagccttgggtatcagagacttcaattcctctcaacttacttaccagcaagaacttcaacatcttaaaagttgggtgaaagaatgcaggttggaccaactaccatttgtgaggcaaaatttggcatacttcttattgtccgctgctggctgcatgtactcccctgaactgtctgaagctcgcactttgtgtgcaaaaaatggtgcactcataactgttgttgatgacttctttgatgttggaggatcaaaagaagaacttgaaaaccttgtcatgttggttgagctgtgggacgagcatcgcaaaattgagttttactcagaacatgtagagattatattttcttcaatttacaactcagttaaccagtatggtgcaaaggcttctttgttacaagaccgcaatgttaccaaacacctagtacaaatatggttggatttgctaaagtctatgatgacagaggtagagtggcgtttgaacaaatatgtgccaacagaggaggaatacatgacaaatgcatctttaacatttgcattgggtcccattgtattgccagcgttgtattttgttggaccgaagatcccggagtctattgttaaagatccagaatacgatgagttgttcaagctaatgagcacatgtggtcgactcttgaatgatgttcagagttttgagagggagtacaaggagggcaagttgaacattgtttctctcctcgttcttcatggtggctccatgtccatatcagatgccagaaggaaattacagaagcccatagacacatgtaggagagacctcctaagactagttcttcgtgaagaaagtgttgttcctaggccatgcaaggaattattctggaaaatgtgcaaggtctgctacttcttttactcgagaactgatgggtttaggtcaccagtggagagggccaaagaagtgaatgcagtgatcaacgagccattaaaactacaagaaaaccatacacacatgtctgttttgtgagaggaaccaagtgtcgatgtgatgtcttcatttgatttagtaggtgtgctttctatataagacagttcgctaggtgactgcatcaggtggtgcataaaaactcagcacattggtaatgtatagaagttggcccatatgtatgtctgattgtggttggtgaggttagtattattttgaaatttaaaagggtgacaccactatagaactagcatttactatcgttccattactattgatttctaacgagccgtcaattataataatttagtatttatgcattacttgaaaattttaaaatgactggggtccatatttctcagcaagtaaaggtccctatctctgtcgactcaaaccataagacaatagtaatcattattggttaaagctagaagcagtattgataatgagactatcattgttggttggtgactttaacagatagggacatgtcactgtcagtttgtggcttgagtctatcactactagttgttgatattagctcacaatgatat

SEQ ID NO: 102010 - DNA, 342 bp, Zea Mays
atgcctagggatgttcttgatgaggcgttggtccagctcgacacgttggcaccctacacgctgaggagttctgacctaacggtggccggagagattggatctgatggatccaagatcttagatgttgatgtcgtcaaggtgtcatacattaacttgagtttcctcgacgcatcgctggtgaagtatagcatgccaaataagatgatgacgatcattgggatgtttggattaaacctttccattgacatgtgcagtggcacccatttaccaaattcaacaggtgtttaccgactaaggttaggcgaaatatcaaggtctaagccgaggcttgtgggagagtaa

SEQ ID NO: 102011 - DNA, 1614 bp, Zea Mays
acgctacaccacacctgcagagcagcaagactagcttgtggctaccagcctagctagccaccgccgcgatccactatcatcgcttgctcgccgagtttcctgcggcggccggcgggcacctacatctcctctacctgactggctagtcattagcacagccagtacgtacgtagctcgcccggccggtgctcgacgacacagtgaattggcgacgcacgtagctaggaggccagcagctggggtcggagatggccatgccagtgaagctgactcctgcctccctctcgctgaaggcggtctgctgccgcttcagctccggagggcatgcgctgcgcttcggctcgtcgctaccgtgctggaggaggacgccgacgcaacggagcacgtcgtcgtctacgacgcgccctgcggctgaggttagctctggcaaaagcaagcagcacgatcaagaagcatcggaggctacgataagacagcagctccagctagtcgatgtgcttgagaacatggggatttctcggcattttgctgctgaaatcaaatgcatccttgacaggacatacagaagttggttacagagacatgaggaaattatgctggacacaatgacctgtgcgatggcatttcgtattctaaggttgaatggatacaatgtctcttctgatgagttgtatcatgttgttgaagcttccggactccataattcacttggaggatatctcaatgatacaagaaccttgttagaattacacaaggcctcgacagttagtatctctgaagatgagtctatcctggatagcataggctcaaggtcacgtaccttactgagggaacaactagagtctggtggtgctctacgaaaaccttcactctttaaagaggtggaacatgctctggacggtcccttctacaccacattggaccgtctacaccataggtggaacatcgaaaatttcaatattatagagcagcacatgctagagacaccatacttgtcaaatcaacataccagtagagatattctagcgttgagtattagagacttcagttcctctcagtttacttaccagcaagaacttcaacatcttgaaagctgggtgaaagagtgcaggttagaccagctacaatttgcgcgacagaagttggcatacttctacttgtctgctgctggcaccatgttctctcctgagctgtctgatgctcgaactttgtgggccaaaaatggtgtgctcacaactattgttgacgacttctttgatgttgcgggatcaaaagaagaacttgaaaaccttgtcatgttggttgagatgtgggacgagcatcacaaagttgagttctactcagaacaagtagagattatattttcttcaatttatgactcagttaaccaacttggtgaaaaggcttctttggtacaagaccgcagtattaccaaacacctagtagaaatagtaagtatagtctatagacttgttggtagtatttttttccttcttttttcttttcagctttgagcctttgagtattgactagtgttgaatggtttgcacagtggttggatttgctaaagtctatgatgacagaggtagagtggcgtttgagcaaatatgtgcc

SEQ ID NO: 102012 - DNA, 1937 bp, Zea Mays
atggccatgccagtgaagctgactcctgcctccctctcgctgaaggcggtctgctgccgcttcagctccggagggcatgcgctgcgcttcggctcgtcgctaccgtgctggaggaggacgccgacgcaacggagcacgtcgtcgtctacgacgcgccctgcggctgaggttagctctggcaaaagcaagcagcacgatcaagaagcatcggaggctacgataagacagcagctccagctagtcgatgtgcttgagaacatggggatttctcggcattttgctgctgaaatcaaatgcatccttgacaggacatacagaagttggttacagagacatgaggaaattatgctggacacaatgacctgtgcgatggcatttcgtattctaaggttgaatggatacaatgtctcttctgatgagttgtatcatgttgttgaagcttccggactccataattcacttggaggatatctcaatgatacaagaaccttgttagaattacacaaggcctcgacagttagtatctctgaagatgagtctatcctggatagcataggctcaaggtcacgtaccttactgagggaacaactagagtctggtggtgctctacgaaaaccttcactctttaaagaggtggaacatgctctggacggtcccttctacaccacattggaccgtctacaccataggtggaacatcgaaaatttcaatattatagagcagcacatgctagagacaccatacttgtcaaatcaacataccagtagagatattctagcgttgagtattagagacttcagttcctctcagtttacttaccagcaagaacttcaacatcttgaaagctgggtgaaagagtgcaggttagaccagctacaatttgcgcgacagaagttggcatacttctacttgtctgctgctggcaccatgttctctcctgagctgtctgatgctcgaactttgtgggccaaaaatggtgtgctcacaactattgttgacgacttctttgatgttgcgggatcaaaagaagaacttgaaaaccttgtcatgttggttgagatgtgggacgagcatcacaaagttgagttctactcagaacaagtagagattatattttcttcaatttatgactcagttaaccaacttggtgaaaaggcttctttggtacaagaccgcagtattaccaaacacctagtagaaatatggttggatttgctaaagtctatgatgacagaggtagagtggcgtttgagcaaatatgtgccaacagagaaggaatacatgataaatgcatctttaacatttggactaggccccattgtattgccagcattatattttgttgggccaaagatctcagagtctattgttaaagatccagaatatgatgaattgttcaaactgatgagcacatgtggtcgcctcttgaatgatgttcagacttttgagagggagtacaacgagggcaagttgaatagtgtttctctcctcgttcttcatggtggctccatgtccatatcagacgccaaaaggaaattacagaagcccatagacacatgcagaagagacctcctaagtttagttcttcgtgaagaaagtgttgttcctaggccctgcaaggaattattttggaaaatgtgcaaggtgtgctacttcttctactcgacgacggatgggtttagctcacaagtggagagggctaaagaagtggatgcggtgatcaatgagccactaaagctacaaggaagtcatacgctggtgtctgatgtgtgaaaggaactaagcgtcgatgtgatgtgttcttttgatttattagtagttgtgttttctctatatggtggtttggtaggtgactgtataatgtaaaggagttggcacatgttgtcagtgtcgtaacatcttcttgatctattcagcgctctcttgggcttgcgtta

SEQ ID NO: 102013 - DNA, 2938 bp, Zea Mays
aaacgattgtttttgtctagtctccagtgtaaataatggtacattgagcatgatctattcgagcagcttattaaggaaacatcatccgatacagaacaaacatcgcaaatcgaccacagtattagcgcaacatcctgcaatacagtacaatacatcacatcactagtcacgcctcattacgctactacactttcttcaagaggtggtactctgatatcgcgaaaccgaacgacgcaacgagcacgtaggcagcagcgtactattatgatacgtactagagctttcaggcgacgtgcagcgcgctaccgagcgcggcgcggaggctgtcgatctcgtcgccgggcaaaaccaccgtgacgaggcggccgcgcccgtcggcgtcgggctgcaccagcaccgcgccctcgtcgccgacgccgtccatgccgtactccacgtagaccgggcgctgccccttgatctcgagcccgtacaggtccacctgctccatgtccacgagcgtcaggttggcgccgccgtacacgagcacgtccccctggaacgccgccaccgcggcggtctcgtcgaccacgttcttggccagcagcgccgccagctccgcgacgtccgtcttcgccggcgacgaccccgccgactccacgtacccgaccttcatctcgttggccagcgacttgccgctccgcgcggcagcgtcggccctgaccacggtcacggtgtccacgtcgcccctgatcttggccaccgcctgccacaccagcgccgacacgagctcgaaggtgccagcggccgcgtcctggcgcccattctgctgctggtggagcttcttgagcaccgcgtcgctgacgtggaaggagtagcacgccatgtcgcggcccgcggggaccagccagaggtcctccatgggcccgacctgcttgacggagcgcggcgccgcgggggactggccctgcagcggctggttcggcggggtgaggacggtggcttccggcttcttgccgctgaggatctgcgcccacttgttgaagcaggtggcggccgacgggatgtcgccgatgaggtgcgcccagctgaaccccagcgccagcccaccgcatttgaagtttgtgatctgtgaccaaagaaacgataaataaaaaaggacggagggagtacgtagttagggcatgtaccgtggggtgtcttaaattgtatcttagagtgtgtctaggagggtgaatgtaaaaaatctcaagacatgtattttgacgaagacacggtgtcttagctctatattcgagacatgagactatctgattggtcactttaatttattgaatgccctgattggtacaataaatatggtaagacacatgttttagacatgaccactgtattatattgtgttttagttgtgtcttatacttggagtaccgtgcagttgtatctaagttgtacatgcccttagtaacagaagtaatcgaccagcacaattagtttgcagtaattgtctgtactgtaatagactagtctagtatacaaagccgtgatttgcacctttgattgacttcatactccgtacgtgctatgtgggtactagtagtagtagagtagtactatttgggtaaacaagtgagacaataatgcaaccaacgcattgggcctacatgaaaaaaggcagatcgtaatgcaccacccgccagggaggcgatccataaaccctatgccgactggtgctggcccattcttcgtgtactgcttgggctttgatgatcttctcactgatactaaatcgtgacatcaatattccaatctatcggctatcggcttcaatggtactgtactagtttttatgtcagagctaggtagtactacgagggagtgaattgattgcaaggctgtgggtgctgatctttggtcccaagcgcccgcttcaacgtgggcggcggcagatgaatgggagtacgccatcccgccccggcgtagcaattactcgtgcgacaccgacccgacagtctcacgacgaacccgccgccgtctttcatgagccggcagatgaatgggggtacttaactgcttgttcagagaagcggtccagtctgaactagtagtagtggtgacagccgggtcgacagacactatctacacagttgtggcatgatggtgacacggggacggggggttgcagtcggtgaccagctctaggtggccactggacagtcagtataaatgtctgatggtggttagcaggtactactgccgcaccacaattaaaagcttgctcaactgcactgcccgtaaccataccgaaagctacagcctgcatgcgtctcctctcctgccgtcaccagcagggactggtctgggagcaggcaaccagcgatgccagaaatccgaccacaaaaatctccacctctctacgacgacgtacggaggacggttacctggacgtagagcagcggcgagaagaagagctcggggccgagcaccttgtcgtagcagagctgcctgatcctgccgggcgcggcgtcgcggatccactcggccatgtcgcggtcgcacctggcctccacgatgcgcacgccgcagtcgttgcacttgatgtagggccggcgcggcgcgccgtccccctccgcctcggcgcggcggacgcggccggccacggggaagtggtcgtccagccacgggaacatggggtccttgagcaccttggtggcgaggccgtccccggaccggtagtagtacaccccgcgcaggtagtgcagcttgaaggccaggtccgcgtccgccagcgcgtagtccacctcccccgtcaccgagctcggcaccaccgtggagagccggtgcccgtgcaccgcgcccggcgccaccgcctcctcctcatgctgctcgaacaccatgctgctttccttgtattgtactcggcgccggcgccgggtgtcagtagctagctagctcgcgg

SEQ ID NO: 102014 - DNA, 1544 bp, Zea Mays
aacaggcactcgccggcgtacacgcggcatacctaaatccccgccgccgccgcgttttgtggggccgcaattcttcccgtcccaccgtccggtcgccgtgagcgcgtgatcctttcacaaccatgatggtcccgctcgatccctcggacaagcccacctcgcaacgttgcattgcggacggcgacaccgtcgtggtgtacgagcgccacgatgcgatgcgcgccgtcgcggttcgcgccggcggtgtgctccagaaccggttcggtgtcttccgccacgacgactggatcggccgccccttcgggtccaaggtattcggaacaggttgcggcggcggcggaggcaagggcggaggcaaggcaggcagtgggttcgtgcacctcctggcgccgaccccggagctctggactctggtgctcagccaccggacccagatcctttacatcgctgacatcagcttcgtcgtggcttacctcgagcttgtacccggttgcgttgttctcgagtccggtacgggcagcggatcgctcaccacttcgctggcacgcgccgtcgcgccgtatggccgtgtccacaccttcgatttccacgagcagagggccgcctcggcaagggaagactttgagaagaatggcctgagcagcctcatcacagtcaatgtgagggatatacaaggtgaagggttcccagaggaatattgtggtgctgctgatgctgtcttcctggacttgccacagccttggcttgcaataccatctgtcggattgatgctaaagaaagacggtgttctgtgctccttttcgccttgtattgagcaagtgcagcgtgcttgtgaggccatgaagacttgtttcacagatattagaacctttgagatccttcttcgcacgtatgaagtacgagacgttgctctgaagagcctcacctccgatgaggcttatgtggggcctcttccgcagaaaagaagaatgcccacaaccccaggtgaaaacacggactgcccacaaaggacttcctccattttggttaggccatgcagcagtgctagagggcacacggggtacttaacctttgcaaggctttgcgtgtgataggcaagcagagtcgtaaaataggtgagtgtaaggattagttgatgacaaaagttgataggaaattacactccattttttagagactgtatcttttgatacgttgttatatcctaggcatggccgaatgctgtccgggcaaggtttgtgctcgctgtaacttaacatctctcttttctgagaaccctgaaaatttgcgagtcacagaatcactcttctttttttttctcccatttatctggcctggagactctctgaagccaagttttaaagtgtggcctctcaagtgcccagtataaatttttaaaaagggattaagtttatttttggccccccaactcttgcctttgtcatttatctatgctcatttaacggacatcgaaaccagggtaaatggaggattcattttaaaatagtgaggataaatctacatagtaaaaaaagaaaacaagg

SEQ ID NO: 102015 - DNA, 2939 bp, Zea Mays
atcgtcattggtttcgcgcactctcgctcctgctcccggttttgtcgctccccactctctcctccagacctctaccaccaccccacaccgccgcacgcccacacgcaaccacgaaacggaagttttcctcgccttgcctgccctctcgatccgatcgggacccaaccctagcccggaatggcggcggcgaccggcggcatgcggaaggcgccgtcgctggaatggcggtgggtgtccacggaggacgacgacgacgaggaccgcgccggggacggggccgccgccgcggtcgtcggggcggtgagcaggggcgggagctttgagtcggaggatgacgaggatgatgaagaggaggaggacgaggagaagaaggggaggaagaggctgatccggaccgtgccatccgtcgactggttcgacgtcgaggggaacgaggtctccgtcgcgcagcagctcgacgactccgaggagtttgattttggcaggacaatgtttcttgctcttcagactcttgctgtggtgtttggagatattggaattggtccattgtatacatttgatgtcatgtttaacaagtaccctattcttggagaggaggatgtccttggagcactctcactagttctgtatactcttatattgatgccattagtgaagtatgttttggttgtcctttgggccaatgatgacggtgaaggtggtctatttgccttgtattctttgatttgtagaaatgcaaaagtgtgtctcattccaaaccaagtacagtctgagaagaggatgtcaagttttcgactcaagcttccaacaccagagcttgagagatccataaaagtaaaagagaaacttgaatcgtcactactgttgaagaaggtgcttctaggcttagtcttgtttgggacttctatgtttatatccaatggagttatcacaccagcaatgtcagtgttatctgctgtcagtggcttgaaagttgggctaccaaatacctcacaagatgctgttgtgatgatttcaattgcacttcttgtagtattgtttagtgtacagaggtatgccactagcaaagtggggtttgcaattggcccttctttacttttatggttttgttgccttggaggaattggaatatacaatttgagtatatatggctcaacagcatttagggcatttaatcctctctacattatttattattttgggaggaatccttttcaggcttggctgtccctcggtggttgtcttttatgtgcaacaggatctgaggccatcttttcaaatctttgttactttcccgtaagatacgttcagtatatgtttgtgcttcttgttcttccttgccttgtcttggcgtatctaggacaagctgcttttctcattgccaaccaaaagtcatcggagcatgtcttcttttcatctattccaagtggagttttctggcctgttttcttagtggcgaatctggctgcactaattgccagtaggacaatgacggttgctatattccagtgcctaaagcagtctatagcacttggttgttttccccggctcaaaatcgttcatacatctcgaaaatttatggctaagatatacattcccgttgtaaactggtttctattggtttcctgcttgggctttatcattctgttcagaaacatatatgatgttggcaatgcatatgctattgctgagctcggggtgatgataatggccacggtttatgttacaataataatgcttctaatatgggagtccaatattacaaaggttctgtcatttgttatcacattcctgttcttggagctgattttcttctcatctgctctgagtagtgttggagatgggggttgggcgttgttgatttttgcatctgttctactcatgattatgtttatatggaactacgggagcaaactaaagtatgacagtgaagtcaagcagaagcttccaaaggatttgatgaggaagttagggcccaaccttggtaccatcagagctcctggactaggcttagtctgcagtgatattgtgaaaggagttcctgcaatttttggtcattttctgacctcactccctgcgatacactcgataattgtatttgtgtgtatcaggaatgtgccagttccggtggttcctcaaagtgaaaggttccttttccaacgtgtatgctcaaggggctatcacttgttccgctgtatagcgagatacgggtataaagacaagaagcaggagcaccatagcgtatttgagcgtcttctgattgaaggccttgagaaattcatacaaagagaggcagtagagctatccctacaaagcgaagacgacattgactcggacgaagagcctccaacccctgtgaagatcatcacagcaccaaatggcagcctgtactcgctcgatgtccctctcctggcagactatgtgccttcaacagagctcattcatgaagccagctgctccacgcctcaacacgatcctgtactggattatgcacagaaccttgaactggagctggcgttcatcgagcagtccaagcggtctggggtcatctacctcatcgataatcccatcatcaaggccaggaaggactcatggttcttcaagaagctgatgataaactatttcttcgcgttcctgaggaacaactgccgccgggcgatcatgttgatgagcatcccgcattcaaacatgatgcaggtgcgcatgacttcttatgtctgattgctggaactgcactggttctgttcatggatgtctgatacaaaccacactgacagtaaaagaatgaacgtggcaaatgcaaagaggatatcggcacttttgtttttgttcataatttgatgatggcttaggttgttgtcggaatctatctcccctgtagttgtacaatgccaaaatatagttggaagttttagctggtacaccattagggtgctgta

SEQ ID NO: 102016 - DNA, 3229 bp, Zea Mays
atcgtcattggtttcgcgcactctcgctcctgctcccggttttgtcgctccccactctctcctccagacctctaccaccaccccacaccgccgcacgcccacacgcaaccacgaaacggaagttttcctcgccttgcctgccctctcgatccgatcgggacccaaccctagcccggaatggcggcggcgaccggcggcatgcggaaggcgccgtcgctggaatggcggtgggtgtccacggaggacgacgacgacgaggaccgcgccggggacggggccgccgccgcggtcgtcggggcggtgagcaggggcgggagctttgagtcggaggatgacgaggatgatgaagaggaggaggacgaggagaagaaggggaggaagaggctgatccggaccgtgccatccgtcgactggttcgacgtcgaggggaacgaggtctccgtcgcgcagcagctcgacgactccgaggagtttgattttggcaggacaatgtttcttgctcttcagactcttgctgtggtgtttggagatattggaattggtccattgtatacatttgatgtcatgtttaacaagtaccctattcttggagaggaggatgtccttggagcactctcactagttctgtatactcttatattgatgccattagtgaagtatgttttggttgtcctttgggccaatgatgacggtgaaggtggtctatttgccttgtattctttgatttgtagaaatgcaaaagtgtgtctcattccaaaccaagtacagtctgagaagaggatgtcaagttttcgactcaagcttccaacaccagagcttgagagatccataaaagtaaaagagaaacttgaatcgtcactactgttgaagaaggtgcttctaggcttagtcttgtttgggacttctatgtttatatccaatggagttatcacaccagcaatgtcagtgttatctgctgtcagtggcttgaaagttgggctaccaaatacctcacaagatgctgttgtgatgatttcaattgcacttcttgtagtattgtttagtgtacagaggtatgccactagcaaagtggggtttgcaattggcccttctttacttttatggttttgttgccttggaggaattggaatatacaatttgagtatatatggctcaacagcatttagggcatttaatcctctctacattatttattattttgggaggaatccttttcaggcttggctgtccctcggtggttgtcttttatgtgcaacaggtaatcaccatagttttttgagcacttttgaatgaaataagattctcttctgtaatagcatattggttcaaaactttgccctaaatatgtgagtaaaaagatttatttctgtcattataagagactcattttaatcttatccaaactatgcaggatctgaggccatcttttcaaatctttgttactttcccgtaagatacgttcagtatatgtttgtgcttcttgttcttccttgccttgtcttggcgtatctaggacaagctgcttttctcattgccaaccaaaagtcatcggagcatgtcttcttttcatctattccaagtggagttttctggcctgttttcttagtggcgaatctggctgcactaattgccagtaggacaatgacggttgctatattccagtgcctaaagcagtctatagcacttggttgttttccccggctcaaaatcgttcatacatctcgaaaatttatggctaagatatacattcccgttgtaaactggtttctattggtttcctgcttgggctttatcattctgttcagaaacatatatgatgttggcaatgcatatggtaaataatctattgatatgcttttgatgccaatatgttctctatttattcttctgtttgtttcttctgatctgacaaagttccatcttgaacagctattgctgagctcggggtgatgataatggccacggtttatgttacaataataatgcttctaatatgggagtccaatattacaaaggttctgtcatttgttatcacattcctgttcttggagctgattttcttctcatctgctctgagtagtgttggagatgggggttgggcgttgttgatttttgcatctgttctactcatgattatgtttatatggaactacgggagcaaactaaagtatgacagtgaagtcaagcagaagcttccaaaggatttgatgaggaagttagggcccaaccttggtaccatcagagctcctggactaggcttagtctgcagtgatattgtgaaaggagttcctgcaatttttggtcattttctgacctcactccctgcgatacactcgataattgtatttgtgtgtatcaggaatgtgccagttccggtggttcctcaaagtgaaaggttccttttccaacgtgtatgctcaaggggctatcacttgttccgctgtatagcgagatacgggtataaagacaagaagcaggagcaccatagcgtatttgagcgtcttctgattgaaggccttgagaaattcatacaaagagaggcagtagagctatccctacaaagcgaagacgacattgactcggacgaagagcctccaacccctgtgaagatcatcacagcaccaaatggcagcctgtactcgctcgatgtccctctcctggcagactatgtgccttcaacagagctcattcatgaagccagctgctccacgcctcaacacgatcctgtactggattatgcacagaaccttgaactggagctggcgttcatcgagcagtccaagcggtctggggtcatctacctcatcgataatcccatcatcaaggccaggaaggactcatggttcttcaagaagctgatgataaactatttcttcgcgttcctgaggaacaactgccgccgggcgatcatgttgatgagcatcccgcattcaaacatgatgcaggtgcgcatgacttcttatgtctgattgctggaactgcactggttctgttcatggatgtctgatacaaaccacactgacagtaaaagaatgaacgtggcaaatgcaaagaggatatcggcacttttgtttttgttcataatttgatgatggcttaggttgttgtcggaatctatctcccctgtagttgtacaatgccaaaatatagttggaagttttagctggtacaccattagggtgctgtattaaccttttttactcttgtgcagtaaagattctttttgtca

SEQ ID NO: 102017 - DNA, 2417 bp, Zea Mays
ttattttccatgtcattcaaacttatttcagtgctggagtgttttttccagccaaagtaattatttatccttgaatgtagtgttatctgctgtcagtggcttgaaagttgggctaccaaatacctcacaaggtgatttctttggggttaaaatttctcgtatcttatagcatggagtttatttttaataaattatggcttactttgtgttttcattaaacgttctttgcagatgctgttgtgatgatttcaattgcacttcttgtagtattgtttagtgtacagaggtatgccactagcaaagtggggtttgcaattggcccttctttacttttatggttttgttgccttggaggaattggaatatacaatttgagtatatatggctcaacagcatttagggcatttaatcctctctacattatttattattttgggaggaatccttttcaggcttggctgtccctcggtggttgtcttttatgtgcaacaggatctgaggccatcttttcaaatctttgttactttcccgtaagatacgttcagtatatgtttgtgcttcttgttcttccttgccttgtcttggcgtatctaggacaagctgcttttctcattgccaaccaaaagtcatcggagcatgtcttcttttcatctattccaagtggagttttctggcctgttttcttagtggcgaatctggctgcactaattgccagtaggacaatgacggttgctatattccagtgcctaaagcagtctatagcacttggttgttttccccggctcaaaatcgttcatacatctcgaaaatttatggctaagatatacattcccgttgtaaactggtttctattggtttcctgcttgggctttatcattctgttcagaaacatatatgatgttggcaatgcatatgctattgctgagctcggggtgatgataatggccacggtttatgttacaataataatgcttctaatatgggagtccaatattacaaaggttctgtcatttgttatcacattcctgttcttggagctgattttcttctcatctgctctgagtagtgttggagatgggggttgggcgttgttgatttttgcatctgttctactcatgattatgtttatatggaactacgggagcaaactaaagtatgacagtgaagtcaagcagaagcttccaaaggatttgatgaggaagttagggcccaaccttggtaccatcagagctcctggactaggcttagtctgcagtgatattgtgaaaggagttcctgcaatttttggtcattttctgacctcactccctgcgatacactcgataattgtatttgtgtgtatcaggaatgtgccagttccggtggttcctcaaagtgaaaggttccttttccaacgtgtatgctcaaggggctatcacttgttccgctgtatagcgagatacgggtataaagacaagaagcaggagcaccatagcgtatttgagcgtcttctgattgaaggccttgagaaattcatacaaagagaggcagtagagctatccctacaaagcgaagacgacattgactcggacgaagagcctccaacccctgtgaagatcatcacagcaccaaatggcagcctgtactcgctcgatgtccctctcctggcagactatgtgccttcaacagagctcattcatgaagccagctgctccacgcctcaacacgatcctgtactggattatgcacagaaccttgaactggagctggcgttcatcgagcagtccaagcggtctggggtcatctacctcatcgataatcccatcatcaaggccaggaaggactcatggttcttcaagaagctgatgataaactatttcttcgcgttcctgaggaacaactgccgccgggcgatcatgttgatgagcatcccgcattcaaacatgatgcaggtgcgcatgacttcttatgtctgattgctggaactgcactggttctgttcatggatgtctgatacaaaccacactgacagtaaaagaatgaacgtggcaaatgcaaagaggatatcggcacttttgtttttgttcataatttgatgatggcttaggttgttgtcggaatctatctcccctgtagttgtacaatgccaaaatatagttggaagttttagctggtacaccattagggtgctgtattaaccttttttactcttgtgcagtaaagattctttttgtcagcctccttgattttgttagataaggtttttggtgtttgcaaagttactggtgaatgtggcaatttgtatgtatatttttgcctctttttttaggtaacggaagcataagcatctggctttgcgaaggaatcaggccaaagtttcaataaccgatttcacagacacttaaccaagataaagacaaaagcctaaacaccgagtc

SEQ ID NO: 102018 - DNA, 90 bp, Zea Mays
cgcctattcacccccctctaggcgactttcaagtgcctatcaaaagaattgagggctctagtatgagagtttctgtatgagaaaagccct

SEQ ID NO: 102019 - DNA, 1387 bp, Zea Mays
atttcctattttcctcacgtattatcctcttgcttgttcgtccggttcttcgccctcgccgcgcgggactaccaatccaaactggcgacgaccctgctgccaccccacagcagatttgaggagcggacgcccgtttaaatggctattggagtcccatccatggagctccaccgctcctcaccgttgctctcgggtggccgaggtatttactcggccctgtccgtgtgattgttgatgtgaagcttgaagttcgtggatgtagaatgattctacggcctacagaagaagcccttctttgtccaagcaaagagactagtggggatggagaaagcaagtacgaggccaggaacacaagagtctggacagacaaagaaaagagcacccctggttcgtggaactgttagcccacctcttccagtaccaggaaacatacctcggcctccttatgtcggcacagaatatgtaccagagatagcaaaagagatacaaatgcatgacaaagagggcattgtccacatgagagctgcttgcgagctcgcggctcgtgttcttgactatgcaggaacgttagtgaaaccctctgtaacaacagacgaaattgataaagcagtgcacaagatgatcatcgatgctggagcctatccatcaccacttggatatggtgggtttccaaaaagtgtatgcacctcagtgaatgagtgcatgtgccatggaattcctgattcacgcgagctacaggatggagacataattaacattgatgtcactgtctacttgaatggttatcatggggatacctcaaaaacatttctttgtggagaagtcgatgaagccagtaaacgacttgtgaaggttactgaagagtgcttgctcaggggcatatcaacatgcaaacatggtaccagctttaagaagattggcagaagaataagtgagcatgctgagaggaacggttttggtgttgtggagtgttttgttgggcatggagtcggcagggtatttcactcagaaccaattatctatcaccagaggaacaacagaccgggccagatgattgaagggcagactttcacaatagagccgatcatatcgatggggagcatcgagtgcgacatgtgggacgacggctggactgccgtgacgacggacggcagcttggcggcgcagttcgagcacaccatactgatcaccaggaccggagccgagatcctcaccaagtgctaggaggaaaggaaatcgcatgtgcccgatagccgacggtaggtaatctgtattcgtgaggtggtgaggatgcttgaggtgacctattttgtctcgcaaaatgggcgtgctacagaatagtgaagaaaagggttgagagattgcaaatggcaggtttgggcaaaga

SEQ ID NO: 102020 - DNA, 1283 bp, Zea Mays
atttcctattttcctcacgtattatcctcttgcttgttcgtccggttcttcgccctcgccgcgcgggactaccaatccaaactggcgacgaccctgctgccaccccacagcagatttgaggagcggacgcccgtttaaatggctattggagtcccatccatggagctccaccgctcctcaccgttgctctcgggtggccgaggaggaaatacatgcctacagaagaagcccttctttgtccaagcaaagagactagtggggatggagaaagcaagtacgaggccaggaacacaagagtctggacagacaaagaaaagagcacccctggttcgtggaactgttagcccacctcttccagtaccaggaaacatacctcggcctccttatgtcggcacagaatatgtaccagagatagcaaaagagatacaaatgcatgacaaagagggcattgtccacatgagagctgcttgcgagctcgcggctcgtgttcttgactatgcaggaacgttagtgaaatgcacaagatgatcatcgatgctggagcctatccatcaccacttggatatggtgggtttccaaaaagtgtatgcacctcagtgaatgagtgcatgtgccatggaattcctgattcacgcgagctacaggatggagacataattaacattgatgtcactgtctacttgaatggttatcatggggatacctcaaaaacatttctttgtggagaagtcgatgaagccagtaaacgacttgtgaaggttactgaagagtgcttgctcaggggcatatcaacatgcaaacatggtaccagctttaagaagattggcagaagaataagtgagcatgctgagaggaacggttttggtgttgtggagtgttttgttgggcatggagtcggcagggtatttcactcagaaccaattatctatcaccagaaccgggccagatgattgaagggcagactttcacaatagagccgatcatatcgatggggagcatcgagtgcgacatgtgggacgacggctggactgccgtgacgacggacggcagcttggcggcgcagttcgagcacaccatactgatcaccaggaccggagccgagatcctcaccaagtgctaggaggaaaggaaatcgcatgtgcccgatagccgacggtaggtaatctgtattcgtgaggtggtgaggatgcttgaggtgacctattttgtctcgcaaaatgggcgtgctacagaatagtgaagaaaagggttgagagattgcaaatggcaggtttgggcaaaga

SEQ ID NO: 102021 - DNA, 1410 bp, Zea Mays
atttcctattttcctcacgtattatcctcttgcttgttcgtccggttcttcgccctcgccgcgcgggactaccaatccaaactggcgacgaccctgctgccaccccacagcagatttgaggagcggacgcccgtttaaatggctattggagtcccatccatggagctccaccgctcctcaccgttgctctcgggtggccgaggaggaaatacatgcctacagaagaagcccttctttgtccaagcaaagagactagtggggatggagaaagcaagtacgaggccaggaacacaagagtctggacagacaaagaaaagagcacccctggttcgtggaactgttagcccacctcttccagtaccaggaaacatacctcggcctccttatgtcggcacagaatatgtaccagagatagcaaaagagatacaaatgcatgacaaagagggcattgtccacatgagagctgcttgcgagctcgcggctcgtgttcttgactatgcaggaacgttagtgaaaccctctgtaacaacagacgaaattgataaagcagtgcacaagatgatcatcgatgctggagcctatccatcaccacttggatatggtgggtttccaaaaagtgtatgcacctcagtgaatgagtgcatgtgccatggaattcctgattcacgcgagctacaggatggagacataattaacattgatgtcactgtctacttgaatggttatcatggggatacctcaaaaacatttctttgtggagaagtcgatgaagccagtaaacgacttgtgaaggttactgaagagtgcttgctcaggggcatatcaacatgcaaacatggtaccagctttaagaagattggcagaagaataagtgagcatgctgagaggaacggttttggtgttgtggagtgttttgttgggcatggagtcggcagggtatttcactcagaaccaattatctatcaccagaggaacaacagaccgggccagatgattgaagggcagactttcacaatagagccgatcatatcgatggggagcatcgagtgcgacatgtgggacgacggctggactgccgtgacgacggacggcagcttggcggcgcagttcgagcacaccatactgatcaccaggaccggagccgagatcctcaccaagtgctaggaggaaaggaaatcgcatgtgcccgatagccgacggtaggtaatctgtattcgtgaggtggtgaggatgcttgaggtgacctattttgtctcgcaaaatgggcgtgctacagaatagtgaagaaaagggttgagagattgcaaatggcaggtttgggcaaagaggaccaagttctaggcgtccgggacacgactctgtgtctggcgttcccttctgttgtcgacatcccgtggttcagttgaggcc

SEQ ID NO: 102022 - DNA, 1276 bp, Zea Mays
ccggttcttcgccctcgccgcgcgggactaccaatccaaactggcgacgaccctgctgccaccccacagcagatttgaggagcggacgcccgtttaaatggctattggagtcccatccatggagctccaccgctcctcaccgttgctctcgggtggccgaggaggaaatacatgcctacagaagaagcccttctttgtccaagcaaagagactagtggggatggagaaagcaagtacgaggccaggaacacaagagtctggacagacaaagaaaagagcacccctggttcgtggaactgttagcccacctcttccagtaccaggaaacatacctcggcctccttatgtcggcacagaatatgtaccagagatagcaaaagagatacaaatgcatgacaaagagggcattgtccacatgagagctgcttgcgagctcgcggctcgtgttcttgactatgcaggaacgttagtgaaaccctctgtaacaacagacgaaattgataaagcagtgcacaagatgatcatcgatgctggagcctatccatcaccacttggatatggtgggtttccaaaaagtgtatgcacctcagtgaatgagtgcatgtgccatggaattcctgattcacgcgagctacaggatggagacataattaacattgatgtcactgtctacttgaatggttatcatggggatacctcaaaaacatttctttgtggagaagtcgatgaagccagtaaacgacttgtgaaggttactgaagagtgcttgctcaggggcatatcaacatgcaaacatggtaccagctttaagaagattggcagaagaataagtgagcatgctgagaggaacggttttggtgttgtggagtgttttgttgggcatggagtcggcagggtatttcactcagaaccaattatctatcaccagaaccgggccagatgattgaagggcagactttcacaatagagccgatcatatcgatggggagcatcgagtgcgacatgtgggacgacggctggactgccgtgacgacggacggcagcttggcggcgcagttcgagcacaccatactgatcaccaggaccggagccgagatcctcaccaagtgctaggaggaaaggaaatcgcatgtgcccgatagccgacggtaggtaatctgtattcgtgaggtggtgaggatgcttgaggtgacctattttgtctcgcaaaatgggcgtgctacagaatagtgaagaaaagggttgagagattgcaaatggcaggtttgggcaaaga

SEQ ID NO: 102023 - DNA, 732 bp, Zea Mays
ccgaagcagccgaacctgctagaagcctatacacggccaaggtccaccgttcccaaatctacgacttgagcaaaaaccacagctatagccatggcaaaggcaggggcaacggccgtgctggtgaccgtcctggttgtcctggcggcgtccgccgagatggcgcacggcgtctgcaacctgtcgagcgccggcatccgcgcgtgccagcccgcggcagccatccgcaacccgacagaccagccgtcgtctgagtgctgcgccgcgctggcgggggccgacctggcatgtctctgccggtacaagaacgccgccggcgtgtgggtgaggttctacaggatcgacatcaaccgcgccatggcgctgccgggcaagtgcggccttgccatgccggccaactgctgatgtgctcactcacactccaactgcatgcatgccgtgctgcgtgcgccgctacgtttattacatgcgcgtcaaggcgcatgttctactgctatatagctacgacatctatgcaataaacgaaggcatgcacacaatgatacgtgcctcgtgcacgcagtgcaatatgtcgatgaactatgggtgcgtacgtgagcttaagcttattaatcagtgcagaagtttatgttacagaactgcattatgtttgagtttatgaatgtctgtctcgtcgtctactccaaatctggatatactaatatagtaatatgaattaaaaacgacctttgatgc

SEQ ID NO: 102024 - DNA, 265 bp, Zea Mays
ttttttggtttgtttctcttatttttacatgttgttatcatttctaccaccaacaactttctacatggagggtccatgggcagctatggccacaacaggcatcttccttgctgccgcagtcactgattggctagatggttatattaatagaaagctaggaacaccttttggtgcatttcttgatcctgtggccgacaaggcacttcctttgagtgggaaagaagcgattgaacttcttgacatactattaagcacaataacctaa

SEQ ID NO: 102025 - DNA, 391 bp, Zea Mays
tgagtttgagataatgcaatgttgtgtgagaaagagcaaaaccttgaccaggattcccttgtatgagataatttcatgtgattctaaactgaatggttatactctcttcttttcatttggccacttctattttctctattttgttatagcatcaagttgatttgtgtctaatctataggaacgatgttagcgaaagtcaatttaatctggtgctgaacattgagttgcaataaatcgtcgatggagactgagtcaccacagccagaaaaccactgtctcaatttgaggagatttttcatctatgtttgttagaaggcataatgcctatttatctcttgtattcaaacatttggcaattaagaaatagaagattacttccccaatatccctt

SEQ ID NO: 102026 - DNA, 663 bp, Zea Mays
cgcgtcgtggatcggctttctccgtgctccacctcatcggcctcatgccccgtagccccgactccccatctgccgcctccacctcatgggccgctgggtccaccctcgtcgtccagcttggcgacatctttaccgtggtggcgacgagctccgcctcctgcaccccctccgcctcctggccccttccgctgaggcccgcgtcggcgcgttcctgccatagtcggcaaccaataggagcgtaaaactggagctagggattgaagctgttgcaggtacatgtcatatataaatggacatgggcaggcactcccgctgagggtgcttcttggcttcgtctgtagaggcttgctgatatttggcataggatattgttaatttgtgggtatgatgcatgtattatttgagatctttgagcagataaagcaatcattatcatctcaaagggagggtattgatttcatggccgtgattccccctctcccagtcaaagccatccatgccgcaattacttcagggacagggtgtttactggggctagaaggattctgtttttattgcacgacacatgacaacatatccaagtagtccttgattgatttagcagcagggagtaagcgtcttgctaaaagtggctccacaggtgaacttaggtgagtgtttggt

SEQ ID NO: 102027 - DNA, 955 bp, Zea Mays
cgcgtcgtggatcggctttctccgtgctccacctcatcggcctcatgccccgtagccccgactccccatctgccgcctccacctcatgggccgctgggtccaccctcgtcgtccagcttggcgacatctttaccgtggtggcgacgagctccgcctcctgcaccccctccgcctcctggccccttccgctgaggcccgcgtcggcgcgttcctgccatagtcggcaaccaataggagcgtaaaactggagctagggattgaagctgttgcaggtacatgtcatatataaatggacatgggcaggcactcccgctgagggtgcttcttggcttcgtctgtagaggcttgctgatatttggcataggatattgttaatttgtgggtatgatgcatggattatttgagatctttgaacagataaagcaatcattatcatctcaaagggagggtattgatttcatggccgtgattccccctctcccagtcaaagccatccaagccgcaattacttcagggacagggtgttcactggggctagaaggattctgtttttattgcacgacacatgacaacatatccaagtagtccttgattgatttagcagcagggagtaagcgtcttgctaaaagtggctccacaggtgaacttagcgatcgtcttgctaaaagtggttgtacaggtgatcgcttgaaggaaactcaggttcaagaaggacacatgagtatccgagaaaaaactcccaagaaatcttcccaaaactgaatgttgccttctaccatcaacaacctttgaagttctagggtgtttatttttgtatgttctctacaattatgtgtatatatatatatattcatccttttcaagacaatttttataaatataacaacttgatttcaaatgttgaaacacgataatttacctaactctatttagatgagtatatgtatatcttgct

SEQ ID NO: 102028 - DNA, 1643 bp, Zea Mays
cctctctctctctccatctccttcacgccacaccacaagtgtcgaaacggatcaaagagcaagcgacggggacgagagagacgagaggaccgtcgtctccccctcctccctcacaactcacacgcgagacggagacgcggccgcagccgaggtctgcataaaagcgcaaaagatctctcgctctcggctctcctcctctccccctcacccccggtgcgctgtctgtgtcccgtctccgcgagaccgcgagcaagttctgtcttcgtccgtccatccgtgcccggtcttactgttggcgctccttgattagcttacccccgccggcgagttcaccctgacatggtcggccggatggagcggcagaccgcgtcgtcgtcagcttcgtgctcctcctcctcctcttcctcctcggtctgcggcggcaagaagcgccctgatatcctcaacatgatccggaatgcagcctgtcttaattcgtcatctactgataccggcaagggaaggagtaaattgtcaaccaacaaagttacacatggattccacctggtggaaggcaagtccggccatggcatggaagactaccatgtggcagagtacaaatatgtgaagaaccatgagcttggtctcttcgccatctttgatggccatttaggagataaggtgccaagttacctgaaagctaaccttttcagcaacataatgaaagagcctctcttctggtctagtcctgaagaagcaataaagaatgcatactgctctacaaacaaatatatcctggaaaatggcaaacaacttggaccaggtggttcaacagcagttacagctattgtagtcgatggtaaggacatgttgatcgcaaatgtaggcgactctcgagctgttgtgtgtgaaatgggctctgctaatcagctcactgttgaccatgagcccgatacaactgaggaaaggcagaggattgaaaagcacggtggctttgtaacgacatttcctggtgatgttcctcgggtgaatggccagcttgctgttgctagagcatttggtgaccaaagcctcaaggcccacttgagctctaaacctgatactagacatgtaccaatagactcaagtatagagttcgtcatacttgccagtgatggattgtggaaggtaatgaagaaccaggaagccgtggatctcgtgaagtcaatcaaggatcccaaggcagcagcgaagcgattgaccactgaagcgttggcaaggaagagcaaagatgacatctcttgcattgtcatccgtttccgctgctgacttaccccctcaacagcacttttttatttccgatccacgcctcatgatatggattgagacaatctgtctgtaatcatctgccttgccgattttttttctggtagaatctgctctacctaccgtagttgtggacagacctggaactaattaggacagtgaagacttgagagctggtaggtgagtgtgtgcagggtgtccattccattcgcctgtgcatatatacacccaggccccagcgtagactgtgcatccgttgaccgggacttgggggtcctgtcaggacctagtgcttgtgatgctaatggacctaatggtgcgaaggaacttgtcgatatctgatttggtcaatttagttt

SEQ ID NO: 102029 - DNA, 1469 bp, Zea Mays
atctccttcacgccacaccacaagtgtcgaaacggatcaaagagcaagcgacggggacgagagagacgagaggaccgtcgtctccccctcctccctcacaactcacacgcgagacggagacgcggccgcagccgagcttacccccgccggcgagttcaccctgacatggtcggccggatggagcggcagaccgcgtcgtcgtcagcttcgtgctcctcctcctcctcttcctcctcggtctgcggcggcaagaagcgccctgatatcctcaacatgatccggaatgcagcctgtcttaattcgtcatctactgataccggcaagggaaggagtaaattgtcaaccaacaaagttacacatggattccacctggtggaaggcaagtccggccatggcatggaagactaccatgtggcagagtacaaatatgtgaagaaccatgagcttggtctcttcgccatctttgatggccatttaggagataaggtgccaagttacctgaaagctaaccttttcagcaacataatgaaagagcctctcttctggtctagtcctgaagaagcaataaagaatgcatactgctctacaaacaaatatatcctggaaaatggcaaacaacttggaccaggtggttcaacagcagttacagctattgtagtcgatggtaaggacatgttgatcgcaaatgtaggcgactctcgagctgttgtgtgtgaaatgggctctgctaatcagctcactgttgaccatgagcccgatacaactgaggaaaggcagaggattgaaaagcacggtggctttgtaacgacatttcctggtgatgttcctcgggtgaatggccagcttgctgttgctagagcatttggtgaccaaagcctcaaggcccacttgagctctaaacctgatactagacatgtaccaatagactcaagtatagagttcgtcatacttgccagtgatggattgtggaaggtaatgaagaaccaggaagccgtggatctcgtgaagtcaatcaaggatcccaaggcagcagcgaagcgattgaccactgaagcgttggcaaggaagagcaaagatgacatctcttgcattgtcatccgtttccgctgctgacttaccccctcaacagcacttttttatttccgatccacgcctcatgatatggattgagacaatctgtctgtaatcatctgccttgccgattttttttctggtagaatctgctctacctaccgtagttgtggacagacctggaactaattaggacagtgaagacttgagagctggtaggtgagtgtgtgcagggtgtccattccattcgcctgtgcatatatacacccaggccccagcgtagactgtgcatccgttgaccgggacttgggggtcctgtcaggacctagtgcttgtgatgctaatggacctaatggtgcgaaggaacttgtcgatatctgatttggtcaatttagttt

SEQ ID NO: 102030 - DNA, 454 bp, Zea Mays
atggagagtactccacatgaacaaatgccctcccaacaacaacttgagtcagtgctgtatgcttccacgttccagaaaattccacatggtatcggagccaggctcaacggcgatggcgtcgcggtgaggagtgtcttcggcctcgacggagaagaccaccgagaaggagatcagcgacggccgaaggaggccgccgaggcacacgagcggtcgaaggaggacaagggcgacaagtggcaccgcgtggagcgcagcagcggccagttcgtgcggcgcttccgcctgccggagaacgccaagacggaggaggtgagggcccgcgctggagaacggcgtgctcacggtcaccgtgcccaaggccgaggtcaagaagcccgaggtgaagagcatccagatctccggctgaagaagacaggaggaagaggaggcgctcctggtcctggcttctagacgt

SEQ ID NO: 102031 - DNA, 2124 bp, Zea Mays
caagtttaaaaaacaccgcaattaaccagctcaccctggctaacccaccaccaccaccaccataccaggagagagaaaagagagaggcgcctccactcgtgactcgtgagtcgtgagtagtgactcgtctggtctcccctctctcgtccgtctggtcctcccgtccagaggcgttctctctccctccccctttcctctggtcatcgcacccgtctccccgctctgactccgcccgcgccgccgactcccggcacggccccaggcttcatctccgccgccgcgccgcctcgctccgatcgacccccgaaacgccggaaaccgtgggcttcgcgaggtgcaatttcttgggccgcgtctgagcttgattcagtttctggaagcggcctgagcttgggatttgatccgggttgcctctcttcgtccaagcggtagataacataacagtgcgacaggtgaattgcagagagaaggggggcatttggtcgctgtatgatggcggaaggccccaatttcgctggcatgattggaggccatgacaatggtggggatttctgcgacatggcatactaccggaagctcggtgagggctcaaacatgtcggtagacaaccttaatagcatgcagaccagcacacatggtggctccattgcaatgtctgtggacaacagcagcgtagggtcctgtgactcccatactaggatgctcaatcaccctggcctcaagggacctgtcgttggcaattactcggtcggcgggcacagcattttccgtcatggacgggtgtctcacgccttgagcgacgatgcgctggcacaggcgttgatggacccaaggtacccgactgagacactcaaggattatgaggagtggacgattgatttagctaagctccacatgggaatgccctttgcacagggcgcctttggaaagctctacaggggtacctacaacggtgaggatgttgccattaagcttttggagaggccagaggcagatccggagagagccgggttaatggaacagcagtttgtgcaagaagttatgatgcttgcaaccttgaggcaccagaatattgttaaatttattggagcatgcaggaagccagtggtttggtgcattgttacggagtatgccaagggcggatcagttaggcagtttctggcaaagaggcagaataggtcagttccactaaaactggcggttaagcaagcactggatgttgcaagggggatggcgtatgttcatggtcttggcttcattcatagggatcttaagtcagataacctcttgatatctggtgataaatctatcaagatagctgactttggagtagctcggattgaagtaaaaactgaggggatgacacctgaaacgggaacctatcgttggatggcaccagagatgattcagcacaggccatatgaccaaaaagttgatgtctacagctttggcattgtgctgtgggagctcataactggcatgctcccttttgctaatatgacagcagtgcaggctgctttcgctgtggtgaacaagggtgtccgcccagctataccccaggactgcctgcccacccttgctgagatcatgaccaggtgctgggatccaaatcctgatgtccgtccgccattcactgaagttgtgaggatgctggagcatgctgagatggagatcctgagcactgtccgcaaggcccgatttcggtgttgcatgtcccaaccgatgactaccgactgaatcaaacaagagagttgaaatgaactccatggaagcgtaattgagtgtatttatcatgtgtccaaacttcgctcagctgaagtagaaagcacacctgagtttatggctgtatgtgtgtatactcaggtgtaagccttgttgtctttgaaatattcctgcacttagaaatatacctagttcgcgttttcagactcttgagatgttttagggctagtctatgtcctgtcgaaacatcatgcagggttcctattcttgtaatgttcttgtgatcctgctactggaatgtgcctcctactggaggtggtctgttcatgttataaccctcctactggaatatgcacaaatacttcgttgcttgagcatatagcatgtataatttcctgacaa

SEQ ID NO: 102032 - DNA, 3265 bp, Zea Mays
caagtttaaaaaacaccgcaattaaccagctcaccctggctaacccaccaccaccaccaccataccaggagagagaaaagagagaggcgcctccactcgtgactcgtgagtcgtgagtagtgactcgtctggtctcccctctctcgtccgtctggtcctcccgtccagaggcgttctctctccctccccctttcctctggtcatcgcacccgtctccccgctctgactccgcccgcgccgccgactcccggcacggccccaggcttcatctccgccgccgcgccgcctcgctccgatcgacccccgaaacgccggaaaccgtgggcttcgcgaggttgcctctcttcgtccaagcggtagataacataacagtgcgacaggtgaattgcagagagaaggggggcatttggtcgctgtatgatggcggaaggccccaatttcgctggcatgattggaggccatgacaatggtggggatttctgcgacatggcatactaccggaagctcggtgagggctcaaacatgtcggtagacaaccttaatagcatgcagaccagcacacatggtggctccattgcaatgtctgtggacaacagcagcgtagggtcctgtgactcccatactaggatgctcaatcaccctggcctcaagggacctgtcgttggcaattactcggtcggcgggcacagcattttccgtcatggacgggtgtctcacgccttgagcgacgatgcgctggcacaggcgttgatggacccaaggtacccgactgagacactcaaggattatgaggagtggacgattgatttagctaagctccacatgggaatgccctttgcacagggcgcctttggaaagctctacaggggtacctacaacggtgaggatgttgccattaagcttttggagaggccagaggcagatccggagagagccgggttaatggaacagcagtttgtgcaagaagttatgatgcttgcaaccttgaggcaccagaatattgttaaatttattggagcatgcaggaagccagtggtttggtgcattgttacggagtatgccaagggcggatcagttaggcagtttctggcaaagaggcagaataggtcagttccactaaaactggcggttaagcaagcactggatgttgcaagggggatggcgtatgttcatggtcttggcttcattcatagggatcttaagtcagataacctcttgatatctggtgataaatctatcaagatagctgactttggagtagctcggattgaagtaaaaactgaggggatgacacctgaaacgggaacctatcgttggatggcaccagagatgattcagcacaggccatatgaccaaaaagttgatgtctacagctttggcattgtgctgtgggagctcataactggcatgctcccttttgctaatatgacagcagtgcaggctgctttcgctgtggtgaacaagggtgtccgcccagctataccccaggactgcctgcccacccttgctgagatcatgaccaggtgctgggatccaaatcctgatgtccgtccgccattcactgaagttgtgaggatgctggagcatgctgagatggagatcctgagcactgtccgcaaggcccgatttcggtgttgcatgtcccaaccgatgactaccgactgaatcaaacaagagagttgaaatgaactccatggaagcgtaattgagtgtatttatcatgtgtccaaacttcgctcagctgaagtagaaagcacacctgagtttatggctgtatgtgtgtatactcaggtgtaagccttgttgtctttgaaatattcctgcacttagaaatatacctagttcgcgttttcagactcttgagatgttttagggctagtctatgtcctgtcgaaacatcatgcagggttcctattcttgtaatgttcttgtgatcctgctactggaatgtgcctcctactggaggtggtctgttcatgttataaccctcctactggaatatgcacaaatacttcgttgcttgagcatatagcatgagcagcgggagcattatcagcagcatcagcatcttcaatccttggtttattttctttgtcattggttttttccaattgaactgcctgtgcaaatgcgtccgacataccagtcacaatatccaccggtgcactggcctgcacctgcttgccagtatcggaacactctggcttctgttgttgcctgtcatctagcatagctttctctcgttgctcatagaagtcgaagtcctcaaggatgtttgtctgggcttcatggttcttgaagatggctaacatctggagaccctgcttcagtttcacctgcaagttagcttgttaagttaatggaactattgttcaaaaattgcccagaaacataaagctagatgggaactatgtgcatcagttgtatttgcacctcctgcgtgtccctgctatttgtaactcgcttgttctcattgttctctaggatgatgtgccggacaatgttgtttgggacatccttaacaatgtgccatttgacagggaattggccattccatctttcattctgccagtaatcaacactcttgtcaaaattgacaggtccaatcatctcagccacaccgcagaaatgaccgctgctattaacctgcaaaaaaatagtcgtaaattgataagtcatcttcgtttagcacagtgaccaactccaagccaaatcatatggtaaccgggcactcgtgggcatggagattgtcctgtttctccctcagtaagaatgcaaatggttaaaaaaatataacgataaagtgaataaccataccgagaaaaacaagaaaataggacaatgatcttccttcgcttttgcctcatgataaccagcatttaactttctgttccctctgggagtgctggcccaaacattatactttatgctcttgtgaatgtgatcttcagtgtaggattttattacataaaatctggcatccttgtactcagtcacaaaaccagggtggttgtatttatcagaatcagctattggcaagacattcttatttttgtcttcggttgaagagctccccacttctttccttgttttggtggcccttgggccacggcattgctcattcagaaagtcaggagagcacttctcatccttgaaggtaccgaatttgcaactagcagtgctccaactttgtgtactgcctccaaatttaccaccttgctggaatgccttgtgtgatccagaattagacatggactcctgatgc

SEQ ID NO: 102033 - DNA, 3603 bp, Zea Mays
catcagttgtcgtcgactcatccaagcaggacccgcggtactcaaaccctcggtccttctcggcggcggcgtacgggatagcagaggtggccatggcggcggtggccacggtgagctctgccagtgggctccttgctatgctgcaggagccggcgccggagctgaagctgcacgcactcgacagtctcaactccgtcgtccacctcttctggcccgagatctccaccagtgttcccaccatcgagagcctgtatgaagatgaagagtttgagcagaggcagcttgcagcacttgttgtttctaaggtattttactacctgggcgagttaaatgattcactgtcatatgcacttggtgctgggtccctatttgatgtttccgatgattcagactatgcccatgctcttttagccaaagcattagatgaatatgccagtatcaagaccagagcctctaaagctgcaaaggaggaagagaacattgatcctcgattagaggccatagtggagaggatgcttgaaaagtgtattcttgatgggaaatatcaacaggccatgggtatggctgttgaatgcagaaggttggataagctggaggaagcaattgttcggtgtgataatattcatggggctctatcgtattgcatcaatctttctcatcaatatgttaatcaccgtgaatatcgctttgaggttctccgttgtattgttaaaatataccaaactttgccaaacccagattatcagagcatttgccagtgtcttatgtttttgggtgagccagaaactgttgcaagcatattggacacgctgctttctggaaacaaggatgatgctctacttgcatatcaaactgccttcgatcttgttgagaatgaaaaccaagcttttcttttgaatgtgaggaatcgtttggcctcaccgactcctgtgccatccaaccctgacagcgagccagctgtgcaagatgatcaaactgccagcactgtgggtacaggcacagaagcagctggagatgttcagatgagagatgatacagcaccaaatggaaatgctcacactgtggatccaaatgaggtagcacatgctgaccggcttcaaaaaattaaaggaatactgtcaggggagacttctattcagctgacattgcaatttctatatagccacaacagatctgatcttttaattctgaagacaataaagcaagctgtggaaatgaggaatagtgtttgtcacagttcaacaatatgtgccaatgcaatcatgcatgcgggaactactgtagatacctttctaagagagaacctggagtggttaagcagggcaaccaattgggcaaaattcagtgcaactgctggactaggtgtcattcatagaggtcaccttcaacaaggccgggctttgatggccccctacctacctcaaagtggtgcagttggcggtggcagtccatattcagaaggtggtgccctctacgcactaggtctgattcatgccaatcatggtgaaggaatcaaacaattcctccgtgaaagtcttcgcaacaccagtgcagaggtcatccagcatggtgcatgtttggggcttgggcttgcagctttgggcacatcagatgaggaaatatatgaggacataaagaatgtcctttacacagacagtgctgttgctggtgaggcagctggtattggcatgggcttgctcatggttgggaccgctagtgaaaaggctagtgagatgcttgcttatgcacatgatacacagcatgaaaagattataaggggtttgtcactgggaattgcactgacagtatatggcagagaagaggaagcagacaccttgattgaacaaatgactagagatcaagatcccatattacgttatggtggtatgtatgcattggctctagcctacaggggaactgccaacaacaaagccatccaccagctgctgcattttgctgtatcagatgtcagtgatgatgttcggaggactgcagttatggctcttggttttgttctgtacaatgagcccgagcagactccaagaattgtatccctgctatctgaatcatacaacccacatgttcgctatggtgcagccttagccgttgggatatcatgtgcagggtctggattaagtgatgcaatttccttgttggagcctcttacatcagacgttgttgactttgtgcgtcagggagctctcattgccatggcaatggtaatgatccaaacgaatgaatcctttgattctcgtgttggagcatttaggcgtcagttggagaagatcattcttgacaaacatgaggacaccatgagcaagatgggtgccatactagcttctggtgtccttgatgctggtggtaggaatgttacaatcaagctcctttcaagaaacaagcatgacaaactcactgctgtgattggtcttgccgttttcagtcagttctggtactggtatcctctcttatattttatcagcctggccttctcaccaacagccttcattgggctcaactctgatttgaaagtgccaaagtttgagttcctgtcacatgctaaaccgtctctcttcgagtatcccaaaccgacaactcagcagactactacttcgacagtgaaactgccaacagccattttgtcaacttatgcgaaagcaaaatctagggcaaagaaggacgcagaaagcaaagctaaccaggagaaagcaacagaggaggcttctggttctacctcaagcaaggcggctaaagctcaagagaaggatgctgatgtcatgcaggttgataatgccactgaaaagaaagctcctgaaccagaagcaacgtatcaactcctgacgaacccagctcgggtgatccctgcacaggagaagttcatcaagtttcttgaaaacagccgatacgtccctgtgaaaccagcgccttctggattcatcctcctccgagaccttcagcccactgaggccgaggaccttgcactgaccgatgctcccacagcagttggaggaagcaccggcaacactgccacagctgcaagccaacaggggtccggatcatctgccatggccgttgacgacgagccacaaccgccgcaaccctttgagtactcctcataagcgtagatacctgggtccgtagagggttgtgttggtggtctgaacttgcgattcccctcgtcctttctataccttttgttatcttttttttttttactttctgagtatgtagtgtgcggaaatttgttgttggttggaagactttttgtaggctcgagaattatacttgagtcggctctataggatcatcgttgagaatctgggtgctcttatagctaagccccaacaaccctgattttatcctagccgtgaagtcatacatagagcctgggttattcatctgggttattcattgctgcggttttaatccaactatagcttctataatattttgtcttcatagattgcagctactacagtcggacgaccaacggaggtgttctttaggggcaatcatacctaccacatgggcatgtatattatgttgtatcaacaaacaacgatgtctagtatgacatagctggtaatcgatgtaataatctatatt

SEQ ID NO: 102034 - DNA, 728 bp, Zea Mays
cgcggtactcaaaccctcggtccttctcggcggcggcgtacgggatagcagaggtggccatggcggcggtggccacggtgagctctgccagtgggctccttgctatgctgcaggagccggcgccggagctgaagctgcacgcactcgacagtctcaactccgtcgtccacctcttctggcccgagatctccaccagtgttcccaccatcgagagcctgtatgaagatgaagagtttgagcagaggcagcttgcagcacttgttgtttctaaggtattttactacctgggcgagttaaatgattcactgtcatatgcacttggtgctgggtccctatttgatgtttccgatgattcagactatgcccatgctcttttagccaaagcattagatgaatatgccagtatcaagaccagagcctctaaagctgcaaaggaggaagagaacattgatcctcgattagaggccatagtggagaggatgcttgaaaagtgtattcttgatgggaaatatcaacaggccatgggtatggctgttgaatgcagaaggttggataagctggaggaagcaattgttcggtgtgataatattcatggggctctatcgtattgcatcaatctttctcatcaatatgttaatcaccgtgaatatcgctttgaggtatttagtcattttgctttgttgggggtagacctggctgacaatggattaagacccatatccaattaa

SEQ ID NO: 102035 - DNA, 972 bp, Zea Mays
gatataaagaatccaatgtgcagtgacctccattattccaaatccaacttgttggtgcctataaatgcacaccataccacaacccacagcaatgcacaacacttgcagactctccctccacacagagaagcaaagaaaccacaccacagtcgtaggggaagggagaggagggagggtggcttctgctgggttgccatgtgctatgaggtagagaacgggatgcagccaaggatgacttgccggctcctggaacctggaggcgtctcagcttgctgtgctgtggcttagaacttagtcggcaagtctgtccttggctacacctagttctcttcctctcgtgtatggccctcaagcaccgtcaagagatctaggacctgcattcatatatcatcagcccactccagaggaaacgtaagggcaagtatgcatctaacctcaagttgacatatttctatttctcctgcaattttgggtcttccaaaaaaatcagaaatttgagatatatgaatattattacaaacatacagggcttgcatacaatacaagcccaagccccatctggcatcatacgtcaaatttcatacatgcatctgtcagacaatatatatcctcactattttgtaccattatcgcatgctaatctttgatgtttgatggaaaagagccacttacttgtatcccctattcgcctgatggcgatacagacgaaaaggccaaatcgaagtacagcaggcgctgcacgacaagattcctcgaggctcctgatgctcagcaacagcaaattaaatgtcgtcatagcatctacagtaattaaattgtgtggcatacaaaagaaaacatgtactagcatgcatgacaggatatcggggcagaaaggtagcatcagctagcgttggagttgatgcgtaccatgttgagaaagtgttgcattcttttattcaaaaggggcaaaatgaatagacgataggttac

SEQ ID NO: 102036 - DNA, 691 bp, Zea Mays
gatataaagaatccaatgtgcagtgacctccattattccaaatccaacttgttggtgcctataaatgcacaccataccacaacccacagcaatgcacaacacttgcagactctccctccacacagagaagcaaagaaaccacaccacagtcgtaggggaagggagaggagggagggtggcttctgctgggttgccatgtgctatgaggtagagaacgggatgcagccaaggatgacttgccggctcctggaacctggaggcgtctcagcttgctgtgctgtggcttagaacttagtcggcaagtctgtccttggctacacctagttctcttcctctcgtgtatggccctcaagcaccgtcaagagatctaggacctgcattcatatatcatcagcccactccagaggaaacgtaagggcaaacgaaaaggccaaatcgaagtacagcaggcgctgcacgacaagattcctcgaggctcctgatgctcagcaacagcaaattaaatgtcgtcatagcatctacagtaattaaattgtgtggcatacaaaagaaaacatgtactagcatgcatgacaggatatcggggcagaaaggtagcatcagctagcgttggagttgatgcgtaccatgttgagaaagtgttgcattcttttattcaaaaggggcaaaatgaatagacgataggttacca

SEQ ID NO: 102037 - DNA, 472 bp, Zea Mays
tttcaaacttgaaatcaataacattcaaataatagaattagaattatatctcatttcaataccatggctgattgatattaaacccaatttaattttacgtcctttaatatcgacatccaaacggagtatagatgttttttcttcttctcatgggacattagacaagaagttgatagagataatcttgcgacaaagacatcaacctttgcaatgtatattgtacgacgatacatatttttttgcagtggttcaaaagacaatatgccttattgcattgcatccctccggtggcagcaagataaggaaggtgatgggatggtggttgaaatgtgggtgtcgatggccgcccgatcgagtcgccccagaaaaacgacacgggggcggaagattgttccttttttttgacgtacccagtcgcagtgttcaactatctatgtgaactatgacagtgttatgagaaaatatttgctaa

SEQ ID NO: 102038 - DNA, 1591 bp, Zea Mays
atgtccgtttcgctttcccgtcgccaggttcggttgctcagccaccagtccgactcccctccatcaggaacccatcccctgctgctaccggtgacgggcttgtacaagcgagaaggaattatctgccgaccatttttcaccacactgctgggcattaaggatatgaaggccgtcccacttcctcgcccgagggcagccacgagaaggcgcgcgtggatgctcgccgttgcagcttttatcttcgtcgcactagtctgggcttatctgtatcctcccccgcgttacacctctcctgtgagagattggcttcctggtaggctccctgcggaaccagccagggaattcactgatgaggagagggcctcgcgtgttgttttcagacagatcttaacaacacctcctgttcgatctaagaactcaaaaatagctttcatgttcttgactccggggacactgccatttgaaaggttgtgggaaaagttctttgagggccatgagggaaggtataccatatatgttcatgcctcaagagagaagccagaacatgtcagtcccatatttgttggtcgagagatacacagtgaaaaggtaacttggggtacaatttctatggttgatgctgagaggaggttgctggcaaatgctctacaagacatggacaatcagcattttattttgctatctgatagttgtgtacctttgcacaattttgactatgtatatgactacctgatgggtgcaaatctcagttttattgactgcttttatgatcctggaccgcatggaaattttagatattcaaagaatatgttacctgaggtcacagaggctgattttaggaagggttcacagtggttctcagttaagcgccaacatgcgttgatgatcattgcagatagtctttactataccaagttcaagcttcattgcagacctgggatggaagatggtcgcaactgctatgctgatgaacattatttgccaacagtattccatatgatggacccagatggaattgctaattggtctgtaacccatgttgactggtctgaagggaagtggcacccgaaagcttacagggcaaaggatgtcactttcgagcttctgaagaatataacatcaattgacataagtcaccatgtcactagtgatagcaagaaagtggttacagagaaggcctgcctatggaatgaaacaaagagaccatgctacctgtttgcgagaaagttctaccctgagtccataaacaatctcttgaccttgttcgcgaattatacacttatttgagcttctaggtggcgcttagaggctacacaggaaacattttgttatacaaaaccttgtacattggatagcaacagagtaggacattaattaacagaatagcaatagctattggtgaggagaaggctttcgctgcagcaacacagtggcttcagatttatcacgacaggccattggtactcctttagcctcgttactttcatagtttgtcctctccacatatttttagctgcggttttaccatgtacatcaagcttatttggacaatgaatggtcattaaatggaaaatcagagatcatggtctta

SEQ ID NO: 102039 - DNA, 1838 bp, Zea Mays
accagtctccccccttccgtttttctcgtcgcggtcgcgggtcacagccgccgcgccggtcgcgcccccttcccaagacctcacgctgtcacgcacgtatatcaatcagagcgttggaccttggcacgacctgattcctgatcctcttgcgcgttggaccgcgcccgccgaagctctctctcgcgtcctcttgtttctgccagcgacgacttcgcgcgcggccgcggcgccgccgcctcctgcccaggcccttcgccggcgacaagcacccaccagacgggcttgtacaagcgagaaggaattatctgccgaccatttttcaccacactggtggagtccgagagtaatgagagctgtgaagcttaaatagatgaagttgcatcaagtttggcagctgggcattaaggatatgaaggccgtcccacttcctcgcccgagggcagccacgagaaggcgcgcgtggatgctcgccgttgcagcttttatcttcgtcgcactagtctgggcttatctgtatcctcccccgcgttacacctctcctgtgagagattggcttcctggtaggctccctgcggaaccagccagggaattcactgatgaggagagggcctcgcgtgttgttttcagacagatcttaacaacacctcctgttcgatctaagaactcaaaaatagctttcatgttcttgactccggggacactgccatttgaaaggttgtgggaaaagttctttgagggccatgagggaaggtataccatatatgttcatgcctcaagagagaagccagaacatgtcagtcccatatttgttggtcgagagatacacagtgaaaaggtaacttggggtacaatttctatggttgatgctgagaggaggttgctggcaaatgctctacaagacatggacaatcagcattttattttgctatctgatagttgtgtacctttgcacaattttgactatgtatatgactacctgatgggtgcaaatctcagttttattgactgcttttatgatcctggaccgcatggaaattttagatattcaaagaatatgttacctgaggtcacagaggctgattttaggaagggttcacagtggttctcagttaagcgccaacatgcgttgatgatcattgcagatagtctttactataccaagttcaagcttcattgcagacctgggatggaagatggtcgcaactgctatgctgatgaacattatttgccaacagtattccatatgatggacccagatggaattgctaattggtctgtaacccatgttgactggtctgaagggaagtggcacccgaaagcttacagggcaaaggatgtcactttcgagcttctgaagaatataacatcaattgacataagtcaccatgtcactagtgatagcaagaaagtggttacagagaaggcctgcctatggaatgaaacaaagagaccatgctacctgtttgcgagaaagttctaccctgagtccataaacaatctcttgaccttgttcgcgaattatacacttatttgagcttctaggtggcgcttagaggctacacaggaaacattttgttatacaaaaccttgtacattggatagcaacagagtaggacattaattaacagaatagcaatagctattggtgaggagaaggctttcgctgcagcaacacagtggcttcagatttatcacgacaggccattggtactcctttagcctcgttactttcatagtttgtcctctccacatatttttagctgcggttttaccatgtacatcaagcttatttggacaatgaatggtcattaaatggaaaatcagagatcatggtctta

SEQ ID NO: 102040 - DNA, 1238 bp, Zea Mays
acgcggtcgttctcacgttggcggctggccaccattccctgtctcgtgctcacggcgggcggcagaccgccaggcgccaccgcgccagaccagctgaccagcaggcggcagtgcaggccatcagccgtcacggctctccctcaggtcggcagtgcaggccatcagccgccaaccgatctagtagtgcagaccgccagaggccaggtgaccaggtcggcagtgcagccgtgcaggcggccagccctctccaggcgtccagctaccaccacacacacgaagagcaggcgatgaaaatgtccgcttccgttgcggccgcctcccccaccctccgcttctcctccgccactcatcctctccaccgaccgctccgccggcggctcccgtcggttcgatgctccctcgccgccgccgccggccccggtgtccgggcgccccctgagctcgtcgactccatcctctccaaggtgaagggaactgaccgaggagtgctgctgccaaaagatgggcaccaggaagtggctgaggtcgcgctgcagctggggaagtactgcatagacgaccccgtcaagtccccgcttatattcggagaatgggaggttgtgtactgctcggtgccaacctcgccgggagggctctaccggacgccccttggccgcctggtattcaaaaccgacgagatggtccaggcggtggaagcgcctgacgtggtcaggaacaaggtgtcgttctccgtctttggcctagagggcgcagtgtcattgaaaggtaagctgaatgtgctggacagtaaatggattcaggtcgtgttcgaagcaccagaactgaaggtcggctccttggggtttcagtacggtggcgagagcgaagtcaagctggagatcacctatgtcgatgagaagatcaggctagggagagggtccagaggctcgcttttcgtcttccttagacgatgatagaatggcatgcatgtgtgttgagacttcagacccacaagcaccgatgaggggtggcgctgacgcggtcgtttgtacaatactgtgttcaggacttctatacgtttatgtaaaaattctggcgtccagctgggtaattctggcgtttcagtacggtggcctgatgaatgttgttgtgtagtttgtagcatccattattagtgctgtaagatgatgttttgaattctgatacaccagtgcgagtgtgatgaaccaaattcatacgacacgtttggaccatagaaa

SEQ ID NO: 102041 - DNA, 985 bp, Zea Mays
tctacggctctacggagggataggtcgctcttcttcctcactgagagaccatgagacgggtcgagacgacagcggcggatgcaccccacgacctccagtgactctcccagtcccaggctcccagccccccttcctcccgcctccgcgagaccgcgatggcagtcttgctgtggcggtgcatatgcgggccccaacaatccttcagtaagaatcgaggcgcatccaccccttctcctcttgctggcaggagatccaaatactcgggacaatctgtgaaagcaatgcccatgcgtttgttaacggttggaaagaagaggtctcgggggacacaactccttgttgaagaatacaaggagaagctcggtcactattgcgagttcgaggacactcttatcaggtccaacccaaagcttacaagtgatgtaaaggtgcaagttgaagcagaagacacggctatgatgcagcaactcaagtctgacgattttgtagttgtgctggatgaaaacgggaaggatgtcatatccgagcagatagctgatctgattggggatgctggcaacacaggatcatcaaggctcacattctgtatcggtggaccatacggtctcgggttacaagtgcgagagcgtgcagatgcaacgattaggctgtcctcactagttttgaaccatcaagttgccttgatagtcctcatggagcagctctacagggcatggactataataaaaggacagaagtatcaccattaggcctaagtgctatcatcattcgctgctgtatgtaggacttgaaaaatggaagactgcattaataaatttgcaggtatagtgttcaaaggactcattgtactttccattcgggtagaaccccaaaattgctcaaaatggttttctttgacatgttcgaatgttcattatcgatgactgtcagtttccagcacaacatggacacttgtaaataagaagaaattctgctgggtgcttta

SEQ ID NO: 102042 - DNA, 225 bp, Zea Mays
atgaggcctagtcattgtgctgaaaaccaggaagaagcgatgcaacaaaccctacaacaaccagctggatctctttcaagacaccttccagccaattacgccgattgccttctacctctgcctcttgtggattctcgttaccagctgcagcatcttgttcacggttctctgcagcttggtcagggtttgcagggtctgcaagatttttcccaacagcagaagtga

SEQ ID NO: 102043 - DNA, 168 bp, Zea Mays
atacgtagagcacaaacaatacggaaaacagtaaatggaagctaccattgggctgctcattgccatcattctgggcaggcagagcagcacggttctcggcccgagcaggagcctgtggtggatgagcagctgcacctcccgcccgctgaagccatctaacaaaaggta

SEQ ID NO: 102044 - DNA, 605 bp, Zea Mays
gtctcgacacttccatcaccgcccatcgaaatccttctaccgccccgctccgtcatccatggctcgtctgctcgcggcgcgagcccttgcgctggcccgcccctcggggacgccatccgccctacgcttctgcccctcccgtgcgctgtcggacgaggtggagttcgtcgagatcgacctatccgaggagtcccctgcctcttcatccggaggggaaggcgagggcgactcagccacggttcaggcgcagatggggtcgcggcgcctggaggacgccatctatggggtgctcgtgcgccgggcggcgcccgaatggctccccttcgtgcccggggcatcctactgggtcccgccgttgccgcggccgctcggggtggcgagtctcctcggcgcggctgtgtacaccgcgaggggcgccacggcgatgacggaggaggaggcgttcagcttcactaccgtacgggggtgtccatccgcggcgtactttgtgggaggaaaatttctgcgtccagtgaagaaatcaagggaagatgctactcaaactgacgatgatgatgaaagctaattctatgctgcttcacctggggctcctaccgaagagggct

SEQ ID NO: 102045 - DNA, 1247 bp, Zea Mays
atgggggaggtggagaaggtgcggggagagggaaagcggccaagcgcagtgcgggagcgaagcaccgaagcagacagggaggaggactggcacacacttggaatgatcactgaagtttctgaggtcagaccaatacaactaactgggaaatcatctgtgtaccgaaatgtctttatcaagaacctaagtggcgacatgctcaaagttactctttggggaaatcgagcgttacaattctcatatgaacctatatatgatcagcaaaaacaagatgtcattgttgttctatttgttggatgcttaccaaaagaatataaagcttgccactggtatttcaatccatccattactgaagctgaaccatactatgaaaggattcataatgaaaatataaagattgaactccctatgctatcgaatgaaccagtgacctttcctaatcctattgagagagaagacaaagaattaaaagtgctcttagaatctgacccagattcgctaccagatgaaggttgtaagtgcactgtcaccattactagaatacttgatgatcaaccgtggtggtacagagcatgtaatgcatgtccaaataaaccatccatgcaatcagcagtgtcctcatgtcgtacatgtggctctacagatgctattctaaggtacaaactgaacttcatggcttccgatggcactgctgaaatgcgaatgttctgtttcgacaacattgccaagagaatcattggaaaaccatgcgcttctctcttaacatcagctacaagcacttccaatattccaccagatttagcagcgattgtgtccctcaaattcacatttgctgttgtttacaatgaaatgtcgtttcaagtttcagaaaaagaactcttcatcaagtcagtcatagcttcacatggaagagacctaactttcccgtcacccaaactaaagattccagtgcaaccgtcaactccaacgcaactactaggtgcagcaaaacagcaagtttcaccttcttcatcattgtcgaaactatcgactgccatttctccagagaatagtcctcaaactgaagacaatcttcaaaatgaagaccagaacatactggcttttgaatcaccacaaaaaagggctaggcgtaaatccttgaagtttgactgtgacaaaaatctacacgatgaataaaaatgtatggttccatttattccatttattcataaatattatctattgtaatcctttacttcagttacagc

SEQ ID NO: 102046 - DNA, 1499 bp, Zea Mays
atgggggaggtggagaaggtgcggggagagggaaagcggccaagcgcagtgcgggagcgaagcaccgaagcagacagggaggaggactggcacacacttggaatgatcactgaagtttctgaggtcagaccaatacaactaactgggaaatcatctgtgtaccgaaatgtctttatcaagaacctaagtggcgacatgctcaaagttactctttggggaaatcgagcgttacaattctcatatgaacctatatatgatcagcaaaaacaagatgtcattgttgttctatttgttggatgcttaccaaaagaatataaagcttgccactggtatttcaatccatccattactgaagctgaaccatactatgaaaggattcataatgaaaatataaagattgaactccctatgctatcgaatgaaccagtgacctttcctaatcctattgagagagaagacaaagaattaaaagtgctcttagaatctgacccagattcgctaccagatgaaggttgtaagtgcactgtcaccattactagaatacttgatgatcaaccgtggtggtacagagcatgtaatgcatgtccaaataaaccatccatgcaatcagcagtgtcctcatgtcgtacatgtggctctacagatgctattctaaggtacaaactgaacttcatggcttccgatggcactgctgaaatgcgaatgttctgtttcgacaacattgccaagagaatcattggaaaaccatgcgcttctctcttaacatcagctacaagcacttccaatattccaccagatttagcagcgattgtgtccctcaaattcacatttgctgttgtttacaatgaaatgtcgtttcaagtttcagaaaaagaactcttcatcaagtcagtcatagcttcacatggaagagacctaactttcccgtcacccaaactaaagattccagtgcaaccgtcaactccaacgcaactactaggtgcagcaaaacagcaagtttcaccttcttcatcattgtcgaaactatcgactgccatttctccagagaatagtcctcaaactgaagacaatcttcaaaatgaagaccagaacatactggcttttgaatcaccacaaaaaagggctaggcgtaaatccttgaagtttgactgtgacaaaaatctacacgatgaataaaaatgaaacaagtctggcttcaaagttggaacttctacgcagcagcacatgtatatagcttttaccttacttggaaaacaatgtccagacaacttttgttgatgcatcctactatatatgtatgaagtctcatgtactcctaaaaatatatgtatatatgagtactactaaacaagaactgtttgaagcttgctacaccctatggtgacaatttactatgtaatgcaatgcttacagtcgtctgtatcgctctatatacatgtgtaatagtataataatgtcccttctatatgatttagatagaaataagtattaaatttcca

SEQ ID NO: 102047 - DNA, 590 bp, Zea Mays
ctgccattccataagaagtccgtagtacgtactcgtactttaggtcgtcatggagtcattgaaaagccttgtgttgtcctcgtcatccgacgattccgacgatgagatcgataccttgttgcttgccgaacatgttgagcaccttgtagtaggagacacgagcacgcgtcgtaggcgctcctcattgcctcgccgagttatccatagggaccacgctgctggagaaaatctcataaaacatcactacttcggacctaatcctgtgtatccatcacatgtctttcgtcgaaggtttcggatgcatcgtcctttgttcctacgtatccttcgtgccgttcagcgagaagacgaatacttcactattcgttgtgatgcaacaggtttagcagggcttggtccattgcaaaaagtttgtgctgcattgcgtatccttgcgtacgggttaccaaccgatgcggtagatgagtacatacagattggacagactaccgctaaggactgccttatccgtttttgtcgcgcaatcatctcttcctttagcgaacgataccttcgtatccctaaccacgacgacattgctcgcatactac

SEQ ID NO: 102048 - DNA, 740 bp, Zea Mays
ctgtgtttgatccgttacgtaatgggacgatgccaccagtgcacttcactattaatgggacaacttacaatttcggatactacttagcagatggcatatatccaaattggcctacctttgtaaaagctattcgccacgcatttgaggagaaaaaggttcactttacaaccaagcaagagagttgtcgaaaagacattgagcgagcatttggagttttgcaggctaggtgggctgttctacgtggacctgcttatggttgggatcgtaatcacctcgcagagatgatgactgcttgcattattatgcacaacatgattgtcgaggacgaaggagatggtgcagctaatgtcgacttcattggcccctctgggccgcctgaaccgtgcaacaatactgctgagggccgcaacgagtggctgaacaatcatatccgctcggagttacccaacgatccggaccaggacatcacctgtcaggcaacatacttgtctttacagcacaacctcatagaacacatgtgggctcgtcgaggctccatgggttgatgcattttatccaaatgatgtgctacaccaatgttgtttactttcaattatgatgtgtaccaggattagtagtcgtatgtggtttgtatgtccgtagttcagaagtcatggttccttgtaagtgtaatgcctctagtacaaataagtttgcatatgtttcccaacttcaagtaatgtatcataatccttattatc

SEQ ID NO: 102049 - DNA, 1316 bp, Zea Mays
ccacacccagaaatccagaaccccagttcggttcccccatatctagcggtcgacgctccgccatccttctccaggactgccaagccaaccagcaagtcgatcttcttcttcggctcttcctctgctgacatcgctcgctcggtttcttgttggatcgtcgagcccggccggagagcagaggcagctaactgacagcagcgcgcgcgcagaggagaagcgaaatggcggcggcgacgatgggcgtggtgcgggtgctgtgcggcgcggagaaggagcgggtggtgggcgcgcacaaggcgcccggggcgtgcccgcgctgcggcggggccgtggtggccgtcgacgtggagagcgagcggcgcgtcctcggcctgccgctgtgcctcaagagcaagcgcaagtactcctgcacccgctgcctccgccgactcgtcaccctctgcggctgaaggatcggacgaggcacacaccctcttgttgccagcgccaggccgccagccggccggttgtcgccgatgaagcagctccgatggctcgagagctcgtcatttgacaagttaatgatccgcttcagtttcttgactaagggtgcccgtcaatgtcctgcgcggtatggccagcgtgttcctcctaatcagtggcggacctaagtcccagacaatcctgggctcttgcccaggctcctattcctgctgcttcaacgatgtctctctgcttcaacaagctagctaatcggtgcttctagctagttccctgtaataatgtaaatgatagtacgtactccctccgtttttttttattagtcgctggatagtgtaattttgtactatccagcgactaataaaaagaaacggagagagtaattatcagggctcgtagtcgtatggcgaccggcaccggcggtcagcagaggcggcgagccggcaaccatgcgaaaaagaggccgctcgctgcggccgtcaccatctttgcttggaaatagtgtagtaaaactattcatagtactgtagtaaagagagtgtaactttctgttggtgctctgccgatttgtgtggtcactcatcgtcgaccagagcctcgtacacctgacaacacatatgtttcctattaatagatcacattcttggatttctggtggagacaattttttttaaaaaaaattcgtaggggttagccttcggcattattgaaatggtcattcatgcaattttcgacagccttgaatttctaggggagaccatttcttggtcaaaaatctgtaggtgttagccttcagtattattgaaaatgttcgttcatgctattgtcgacaaaaa

SEQ ID NO: 102050 - DNA, 669 bp, Zea Mays
cgagcacgcgctcgctttcgcactgcgccgccgccttggtccgctccgctatatatgcagaagaggctgagccgtgagcccaccaccaccaccacgaccaccaccggataaacccgtcgtcgtcttccttccccagaacagaaccccgttctgtgtgtggtcttgggtgggacgaggccggagcagatcgagccaagagacgaaaagaaaatggcggcgttgcgcgcggtgaaggcgctgtgcggcgcggagaaggagtgggtggtgggcacgcacaaggcgcccggggcgtgcccgcgctgcggcggcgccgtggtggccgtggacgtggagagcgagcggcgcgtcctgggcctgccgctgtgcctcaagagcaagcgcaagtactcctgcaccaagtgcctccgccgcctcgtcaccctctacggctaggctccgaaggcgcacacacaccaagtgccggcggcgggccacgctgaggctccgtccggcggtagctggatctggtccgcgcgtcgatcgacctgctagtgctaggtggtgttgcttcggtcttggttgaggcgaagactaatgtaatgtgttcttatagccggtagtaggaagctaatcagtgattgtagctgcttgtaaatgtgaattgtagcggtaagaataatagttactgct

SEQ ID NO: 102051 - DNA, 3426 bp, Zea Mays
aaagtgcgggccgagatggagtcctcgtcgtcgggcggcgggctggcgcggcggcggagtagcggcggctggggcagcttcagcggcgacacggacccgttcgacatccccgcgaagggcgcacccctcgagcggcttaggaagtggcggcaagcagcccttgtgctgaatgcatcaaggcgctttaggtacacactcgatttgaaaaaggaggaacaaaatgaggaaatcaggagaaaaattcgtgcaaaggcatatgttataacggctgcttttcgtttcaaagaggctggccgagtccatgttcggtctgaagaaacaaaagtaccgattgctgatggtgcacttggctttggaatcaaagaagacgagattacagcactgacaagggatcacaactactctggtctgcagcaatatggaggggtttctggtgtagcacatatgctaaaaaccgattcggagaagggcattagtggagatgactcagatttgatagcaaggaaaaatacatttggttcaaacacatatcctcgtaagaaaggaagaagttttttggctttcgtatgggatgcttgtaaagacctgacgctaatcatcctcatggttgctgctgctgtttcactggcattgggcataacaacagagggcataaaagaaggctggtatgatggagcgagcattgcctttgctgttcttctagttgtatttgttacagctatcagcgactacaagcaatcactacaatttcaaaatctgaatgaagaaaaacagaacattcgtttggaggttgttagaggtggaaggcgaatcacagtatcaatatatgatttggttgttggagatgttgtccctctcaaaattggtgaccaggtccctgctgatggtatccttatcaatggccactctctttccatagatgaatcaagcatgacgggagaaagtaaaattgtacacaaagatcaaaagtcgccatttctaatgtcaggttgcaaagttgccgatggctatggcacaatgctggtaactgctgttggagtcaacactgaatgggggttgctaatggcaagcatatctgaagattcgggtgaagagacaccactccaggttcgtttgaatggtgtcgctactttcattggaatggttggactttctgttgcccttgcagttctggttgtacttttggccaggtacttcactgggcatacttataatcctgacggatctgtgcaatatgtgaaagggaagatgggtgtaggccagacgatacgtggagtagttagaatattcacagtggctgtcactattgtggtcgtggctgttccagaaggactaccattagctgtcacactgacgcttgctttctcaatgcgcaaaatgatgaaggacaaggctctggtcaggaggctttctgcatgtgaaacgatgggttctgccacaacaatctgcagtgacaagactggcaccttaactttaaatcagatgactgttgttgaggcatattttggtggaaagaagatggactcaccagataatgcacaaatgttatctgctgatgtcacatcactgattgttgaaggaattgcacagaacacttctggaagcatatttgagcccgagggtggtcaagaaccggaggtgactggatcacctacagaaaaggctatattgtcttgggggctaaagctgggtatgaaattcaatgaaacaagattgaagtcatctattcttcatgtatttcctttcaactcagagaaaaagcgaggtggggttgcagtgcacctggatggccctgaagtccatatacactggaaaggagcagctgaaatcattttggattcatgcacaagctggcttgacactgatggttcgaagcactcaatgactcctgaaaaaattgctgaattcaagaaattcattgaagatatggctgtggctagcctccgctgtgttgcctttgcctatataactcatgagatggatgatgttccaaacgaagatcagagggcagagtggaaactgcctgaagataacctcattatgcttggaattgtgggaataaaggatccctgccgtccaggagttcgagattctgttcgtttatgtcaggcagctggcattaaggtgcgcatggttactggtgataatcttcaaactgcgagagccattgccctggaatgcgggatacttgatgatcccaatgtgttggagcctgtcatcattgaaggaaaagcattccgggtgctgtcagacttagaaagggaggaagctgctgaaaaaatatctgtgatggggaggtcttcaccaaatgataaacttttacttgttaaggcactgagggcaagaggtcatgttgttgctgttactggagatggcacaaatgatgccccagcactgcatgaggcagatattggtctatcaatgggcattcagggaactgaagttgccaaggagagttctgatattattatcttggatgacaatttcgcatcagtcgtgagggttgtcagatggggtcgttcggtgtatgcaaacatacagaagtttatacaattccaactaacggtcaacgtcgcagctctgataatcaatgtagttgctgccgtcagttctggaaatgtgccgttgaatgctgttcagttgctgtgggttaacctaattatggatactttgggtgcccttgcattggcgacagaaccacctacaaaccatcttatggagagacccccagtagggagaagggagccattgattacaaatatcatgtggagaaacttaattatcatggctttgtttcaagtttcagttctcctcactctcaacttcaagggaataagcctcctgcagttgaaaaatgatgatccagcacatgcagataaagtgaaaaataccttcattttcaacacatttgttctctgccaggtgttcaacgaattcaattcgcgtaaaccagatgagctgaatatattcaagggcatttcagggaaccatctgtttattggcatcatagctataacagttgtactccaggcgcttatcgttgagttccttggcaagtttgcctcaacggtaaggctaagttggcagttgtggttggtatcgataggtcttgctttcttcggctggccgctggcattcgtggggaagcttattcctgttcctaaacgtccattgggagaattctttgcatgctgctgtatctgcaaggggagcaaacaagcccctgatgacgcaacctctaatgataaggaagacaacaagcccgagccttgagatgtcagcaagattgatggttgctaacaatgaccttgtgctgtttcttaccgggttttgacgtgttggatttgtgattaccactgattgctattgtacttcaaacaggaaggctggaaatgcaactcggcttctcatgagaccttgtcattt

SEQ ID NO: 102052 - DNA, 3559 bp, Zea Mays
aaagtgcgggccgagatggagtcctcgtcgtcgggcggcgggctggcgcggcggcggagtagcggcggctggggcagcttcagcggcgacacggacccgttcgacatccccgcgaagggcgcacccctcgagcggcttaggaagtggcggcaagcagcccttgtgctgaatgcatcaaggcgctttaggtacacactcgatttgaaaaaggaggaacaaaatgaggaaatcaggagaaaaattcgtgcaaaggcatatgttataacggctgcttttcgtttcaaagaggctggccgagtccatgttcggtctgaagaaacaaaagtaccgattgctgatggtgcacttggctttggaatcaaagaagacgagattacagcactgacaagggatcacaactactctggtctgcagcaatatggaggggtttctggtgtagcacatatgctaaaaaccgattcggagaagggcattagtggagatgactcagatttgatagcaaggaaaaatacatttggttcaaacacatatcctcgtaagaaaggaagaagttttttggctttcgtatgggatgcttgtaaagacctgacgctaatcatcctcatggttgctgctgctgtttcactggcattgggcataacaacagagggcataaaagaaggctggtatgatggagcgagcattgcctttgctgttcttctagttgtatttgttacagctatcagcgactacaagcaatcactacaatttcaaaatctgaatgaagaaaaacagaacattcgtttggaggttgttagaggtggaaggcgaatcacagtatcaatatatgatttggttgttggagatgttgtccctctcaaaattggtgaccaggtccctgctgatggtatccttatcaatggccactctctttccatagatgaatcaagcatgacgggagaaagtaaaattgtacacaaagatcaaaagtcgccatttctaatgtcaggttgcaaagttgccgatggctatggcacaatgctggtaactgctgttggagtcaacactgaatgggggttgctaatggcaagcatatctgaagattcgggtgaagagacaccactccaggttcgtttgaatggtgtcgctactttcattggaatggttggactttctgttgcccttgcagttctggttgtacttttggccaggtacttcactgggcatacttataatcctgacggatctgtgcaatatgtgaaagggaagatgggtgtaggccagacgatacgtggagtagttagaatattcacagtggctgtcactattgtggtcgtggctgttccagaaggactaccattagctgtcacactgacgcttgctttctcaatgcgcaaaatgatgaaggacaaggctctggtcaggaggctttctgcatgtgaaacgatgggttctgccacaacaatctgcagtgacaagactggcaccttaactttaaatcagatgactgttgttgaggcatattttggtggaaagaagatggactcaccagataatgcacaaatgttatctgctgatgtcacatcactgattgttgaaggaattgcacagaacacttctggaagcatatttgagcccgagggtggtcaagaaccggaggtgactggatcacctacagaaaaggctatattgtcttgggggctaaagctgggtatgaaattcaatgaaacaagattgaagtcatctattcttcatgtatttcctttcaactcagagaaaaagcgaggtggggttgcagtgcacctggatggccctgaagtccatatacactggaaaggagcagctgaaatcattttggattcatgcacaagctggcttgacactgatggttcgaagcactcaatgactcctgaaaaaattgctgaattcaagaaattcattgaagatatggctgtggctagcctccgctgtgttgcctttgcctatataactcatgagatggatgatgttccaaacgaagatcagagggcagagtggaaactgcctgaagataacctcattatgcttggaattgtgggaataaaggatccctgccgtccaggagttcgagattctgttcgtttatgtcaggcagctggcattaaggtgcgcatggttactggtgataatcttcaaactgcgagagccattgccctggaatgcgggatacttgatgatcccaatgtgttggagcctgtcatcattgaaggaaaagcattccgggtgctgtcagacttagaaagggaggaagctgctgaaaaaatatctgtgatggggaggtcttcaccaaatgataaacttttacttgttaaggcactgagggcaagaggtcatgttgttgctgttactggagatggcacaaatgatgccccagcactgcatgaggcagatattggtctatcaatgggcattcagggaactgaagttgccaaggagagttctgatattattatcttggatgacaatttcgcatcagtcgtgagggttgtcagatggggtcgttcggtgtatgcaaacatacagaagtttatacaattccaactaacggtcaacgtcgcagctctgataatcaatgtagttgctgccgtcagttctggaaatgtgccgttgaatgctgttcagttgctgtgggttaacctaattatggatactttgggtgcccttgcattggcgacagaaccacctacaaaccatcttatggagagacccccagtagggagaagggagccattgattacaaatatcatgtggagaaacttaattatcatggctttgtttcaagtttcagttctcctcactctcaacttcaagggaataagcctcctgcagttgaaaaatgatgatccagcacatgcagataaagtgaaaaataccttcattttcaacacatttgttctctgccaggttctgcgttttagcttttgcttagaaaagatgtttctgcctttttgtctaatgcggctccggagctttatacaacaaacgcagtagtggcctgacatgtgtaattttgtcttcttaggtgttcaacgaattcaattcgcgtaaaccagatgagctgaatatattcaagggcatttcagggaaccatctgtttattggcatcatagctataacagttgtactccaggcgcttatcgttgagttccttggcaagtttgcctcaacggtaaggctaagttggcagttgtggttggtatcgataggtcttgctttcttcggctggccgctggcattcgtggggaagcttattcctgttcctaaacgtccattgggagaattctttgcatgctgctgtatctgcaaggggagcaaacaagcccctgatgacgcaacctctaatgataaggaagacaacaagcccgagccttgagatgtcagcaagattgatggttgctaacaatgaccttgtgctgtttcttaccgggttttgacgtgttggatttgtgattaccactgattgctattgtacttcaaacaggaaggctggaaatgcaactcggcttctcatgagaccttgtcatttgctgtagttcgttcg

SEQ ID NO: 102053 - DNA, 3468 bp, Zea Mays
aaagtgcgggccgagatggagtcctcgtcgtcgggcggcgggctggcgcggcggcggagtagcggcggctggggcagcttcagcggcgacacggacccgttcgacatccccgcgaagggcgcacccctcgagcggcttaggaagtggcggcaagcagcccttgtgctgaatgcatcaaggcgctttaggtacacactcgatttgaaaaaggaggaacaaaatgaggaaatcaggagaaaaattcgtgcaaaggcatatgttataacggctgcttttcgtttcaaagaggctggccgagtccatgttcggtctgaagaaacaaaagtaccgattgctgatggtgcacttggctttggaatcaaagaagacgagattacagcactgacaagggatcacaactactctggtctgcagcaatatggaggggtttctggtgtagcacatatgctaaaaaccgattcggagaagggcattagtggagatgactcagatttgatagcaaggaaaaatacatttggttcaaacacatatcctcgtaagaaaggaagaagttttttggctttcgtatgggatgcttgtaaagacctgacgctaatcatcctcatggttgctgctgctgtttcactggcattgggcataacaacagagggcataaaagaaggctggtatgatggagcgagcattgcctttgctgttcttctagttgtatttgttacagctatcagcgactacaagcaatcactacaatttcaaaatctgaatgaagaaaaacagaacattcgtttggaggttgttagaggtggaaggcgaatcacagtatcaatatatgatttggttgttggagatgttgtccctctcaaaattggtgaccaggtccctgctgatggtatccttatcaatggccactctctttccatagatgaatcaagcatgacgggagaaagtaaaattgtacacaaagatcaaaagtcgccatttctaatgtcaggttgcaaagttgccgatggctatggcacaatgctggtaactgctgttggagtcaacactgaatgggggttgctaatggcaagcatatctgaagattcgggtgaagagacaccactccaggttcgtttgaatggtgtcgctactttcattggaatggttggactttctgttgcccttgcagttctggttgtacttttggccaggtacttcactgggcatacttataatcctgacggatctgtgcaatatgtgaaagggaagatgggtgtaggccagacgatacgtggagtagttagaatattcacagtggctgtcactattgtggtcgtggctgttccagaaggactaccattagctgtcacactgacgcttgctttctcaatgcgcaaaatgatgaaggacaaggctctggtcaggaggctttctgcatgtgaaacgatgggttctgccacaacaatctgcagtgacaagactggcaccttaactttaaatcagatgactgttgttgaggcatattttggtggaaagaagatggactcaccagataatgcacaaatgttatctgctgatgtcacatcactgattgttgaaggaattgcacagaacacttctggaagcatatttgagcccgagggtggtcaagaaccggaggtgactggatcacctacagaaaaggctatattgtcttgggggctaaagctgggtatgaaattcaatgaaacaagattgaagtcatctattcttcatgtatttcctttcaactcagagaaaaagcgaggtggggttgcagtgcacctggatggccctgaagtccatatacactggaaaggagcagctgaaatcattttggattcatgcacaagctggcttgacactgatggttcgaagcactcaatgactcctgaaaaaattgctgaattcaagaaattcattgaagatatggctgtggctagcctccgctgtgttgcctttgcctatataactcatgagatggatgatgttccaaacgaagatcagagggcagagtggaaactgcctgaagataacctcattatgcttggaattgtgggaataaaggatccctgccgtccaggagttcgagattctgttcgtttatgtcaggcagctggcattaaggtgcgcatggttactggtgataatcttcaaactgcgagagccattgccctggaatgcgggatacttgatgatcccaatgtgttggagcctgtcatcattgaaggaaaagcattccgggtgctgtcagacttagaaagggaggaagctgctgaaaaaatatctgtgatggggaggtcttcaccaaatgataaacttttacttgttaaggcactgagggcaagaggtcatgttgttgctgttactggagatggcacaaatgatgccccagcactgcatgaggcagatattggtctatcaatgggcattcagggaactgaagttgccaaggagagttctgatattattatcttggatgacaatttcgcatcagtcgtgagggttgtcagatggggtcgttcggtgtatgcaaacatacagaagtttatacaattccaactaacggtcaacgtcgcagctctgataatcaatgtagttgctgccgtcagttctggaaatgtgccgttgaatgctgttcagttgctgtgggttaacctaattatggatactttgggtgcccttgcattggcgacagaaccacctacaaaccatcttatggagagacccccagtagggagaagggagccattgattacaaatatcatgtggagaaacttaattatcatggctttgtttcaagtttcagttctcctcactctcaacttcaagggaataagcctcctgcagttgaaaaatgatgatccagcacatgcagataaagtgaaaaataccttcattttcaacacatttgttctctgccaggtgttcaacgaattcaattcgcgtaaaccagatgagctgaatatattcaagggcatttcagggaaccatctgtttattggcatcatagctataacagttgtactccaggcgcttatcgttgagttccttggcaagtttgcctcaacggtaaggctaagttggcagttgtggttggtatcgataggtcttgctttcttcggctggccgctggcattcgtggggaagcttattcctgttcctaaacgtccattgggagaattctttgcatgctgctgtatctgcaaggggagcaaacaagcccctgatgacgcaacctctaatgataaggaagacaacaagcccgagccttgagatgtcagcaagattgatggaaggctggaaatgcaactcggcttctcatgagaccttgtcatttgctgtagttcgttcgcaactgtatattgtagcttggaagactctgtgccgtggtgcgtgtatttgagaaatttctatgcaaagtgagctggcgataacattggatggcgcagcaaagcatcgcgcgcagtg

SEQ ID NO: 102054 - DNA, 697 bp, Zea Mays
ggactttgccacgaataccttttatcagaaatggggggaacgataaaggatgctggaaaatgagatattattagggcatgtacagtggagagacaccaaaacggttctccaagcacaggagacaactaagagactatattgtacaatggagtgtctataaacgtagtctattaataaatatagaattaaatgtatttgtatagcatcagatcgatagaacagacgacaaattcgtacagtgggaagtgaggcgtctgttgttacttggtttacgagccagaggcgtctcttcacggagagacggctctaagatttttttgcaaataactccctaaaacaccttaagagcccccacgttaaacaccactgtacatgcccttatctatactatacttaaagcaccagtttcaacggtcgttctacgtcatattttttcaaataacccctcacatctatctcaaattaacttgcatccccatacacacaacattcatgtccagcccgttagccagtcgggtggttaaattagcgtaaaatatttttaaaaaagtggtgtagaaggtggggttcaaacctaagtcttgatggaagaaggacgggagacactaagtgaagtcgtctaaccagtagaacatcatcatgatcaattgtttttaatattgaatataaattgtacatatgtatatacgagttttgt

SEQ ID NO: 102055 - DNA, 1549 bp, Zea Mays
acatcttaggcgcgtacgtgcatccatggaccatggtgtggtgccaattatgtcagttgtcgtctcttctactctctgcaatctttactgatgatagtggcatcgtcttcttcctcctttttccatttgttttcaggagtgggatcgagacgacatgagggacatgggagagaagaggagacacgggcatggacatggacatggacatcttgttgggtttggagctggaggggttgttggacatgccgcagagcatgaggagaagcgcatggagcagaagaagctggacatgagcagcatgtccatggacaccctgccacatctcaccacgcctcttggcaacatcactaccctggatctctccaacaacaacctacagagcattccggagtccataatcgcgaggctcctgaacgtggtggtgctggacgtgcgctccaaccagctcaagtcgctgcccaactccatcggctgcctctcaaagctcaaggtcctcaacgtctccggcaacctgctccaagaactcccggccaccatcgaggaatgccgtgcgctggaggagctgaacgccaacttcaaccagctgacgaggctgccggacacgctgggcttcgagctccacggcctccggcggctgtccgtcaactccaacaagctcgcgtacctgccgtcgtccacctcccacatgacggcgctgcggtcgctggacgcgcgcctcaactgcctccgcgcgctgcccgacgggctggagaacctcggcggcctcgaggcgctcaacgtgagccagaacttccagtacctgcgggagctgccctacggcatcggcctcctcgtctcgctccgggagctggacgtcagctacaactccatcgccgcgctcccggactccatgggctgcctcaccaagctcgccaggttcagcgccgcgggcaacccgctggtgtgcccgcccatggacgtcgtcgagcagagcctcgacgccatgcgcgcctacctcagcgcgcggatgaacggcaccgccaaggccaagaagaagagctgggtgcccaagctggtcaagtacagcaccttctcggcggggatgatgacgcccggccgcaccaaggtgcacgggaacaacaccgacggcctccacatgtcggattaccggtcgctcgacggcggcggcgttgcgtcgtcggcgtttctcagcatgctgtcgccccggcgtctcttctcgccgcggagaaattcggccaagcactagtagcttagcagtggccactggttcggcgggctatacatgtgtgctccctccttattgctggctatttgcttgctgcttcgatgttcatatgacatgcacgtactgtagcgcaagctgaagctaatgatcttgctactgcagttgtatatgctttgaagagaggtatatatgaagtgtgtatagtagcacgtagtgcaatagggcattaatgtacataagaattaagggtgtctttctttccattgtttacatttgcgttagtgcttatgctggagtagtctttttgaaggaaattgtgtcatc

SEQ ID NO: 102056 - DNA, 1283 bp, Zea Mays
atggtcgtcgctggtggggatgccgatgttgccgggggggcttccagcctcggtcgtcgccgtgagatcgccgattggtgggagcgggtcgccgatgcgaccgtcgccgggggagcccttcctgctgcggtcgtcgccggtgtgggagaagagttggcagatggggccggcttcggcggaggcgggcagttcatcggcgtccttctagccgtcgctgttgcggagcagttcgcagacgacctaccagcataggccgtcacctcgctcgccggcacaattcggcgtcaccgctgctcgacgagctccggatgacgtgcgcgcgcgccgtgatgtattattacttgtgtattatatgtggttgtcagggtagaggaggggctgctgggtcggagggacgccttattgctcggcatcgtcttcttcgccgcgacgccggcgctgctcacccctgccagcgctctggcggacgaggccaccgccggctggctggtcggcgccggcgaggccagcagcatcaagtccgtcacggcgttctaccccgagcaggctgccgccgactccagcggcttctgcgtctctctctctcttcttccctcgccaccagtcagcgtcgccatcaccgggagcgggccggacttcaccagcctcaagtccttgggcgacgtcgatgccttcgccgagggcctggtgaacggcctgggcaggagctggcagaggtcgccggggctcgccgccaagctcatccactccaaggcggcaaacagcctgtactacctggaatacacgctgcagaaccccggcgagcggcggcggcacatcgtctcggccatcgggatggccttcaacggctggtacaactgcctccactgcgacgacccaggtgagccaggagctgcaccaagttcacgcttcatattcgcagagaagaatgcaaactatgttctgcttacctgaacaataagtgtcttgagaagctttttctggattccaccgtggtcaagccttgtgatgaaatcagatgatgatgacgcaattggcttctgtgacctacaattatgggcatgctgatgctacctagaaccttactacactggatgacaggtgaataagcagacaatagttgagtgttgtcatcaggttgcatctagaagccccatgactgagattgtgagcttatgtatctgtcgatcattgtattactcactctttctcagtataagttgagtactcagcatactacatatatcacttaatttgttgtttctataatacacagttccatt

SEQ ID NO: 102057 - DNA, 791 bp, Zea Mays
aatgcatataccaaatccagcgtgaaccgctacaattactttacaagtccaataaaaatgttgcaccaaaagcatgattaaaaaaagccatgacttgaatatttacccaaactcaagcatgtcattcttcagggtgaggaacagaaccatgaactttttttatggaaaactgaattgtcttatatcatctgaaatatctagccaaaacagccaattttcagcaatattcagcttggttggattggtgttatctctagcaatgagaactctaacagactgtcagtccatagctaccacgaaatgagctcaaaatggaatacacagcacaacagaaataacatgtttttcttgcaacatttgttctctgcgttcagttaaaacgagctattgcttgcaggagctgcaccaagttcacgcttcatattcgcagagaagaatgcaaactatgttctgcttacctgaacaataagtgtcttgagaagctttttctggattccaccgtggtcaagccttgtgatgaaatcagatgatgatgacgcaattggcttctgtgacctacaattatgggcatgctgatgctacctagaaccttactacactggatgacaggtgaataagcagacaatagttgagtgttgtcatcaggttgcatctagaagccccatgactgagattgtgagcttatgtatctgtcgatcattgtattactcactctttctcagtataagttgagtactcagcatactacatatatcacttaatttgttgtttctataatacacagttccatt

SEQ ID NO: 102058 - DNA, 1827 bp, Zea Mays
tttctgtcagttgagatcagcaagaatgcaatttacgctgattgccgacattgagctgatctttcctcgggcattcgggctcttagccgtcatggtgaatggccacgatgattgatgagtacaaaaacggtggcaaactcgatttgacatcgcagcagacatggacagagacatcgccattgcagggaaccatcaccacctgatcgacatcgcaccagacgcgagcatgggcgaggccagtggcgcgacggacggcagcgcggagcggctaggggtaggcacgggcggcggtggtggcggaaacgagaagaagtggctgcgcaagctcacgtcggctacagtgaacacggcggtgctccgagacctcatctcgcggacgcccatgctgtggtacctcggcgagaggacggggacaatcctccgcccgtgcgcccggcgcgagcccgtggaggcgctgcacgcggtgcgcgccgtggccatcggcccgttccaccgcgctgaccgcggcctccccttccccgacgacgccaagctcccgttcatgcggtacctgcaggaccagtgcggcctcgacgtggacgggtacgtcgaggcgctctgcctggagcgcgaccgcctccgctgtgagttcgccgacgacggctcggacgggcccgccgtggagattctagacgacgaggcgaagctgctggagatgctgctgctggacagctgcttcatcctggtggtgagcttgatgctcagcaaggccggcacaggcgacgacgccgacagcgtgacgcgggcggcgtccatcagcaaggactacttcatactgaacatggccgtggcgcagcacgccgacgacatcaagctcgacatgctcgtgctcgagaaccaggtcccgttcagagccatcaagcttctcgccgcttcgtgccctgggctcaagctccggaactccgtcgaggagctcgtgctcggatgtttcgacgacatctgccccaagcgcgcgcgtcgcgccgcctacagcgctgccgccggcgagttccaccacgtcctgcacctcttccactggtcccgcgtgcccaaggacaagtacttcgtcctctcgacgccacggaagctcctcaagatcaagaaggagtcggagcggctgttcccctgctccatggagcttcggaggtcagcggtgtggttccgcgaggcgtcgtcgagctgcggcgacctggacatgtggttctggcgacacccggcgagcccggtggccgtgatgaccgtcccgtgcttccacgtccacgagtacagcgcggctgtgctccacaacctcctggccttcgagaaacacttctactgggcgcacggcgcatgcgtgacggcgcacgtagcgcggatggagggcctgattcgttgcccacaggacgcggccatgctccgcaagcgaggggtccttgccagcacgcggcgcacggacaccgagctggtggccttgttccgggagctaggtgaggagaccgtcggggcgcggcttcctgacgactacggcgagatgcttgacgccgtagcgggccaccggggccggcttgtcagcgggtggtgcggagggttcgtgctgcacttcttcccgtcgccatgggtggccgtctctctcgccgtcgctgccgcgctcatcttcgtgccgtcgatgctgcagaccgtctacaccatgttcggctacttcaagagcaactgacaggatcaaaattagggtgctagaagtagaacctcctgtaacccctgatgttttgttagcacaaagttagatttaatttgagacacgtggcttaaaatctggttcgttaaaacttg

SEQ ID NO: 102059 - DNA, 1535 bp, Zea Mays
cctgtcctacatctacatgcatgagcgcgtcgatcgattcattctttccgtcctcatcccggccattccttgcctgcccgccgcgcggactctatataagccttgtgccccatctcatcagcatccatcaccaccatctccgatccatctcttcggctgcctgtgctacccttcccttcacctcacacaggaatatactacacattcctgccttagatacatatatacttttttactgaaaaaaaaggctgagccggtgcgagcgaggcttgagcaatggcgagcgcgtttagctcgagggcatgcgcgctgctggcgctgctcctggggctctgcaccgccggcgcggcggcgggcagggtggacgacgggctggaggtgacgtggggcgacggccgcgggagcgtctcgcccgatggccaggtgctgacgctgtcgctcgaccgcacctccggctccgggttccgctccaaggacacgtacctcttcgcgcgcgccgacgtgcagatcaagctcgtccccgacaactccgccggcacggtcaccaccttctacgtaagcttccttctcttctcttctttctcggccttccagtttcagttcagcaacgcatgcacgtccgagctgaccagagcgccaccagctgccaacgggtttctgacgacgggtgcatgcagttcatctcggaggggccgtgggatgtccacgacgaggtcgacctcgagttcctgggcaacgccagcgggcagccgtacacgctgcacaccaacgtgtacgccagcggcaacggcagcagggagcaacagttccacctctggttcgaccccaccgccgacttccacacctactccatccagtggacgcagcagcacatcctgtaagtttcagaactactactactaccatcaccattccagcatttggccgaagccgatcagcagcgactcagcatcagtcagccaataatcctcattcttcttcgctaccctactatccgtcgcatgcagcgtgctggtggacgggacgccgatccgggagttcaagaaccacgcggaccggggcgtgccgtacccgtcgtcgcagcggatgcgcctctacggctcgctgtgggacgccgaggactgggccacgcagggcggccgcgtcaagacggactggtcgcgggcccccttcgtggcgcagtaccgcaacttcacggccgcgccgccggccacggcggcggccggccagtacgggcagcagatggacgcggaggcgcagcaggccatgaagtgggcgcgggacaactacatggtctacgattactgcgccgacaccaagcgcttctcgcagggcgcgccgcctgagtgctccatggcgtagtcggcgtatagaggtgctgggctgaaccacggtgcacttcgattgcgatgtcgatcagtgcacactatatacgacgcacgggtcaattcattatttataccgatcgatcgattctttggtgtgaaagaatactctagtactataatttaattcatttgattggtcgcaagaga

SEQ ID NO: 102060 - DNA, 1298 bp, Zea Mays
cctgtcctacatctacatgcatgagcgcgtcgatcgattcattctttccgtcctcatcccggccattccttgcctgcccgccgcgcggactctatataagccttgtgccccatctcatcagcatccatcaccaccatctccgatccatctcttcggctgcctgtgctacccttcccttcacctcacacaggaatatactacacattcctgccttagatacatatatacttttttactgaaaaaaaaggctgagccggtgcgagcgaggcttgagcaatggcgagcgcgtttagctcgagggcatgcgcgctgctggcgctgctcctggggctctgcaccgccggcgcggcggcgggcagggtggacgacgggctggaggtgacgtggggcgacggccgcgggagcgtctcgcccgatggccaggtgctgacgctgtcgctcgaccgcacctccggctccgggttccgctccaaggacacgtacctcttcgcgcgcgccgacgtgcagatcaagctcgtccccgacaactccgccggcacggtcaccaccttctacttcatctcggaggggccgtgggatgtccacgacgaggtcgacctcgagttcctgggcaacgccagcgggcagccgtacacgctgcacaccaacgtgtacgccagcggcaacggcagcagggagcaacagttccacctctggttcgaccccaccgccgacttccacacctactccatccagtggacgcagcagcacatcctcgtgctggtggacgggacgccgatccgggagttcaagaaccacgcggaccggggcgtgccgtacccgtcgtcgcagcggatgcgcctctacggctcgctgtgggacgccgaggactgggccacgcagggcggccgcgtcaagacggactggtcgcgggcccccttcgtggcgcagtaccgcaacttcacggccgcgccgccggccacggcggcggccggccagtacgggcagcagatggacgcggaggcgcagcaggccatgaagtgggcgcgggacaactacatggtctacgattactgcgccgacaccaagcgcttctcgcagggcgcgccgcctgagtgctccatggcgtagtcggcgtatagaggtgctgggctgaaccacggtgcacttcgattgcgatgtcgatcagtgcacactatatacgacgcacgggtcaattcattatttataccgatcgatcgattctttggtgtgaaagaatactctagtactataatttaattcatttgattggtcgcaagagattcgtttaaaatcaa

SEQ ID NO: 102061 - DNA, 1147 bp, Zea Mays
gtgattggtcttgacggttgctggttcaagggttcaaacactggccagctgctttgtgccattgggagagatgcaaacaaccagatgtatccaattgcatgggcagctgttgcaactgaaacatatgattcatggtactggtttctaggattacttcaaaaagatctgaacatcaacattggaggtgatggttgggttgtcatatctgatcaacagaatggtctattgaaggctgtagacgaattgcttcctaacgcagagcacagaatgtgtgccagacacatttatgccaactggaggaagatttatacagacaagaagctgcaaaagaagtggtgggcttgtgccaaggcaccttgcagagttcttttcaacctcagaagggcatggcttgcacaagcttcaccagaaggagcacaagatatgatgaagacatccccagagcattggagcagggctttttttcaagataggggctaactgtgattcagtggataacaacatgtgtgagagttttaacaactccatcatggatgctaggtactatccagtcatttccatgtgtgaagccattagaaagaaggttatggtgaggatacaagagaatagggccaaggctgagaagtggacaggaacaatctgtcctaatatcttcaagaaattaaaaatcaacattctgaggtctggtagttgtgatgtgctgtggaatggtgaagatggctttgaggtgcaagagaaagaagacaggaggtacattgtgaacttggttggtagaacatgtacttgcagatattggcaactctcaggtctgccctgctgccatgctattagctgcatctacaaggcatcaaagctgctagatgatttcactgcaccatgcttcaccaaagcagattacttgaagacctatgcacatgtcctccagcctgttgagggccaagctaactggccaatttcagacatgcctagaccaaaaccaccagcttttgtcaaaatgccaggaaggccaaaaactgaaagaactagagaggtgggggaagcacctaaggggactaaactaagcaggatgggcattaagatgagctgcaggttgtgtgacaaacctgggcataactcaaggaaatgcttcctaaatccagaaacagga

SEQ ID NO: 102062 - DNA, 956 bp, Zea Mays
ggggagagagaaggggaccgacacgtagggggcgctgtagggggcaccgctgcggccatagggtgccccctacgcgccgcatgcaaggggagggggatcgctagggtgtaccgctgcgcacagcctaagtatcccacccttcaaacgccacctaggagccacgttgttgctgtcgggaacaatcgttgagcttcttctagttcacactcaattcggtcgttttcagcattaacggagtcaggcccaggcctaacctcagttcatccgagcagccgaacacgcccgccgccattctacgccttgctgcccaggtcggacggaccctttgccggagacgagcacacgccacagcaggaattatcgggcatagagcagagcgaagcgagagatccaatggcggcggcggaggggcagtgggtgctcatggcaacggggcggacgccgaccaacattgcggtgatcaagtactgggggaagcgggacgaggcgctcatcctccccatcaacgacagcatcagcgtaacgctcgaccccgaccatctctccgccaccaccactatcgccgtcagcccctcattcccttccgaccgcatgtggctcaatggcaaggagatctcgctattaggaggaaggtttcagagctgcctcaaagaaatcagaaagcgtgctcgtgacattgaggacaaggagaaggacgtcaagatcaagaaagaggactggggcaagttgcatgttcacatagcctcgtacaacaacttccccacttctgctggtttggcctcttcggctgctgaccttgcctgtttcggtaaagtttcttctgttatcatcataatctgattgtttccctatgttctcaatataagttgtcatgacttctggctatccttacaatgatttgactgtttgttggtctgttgtattagcaaaaactacaacatgaaaatgttttaaaa

SEQ ID NO: 102063 - DNA, 3514 bp, Zea Mays
ggggagagagaaggggaccgacacgtagggggcgctgtagggggcaccgctgcggccatagggtgccccctacgcgccgcatgcaaggggagggggatcgctagggtgtaccgctgcgcacagcctaagtatcccacccttcaaacgccacctaggagccacgttgttgctgtcgggaacaatcgttgagcttcttctagttcacactcaattcggtcgttttcagcattaacggagtcaggcccaggcctaacctcagttcatccgagcagccgaacacgcccgccgccattctacgccttgctgcccaggtcggacggaccctttgccggagacgagcacacgccacagcaggaattatcgggcatagagcagagcgaagcgagagatccaatggcggcggcggaggggcagtgggtgctcatggcaacggggcggacgccgaccaacattgcggtgatcaagtactgggggaagcgggacgaggcgctcatcctccccatcaacgacagcatcagcgtaacgctcgaccccgaccatctctccgccaccaccactatcgccgtcagcccctcattcccttccgaccgcatgtggctcaatggcaaggagatctcgctattaggaggaaggtttcagagctgcctcaaagaaatcagaaagcgtgctcgtgacattgaggacaaggagaaggacgtcaagatcaagaaagaggactggggcaagttgcatgttcacatagcctcgtacaacaacttccccacttctgctggtttggcctcttcggctgctgaccttgcctgtttcggtaaagtttcttctgttatcatcataatctgattgtttccctatgttctcaatataagttgtcatgacttctggctatccttacaatgatttgactgtttgttggtctgttgtattagcaaaaactacaacatgaaaatgttttaaaagttcacagcaattttactagtactgttgtcgtgtggccaatctgattctttttgccaatttggagcccaagttggaaattgtgactgcagatgcatcaaaacaacttattaggagcagatgtagtatttttctagtttcttttttttttcattttgtcctcctgtgactgacattaaaacatgaaaaaatatatttagggacagatagagattgcgaatgtaagttttctccctttatgcccggggtggtgacaagaaacaaggcttgacttgtggcaaaaggttatgccaagtcgcaggtttggatttcgaggaaacttttgctcctgtggctaggttagagtcaatttaaattttattagcctatgctgctcaccattcttttaggccgttccaaatggacgtgaagagcgctttcctcaatgggccaatcaaggaggaggtatacgtggaacaaccccctggctttgaggatgacaagtatcccgaccatgtatataagctctctaaggcgctatatggacttaagcacatggacatccagcatcacttcctgagagaccaccagcaaaagggagatatcgatgtgtatcacattagcaccgagaaccagctagccgatagcttcaccaagcctttagatgagaaaaggttttgcaggttgcgtagtgagctaaatgtcttagattcgcgtaacttggattgatctatagcatacatgtagtctatgcctttgatcatgttactttgagcatttacattatttgttgtctatttatggtgctcaagttgtacaaatatccccggacctcataagtccatatgcaaatgatgcacatatttaaggggagatgtgctacaacttgacccctttgagactaacttgtttggttaaatacacttgatgtagtctcgaaggtacattgaaagggaaaatgaacttggacaacgaaaatacttccactgcactccggtattagtgtatttaattccaagttcatacttgtgctctcattgcctttctgctcttaattgacattttggtgaggcaatggggttaaagggccaagaatgatcctgttttggtgcttaatgccaaagggggagaaattaaggccaaagcaaaatggatcagccaaccacttgtgaattttgaaaatagaggagttagaatttggattttgtcaaaatactcttattgcaaaatttggtctcttatgggggagaattttgattatgggaaaaagggggggtttggcacttgatcaattttactcttggaatatctctcgatttgcccaaacaagggtgtttgacttagagataggaaaaacaatttgatttgcaaaaacaaaccaagtggtggcaaagagtgatccaaatatgccaaatcttaagtaaaaagggaattggtcttcatttgcattgatgttgcacttcttgtgttgctttttgatgtgttggcataaatcaccaaaaagaggagattgaaagggaaatgtgcccttgggccatttctataagtattttggtgattagatgtccaacacatattgagtgagttcttatgtgccaaatgagtgagaagtgttaaatcaagaacaaggtatgtttctagacttagtgaattgtttttgcatactaacatggttatctaagtgctagaaacagtgtcaagaaaaggatatttgaattggagaagagttggcaaagtatagccaacaccagctcgggcttggcacaccggactgtctggttgtgcacctgacagtgtccagtgccccaggctggtcatcggtgaaccgactgctctcaagaagcggtggagcgacgcgactataaatcaccggactgtccggtgagtcatctgcgcacgcgtccaagtcatcggcgatgaactcgtcgctctcgggaaaagagaaaggcgacgtggctataattcactggactgtccggtgatgcaccggactgtccggtgagtcaacggcgccagcagccaacggtcgtccacgcgatcaacgcgcgacacgtggtccgtgtcaacggtcggttgggcacaccggactgtccggtgtgcaccggacagtgtccggtgcgccaaccggtcccgaggaccaacggtcggctgcgcccggtatggaaggaaatcgagcaccgaactgctacagtggttgtccggtggtgcaccggactgtccgatgcaccactcgacagaatgcaagaattgcctaccaaactgatgtccaacggctcctagcttccttggggctataaaagagaccactaggcgcatggagcagaacaccaagcttacaagaaacatcctaaggcatctagactctgcattcacgcaatcggatcatcgttcttgagatttgagcactgttcgagttgtaaactgaaagggaattaggcttacacctagttcctaattaattttggtggttgaattgcccaacacaaataattggactaactagtttgctctagtgtacaagttatacatgtgccaaaggttcacacttagccaataaaaagaccaagtattgggttcaaac

SEQ ID NO: 102064 - DNA, 897 bp, Zea Mays
atggcagcggctacggcgcacctcctagccttcctatcggttctcacgacgatggctgccctctcttcggtggctgccggtggtcgcatgacggaccagctcgacatactctggggcccaacacagcttctaaacggaagcaacggcggcgacgaccagaccatcgggctgtcgctggaccgcgtcatggggtcgggtttccggtccaagacctcctatctgtttgccaggatcgacatcgacatcaagctcgtcccggggaactccgccggcaccgtcacgacggtttacttgatgtctgaacagcagtggaagacccatgacgaaatcgacctggagttcctgggcaacctcaccggtcagccgtacaccctgcacaccaacatcttcgccaatggctctggtggcagggaggtgcagtaccggctctggttcgaccctaccctagacttccacacctattccatcatctggagttcagacgagatcctgatcctggtcgacaacaaggcgatccggcggttcaggaaccactgggacgtcggcatccccttcccggtgtaccagccgatgaggctgaacggcgtcctctgggacgccgacgactgggcgacgcagggcgggcgcgtcaagacggactggtcccaggcgcccttcaccgcctacttccggaactaccgcgccaacggttgcgagccgagcgggtccgcgtgggtgtgcggccagggcccagcgcccggcggcggcgactggcttgacggcggagcagctgggctggacgacatgaagcggcaggagcagctgaaggaggcggaggatatgtacatgatctacaactactgcaccgactcaaagaggttccccggtggcttccccacggaatgtgggttggcgtag

SEQ ID NO: 102065 - DNA, 121 bp, Zea Mays
tggtccgacaagcccatcaccttcgaccaaggcgaccaccccgacttcgtgccaagcccagggaggtactcgctcgtcgtcgatccgatcatcggcaatgctaggctctccaaggttctca

SEQ ID NO: 102066 - DNA, 3833 bp, Zea Mays
cgcatgcgctcgccgctagcattttttaccttttctttctcttgaatccttctttcacggatggccatatacttcgccccgcttccccaatccctacccggatcgttctctctcctaagtatttcccaatttgatcggcaagtgcagccctctagcctcagttatagcggtttgatggtatggcgtattgagaattttaagccagttcctgtgccaacatcattacatggaaaattttatatgggtgattcatatatcatcttgaagacaacagctttaaaaaatggttcctttcgccatgacatccattattggcttggtaaagacactagtcaggatgaggctggaactgctgcaattttaactgtggagcttgatgctgcgcttggaggacgtgctgtccagtaccgggaatcacaaggcaatgaaactgaaaggtttctctcatattttaggccttgcatcatgccacaatcaggaggggtagtttctgggttcaaccatgtagaagtcaatgatcagaagcatgttacccgattatatgtgtgccgaggaaaacatgttgtccatgttaaagaggtgagctatctaaagcactatatttttccaactagaaaggttccttttactcgttcatcccttaaccatgaggacatatttattttggataccaagtcaaaaattttccagttcaatggttctaactcatgcattcaggagagagcaaaagctcttgaagttgtacagtatatcagagatactttccatgagggcaagtgtgaagttgcaggggttgaggatggaaaattgatggctgatgcagaagctggtgaattttgggctttgtttggtggcttcgctcctcttccaaagaagacactttcagaggataacggggaagacaaggaaatcatcatcaaattgatgtgcatcaaccaaggaaaattggagcaaattaattttgaatccttggcgcgtgagttacttgagccaaacaaatgctacttgcttgactgtggtgctgaaatatatgtatggatgggcagaagtgcttctttgcaagaaagaaagggcgcgagcaaaattgctgagaaactactcattgatgctagtcgaacaaaatcacatgttatcaaagtgatcgagggattcgagacagtcacgttcaagtcaaaatttattgagtggccacccacacctgatttgaagttatcatctgaggatggaagagtcaaagttgcagccctcctcaaatctcaaggattagatgttaaaggcttgatgaaaactgcacctgtaaaagaagaaccccggccttacattgattgcacaggtcatttgcaggtatggagggttaatggaaatggcaagactcttctttcatgtgctgaccaatcaaaattttacactggagattgttacatttttcaatacacatatagtggagatgataaggaggaatgtcttattggaacttggttcgggaagagaagcattgaggtggagagggtttcagcgttgtcactggctagcaagatggttcaggcttccaagttccaagctatccaggcccgactttatgaagggaaagaaccaattcagttctttgtcatatttcaaagttttcaactattcaagggtggacttagctctggatacaagaactttgttgttgaaaatgatattgtggatgacacttactctgaaggtgggattgccctattccggattcagggttcaggatcagaaaacatgcaagcacttcaggtagatccgctggcttcgtccttaaactcgtcctattgttacattctacataatggaaacacagtgttcacatggattggcaatgttacgacctcattggatcatgacttggttgagagacaactagatgtaattaagccagaattgccttccaggtcactaaaggaggggagagaaaccgaccaattttgggaagtactgggcggtaaatccaagtatccaaaccaaaaagttgaaagagaaaatgaaaatgacccccatcttttctcatgcatcatatccaaaggcaatataagggtcaaagaaatacaccattttactcaggatgatctgatgacagaggatgtttttattcttgattgtcactcagacatatttgtttgggttggccagaaggtggataccaaagtgaaatcacaagctatggatattggagagaaatttcttgttcatgatttccttatggaaaaactatcacgagaaacaccaatattcattgtgtcagagggtagcgagccacaattttttactagattcttcaattgggactctacaaaatctcttgtgcatggcagttcataccaaaggaagcttggtgtcctaaagggtggagcacctccaacagtggataaaccaaaacgacgaacaccagcatttacaggaagaagttcaggacaagataaatctcatcgttcaagaagcatgtccactagcccagatcgtccacgtgttcgtggaaggtctccagccttcaatatgttaacttctgcctttgagaacacgagcaataccaggaacctttccacccctccccctgttgtgagaaagcctttctcaaaatctggatgtcctgaacactcaagggtgtcacccaaaaaatcagctatcagttccctcaccaggtcttttgaaggtcacatgaaaagtacaataccaaaatcagtaaaagtgagccctgagctagagaaggcgacacaggaagaaggtgccacaagcggtgcaaacgaaaacaagcaagaagatgacgaagggcgtgtgatctacccatatgaacgtctgacaacgacagcagaagatcctgcccctgacatcgacgtgaccaaacgagagacctacttatcgtcagccgagttcaaagacaaattcaacatgataagggcagagttctacaagcttcccaagtggaagcagagcaaattgaagtcttgtgtccaacttttttagcctgcccacgactgtctcgacttctaaagacaataaccgtttgtcagaagtgggggcaccgatttttgcatttagatctcatgtcttcacctgcctatcatattctttcagacagttcttattcttcctgtttataggatctaagattcatttagagctcaagaggtttggaattccatagcccatttctgttgtggggctctccggatcatacgtagatgctttttcagtttggtcaaggtttgtattctaggattcaggtcgcaaaggttgtcacgatatgagtactctattaattttattaagccttgggccatgatatcaccatccactagcccaggatatcacaatccaccctagaagactgacgtcctaatcgatcaaccccagccttgtgctaggacatcaccatccgctgggttaggatatcacaatggcgcctgccacctacgagatcacgtgtctgctagatgaactcctttcgacgtcactcacccggacgaggccattggatggatgtcgtgccgcctcggtctcagcgtatcgtcggcctttcgtgccttcctacccctactcactgacgggccccaacggtcactaagaagaagctcttcatgcgcctccgactccatgagacatgtcctagccgactgccacatggaacgggacatcgtgacagacgggcatctggattgaatgaggagggaggaggagagggcttttcgtgactgactttgaacgggacggtgtctgaactcaattgaatgaaacaatttgtttgtttggctttaatccgtaccggtttctactgctcctacagtgttttgtctctatagattata

SEQ ID NO: 102067 - DNA, 2931 bp, Zea Mays
atggccatatacttcgccccgcttccccaatccctacccggatcgttctctctcctaagtatttcccaatttgatcggcaagtgcagccctctagcctcagttatagcggtttgatggtatggcgtattgagaattttaagccagttcctgtgccaacatcattacatggaaaattttatatgggtgattcatatatcatcttgaagacaacagctttaaaaaatggttcctttcgccatgacatccattattggcttggtaaagacactagtcaggatgaggctggaactgctgcaattttaactgtggagcttgatgctgcgcttggaggacgtgctgtccagtaccgggaatcacaaggcaatgaaactgaaaggtttctctcatattttaggccttgcatcatgccacaatcaggaggggtagtttctgggttcaaccatgtagaagtcaatgatcagaagcatgttacccgattatatgtgtgccgaggaaaacatgttgtccatgttaaagaggtgagctatctaaagcactatatttttccaactagaaaggttccttttactcgttcatcccttaaccatgaggacatatttattttggataccaagtcaaaaattttccagttcaatggttctaactcatgcattcaggagagagcaaaagctcttgaagttgtacagtatatcagagatactttccatgagggcaagtgtgaagttgcaggggttgaggatggaaaattgatggctgatgcagaagctggtgaattttgggctttgtttggtggcttcgctcctcttccaaagaagacactttcagaggataacggggaagacaaggaaatcatcatcaaattgatgtgcatcaaccaaggaaaattggagcaaattaattttgaatccttggcgcgtgagttacttgagccaaacaaatgctacttgcttgactgtggtgctgaaatatatgtatggatgggcagaagtgcttctttgcaagaaagaaagggcgcgagcaaaattgctgagaaactactcattgatgctagtcgaacaaaatcacatgttatcaaagtgatcgagggattcgagacagtcacgttcaagtcaaaatttattgagtggccacccacacctgatttgaagttatcatctgaggatggaagagtcaaagttgcagccctcctcaaatctcaaggattagatgttaaaggcttgatgaaaactgcacctgtaaaagaagaaccccggccttacattgattgcacaggtcatttgcaggtatggagggttaatggaaatggcaagactcttctttcatgtgctgaccaatcaaaattttacactggagattgttacatttttcaatacacatatagtggagatgataaggaggaatgtcttattggaacttggttcgggaagagaagcattgaggtggagagggtttcagcgttgtcactggctagcaagatggttcaggcttccaagttccaagctatccaggcccgactttatgaagggaaagaaccaattcagttctttgtcatatttcaaagttttcaactattcaagggtggacttagctctggatacaagaactttgttgttgaaaatgatattgtggatgacacttactctgaaggtgggattgccctattccggattcagggttcaggatcagaaaacatgcaagcacttcaggtagatccgctggcttcgtccttaaactcgtcctattgttacattctacataatggaaacacagtgttcacatggattggcaatgttacgacctcattggatcatgacttggttgagagacaactagatgtaattaagccagaattgccttccaggtcactaaaggaggggagagaaaccgaccaattttgggaagtactgggcggtaaatccaagtatccaaaccaaaaagttgaaagagaaaatgaaaatgacccccatcttttctcatgcatcatatccaaaggcaatataagggtcaaagaaatacaccattttactcaggatgatctgatgacagaggatgtttttattcttgattgtcactcagacatatttgtttgggttggccagaaggtggataccaaagtgaaatcacaagctatggatattggagagaaatttcttgttcatgatttccttatggaaaaactatcacgagaaacaccaatattcattgtgtcagagggtagcgagccacaattttttactagattcttcaattgggactctacaaaatctcttgtgcatggcagttcataccaaaggaagcttggtgtcctaaagggtggagcacctccaacagtggataaaccaaaacgacgaacaccagcatttacaggaagaagttcaggacaagataaatctcatcgttcaagaagcatgtccactagcccagatcgtccacgtgttcgtggaaggtctccagccttcaatatgttaacttctgcctttgagaacacgagcaataccaggaacctttccacccctccccctgttgtgagaaagcctttctcaaaatctggatgtcctgaacactcaagggtgtcacccaaaaaatcagctatcagttccctcaccaggtcttttgaaggtcacatgaaaagtacaataccaaaatcagtaaaagtgagccctgagctagagaaggcgacacaggaagaaggtgccacaagcggtgcaaacgaaaacaagcaagaagatgacgaagggcgtgtgatctacccatatgaacgtctgacaacgacagcagaagatcctgcccctgacatcgacgtgaccaaacgagagacctacttatcgtcagccgagttcaaagacaaattcaacatgataagggcagagttctacaagcttcccaagtggaagcagagcaaattgaagtcttgtgtccaacttttttag

SEQ ID NO: 102068 - DNA, 300 bp, Zea Mays
atggcgtggtggcggaagaaggtggtgtccccggcgcgccgcgcgtgggccgccgtctccacccgcgtccgcgcgcgcaacacagggggcgccggcggcggcagcatactgaagcttcacgaggacgtgcagacctgtggctacagggacgtgcaggtgatgttcgacatcctgacgtcggagctggaggcgtccgcgcagcgccccgccgccaagcaccaccagcggaagcggccgccgtcgccgtcgtcgccgtggcccagatacccgtcatcctccatgatcgcggccgcgcaatag

SEQ ID NO: 102069 - DNA, 99 bp, Zea Mays
cggcgaaaagagcgaagaaatccaacagcgtcaaggaccaaggtggtggtagtgtcatataagctgtctggtctgaatgtgcctgtacatactacatag

SEQ ID NO: 102070 - DNA, 388 bp, Zea Mays
taattctcccaaaaaaaaccgacttctgagaagaccatgggtgcaagtgcaacgttctacccagtcccagtccatccacggacccacccaccacttggaagaatgattctgtttgtggagcagaccaagggctgcgctaaccagagaacccaacagggactcagggagacatcacatacgagtgctggagagggttatcaattgattagtgtcctgtccttgccgtgccgtgtttgaattaacaaaaccttagagctcagcattcgatctatactggtttgatctatactagtttgtgaaatttcaggttctaaaaataaaaataagaaccaaaattttcaaagtatttttaggaaccgaacctgaatacaccaacggtttttgttcg

SEQ ID NO: 102071 - DNA, 840 bp, Zea Mays
tggtgctggaggggaagatctcacaagtgtgtgaagaccacacagtctcgcgcactcgcaaacccagtgcacgctgcggttttcctcttcgcccaccttcttggagcgaggaggttggccatgaggaggtggtgctcggctgccctgctgggctgcgtagtggcgctgtccgttctggtggccgccgtggaatgtgatgtggcttacaacaagaaggcagtgctgattgatgggcagatgcagattctcttctccggttccatacactaccccaggagcacccctgatgcaactgcattttacaaaatctcttctccccccactattccctggagaggtttatggctgcgaatctatggatctgaagattcggatggtattttttcccgcttcgagcagtactatttcgaggagaggtacgatttagtcaggttcataaagacggtccagaaggctggcctgtttgtacatatctgcatcggtcctacatttgtggcgagtggaacttcgggtatgggtatttctccatttcctgaaatcacctccgttaaaaatggagcattaccgtgtctccagtttggtttaagtatgtaccgggcatcagcttcaggacagacaactaacctttcaagacggccatgcagggagaaaattgtgggaatgatgaagagcgaaaacctctttgcatcccaaggtggcccaattatcctctctcaggcaagtataatctttttccttaggtttggtacaaaggaaatagctcccagcagcatgagcgtactattagaaaaaataaacaattcactaagagtaatatcgataactgcacttagcgtttaa

SEQ ID NO: 102072 - DNA, 622 bp, Zea Mays
ctctgtggtttggtttctttgccacgcgtatataacaactcccatcacttgcgatcggttcttatcgccccctttcccatttctcccctcgattctccgggctgatccggtcgctgtccgggcctgttcgattggaggagaatcgcctggtttgaaggaaaggcttgggaagaaaggcatggccaaattgacctttcaggatggaaaatgattccggacaggaaggggaaaaggtcgctactcgctactagcaagttcgcttggtcgtcacagaaagaggctttggttgcactatgagcaggcacatatacaataactagaacagttagaacctgataggtaaacttatatagacagattgtagtaaaattaaggattacggtcatgtttttttgggtctgctgattccgttttagtcatactgcgaccacatggcccgcggtgtagtttgaagtcaaaacggtatttcagtttatattgttgcgtatcaattaaaatttggtatcaggcatggtaggacctgaatcggtaatgaccgtgcgtgtcatgaatccagcacattattacctgtttaccaggtctgagtgatttaacctgttcgagaagtgcctgacctcgtcca

SEQ ID NO: 102073 - DNA, 1738 bp, Zea Mays
ctctgtggtttggtttctttgccacgcgtatataacaactcccatcacttgcgatcggttcttatcgccccctttcccatttctcccctcgattctccgggctgatccggtcgctgtccgggcctgttcgattggaggagaatcgcctggtttgaaggaaaggcttgggaagaaaggcatggccaaattgacctttcaggatggaaaatgattccggacaggaaggggaaaaggtcgctactcgctactagcaagttcgcttggtcgtcacagaaagaggctttggttgcactatgagcaggcacatatacaataactagaacagttagaacctgataggtaattatcactgtatctgacatggatgagcacatgggaagacgaacagtcggcggcctcctcttcaccaagggaggatccatccttctcttcagagaagacggctcgcgccccaaggccaagaactgctgcacgcgccatggctgtagcggtcagcatcctgctgacagagccaagggcaaggaggtgcacagggcagcagcggtgggcagtgaatcgacaccggctacccctcggagatcacaagcttttaggaagcccaacagaaggcctccacatgaaggcagtgcctcaggcagcatcgtcagggatgtaggaggcccttgtagcgaaaccggcagcgggtcaagagatgctcctgggcgtgatctgcttgctcggcttaaggagagggtcaacacatcaaggaaacgatcgttgaacagggagaacagcccgcagtcgccgagtggactcagtgtctgtgccagttccccgagcaacagtcggtcagtctcaaggccgtcgcaccggacagcttcgaggataagagaagctgacgaaggcgcgaatgcaggagctgacagtgtagtgcgcagaaatgctgctaggaggggttcagagaggagtgacgatgacttgctgctggtcgagcaggtaacaagaaaccaagcgccttctgaagggtttctctctggattcatggctagatacagaagcgatcttcagggagagctttcgtccctggacgacagcatggaggatccaaatggatacttgcgctttgatgtgggcgggattgaagagctcgagaactatttcatattcaatgatcggcatagaggaatgaggatggatatcgacggcatgtcctacgaagagttgcttgctttgggggagcgaattggtaccgtaaacacaggtctttcagacgacgcgttatccgcgtgcctgaacaggaggctctacatgcccacagcttcaggttctcatgaagattgtgaaagaaaatgcagcgtatgccaggaggagtatttagcaggcgaggaggtgggcgagatggcatgtaaacactactaccacctttcctgcatagatcactggcttcggcagaagaactggtgtcctatctgcaaatctgtcgccctgaaaatcaactagcaacgtgtttcatgtttcttcataaatgaagtgtatagattcttcatctcctgtattccttccccaccccactccttttcccttttggaattttttttctttctttctttttcttttactcaaagcactcattttttattatcaatttaaatcagaaaagaaaatcttgtgttgggttagggcttgctgcgagccttactcgtgttggcccatggcccagtaagaacagccccaatttaggatgggaaaagttcatttg

SEQ ID NO: 102074 - DNA, 1575 bp, Zea Mays
ctctgtggtttggtttctttgccacgcgtatataacaactcccatcacttgcgatcggttcttatcgccccctttcccatttctcccctcgattctccgggctgatccggtcgctgtccgggcctgttcgattggaggagaatcgcctggtttgaaggaaaggcttgggaagaaaggtaattatcactgtatctgacatggatgagcacatgggaagacgaacagtcggcggcctcctcttcaccaagggaggatccatccttctcttcagagaagacggctcgcgccccaaggccaagaactgctgcacgcgccatggctgtagcggtcagcatcctgctgacagagccaagggcaaggaggtgcacagggcagcagcggtgggcagtgaatcgacaccggctacccctcggagatcacaagcttttaggaagcccaacagaaggcctccacatgaaggcagtgcctcaggcagcatcgtcagggatgtaggaggcccttgtagcgaaaccggcagcgggtcaagagatgctcctgggcgtgatctgcttgctcggcttaaggagagggtcaacacatcaaggaaacgatcgttgaacagggagaacagcccgcagtcgccgagtggactcagtgtctgtgccagttccccgagcaacagtcggtcagtctcaaggccgtcgcaccggacagcttcgaggataagagaagctgacgaaggcgcgaatgcaggagctgacagtgtagtgcgcagaaatgctgctaggaggggttcagagaggagtgacgatgacttgctgctggtcgagcaggtaacaagaaaccaagcgccttctgaagggtttctctctggattcatggctagatacagaagcgatcttcagggagagctttcgtccctggacgacagcatggaggatccaaatggatacttgcgctttgatgtgggcgggattgaagagctcgagaactatttcatattcaatgatcggcatagaggaatgaggatggatatcgacggcatgtcctacgaagagttgcttgctttgggggagcgaattggtaccgtaaacacaggtctttcagacgacgcgttatccgcgtgcctgaacaggaggctctacatgcccacagcttcaggttctcatgaagattgtgaaagaaaatgcagcgtatgccaggaggagtatttagcaggcgaggaggtgggcgagatggcatgtaaacactactaccacctttcctgcatagatcactggcttcggcagaagaactggtgtcctatctgcaaatctgtcgccctgaaaatcaactagcaacgtgtttcatgtttcttcataaatgaagtgtatagattcttcatctcctgtattccttccccaccccactccttttcccttttggaattttttttctttctttctttttcttttactcaaagcactcattttttattatcaatttaaatcagaaaagaaaatcttgtgttgggttagggcttgctgcgagccttactcgtgttggcccatggcccagtaagaacagccccaatttaggatgggaaaagttcatttg

SEQ ID NO: 102075 - DNA, 2344 bp, Zea Mays
atttgtgtatagcttttgagatgcttggccaaaacctatatgaactgctcaaaaggaatcacttaagaggtctgaaattgaaatatgttcaagccttctcaaaacagatattggatgccatggttgtgatgagagaagctggaatcatccattgtgatttgaagccagaaaatatcctgttagctcccagtgtcacaacagctgcagaagtgaaagttattgattttggatcagcctgcctggagggtaaaacggtttactcgtacatccagagccgctattacaggtctccagaggttctccttggctatccatatactaccgcgatcgacatgtggtcgtttggctgcatagttgctgaactgtttctaggtttgccattgtttcctggagcgtcagaatatgatgtgcttcagcgaatgatgaaaattcttgggggccaaccaccagatgaactgctaagggaagctaaaaacactgcaaggttttttaaacatgttggaagtatctatcctggcaatgaggcacctactggtctttgtagtgcgtacaaaagtttaagtgaagaagatgttgaagtgagagactccaagaagccacagatgggaaagtggtacttcccacacctaaagcttgacaaactcatatgtacctatccttggaacaattccgaactgacagagacagaaaaaatggatcgtttgggattagttgatttcttgaagggtctccttgaatttgatccaaataagagatggtcaccattgcaggctctataccatccattcataacaggcaaatcgttcaccggtccatatgaacctgtacctgagaccacaagaattcctgttgttcgtgctgcagcaattgatcacaatcctggagggggccactggctacattcaggtctttccccgcaggttggaagtgtcaacagatacctaccttcgaataatgcctaccctccaaaggttcctttttcttatgggagtagttatggaagctttggtagccatggtagctataccgccaatgctggttttggtaacagctacggaagcattggtgatgttaatgctatcaatatgtattattcacccttaagttcttctggattaacgcaaattggctctagtccagatgttagactaaggatgcttctcccacatgatagaggaattcgattgagccctggtagtcttgggcctatgtctcttggagccagtccatcacagtttaccccaccaaactaccagatgcaaatcccagctaattcggttgggaagcatggttctggttctcctgcaagtggaggcattcatggttctccgttaggaaaatctgcaggagtgggcccatacaacatgaggaggaacttgccaatgccgccacatgattatgtatctcagcatggacacgggcgttgtggagatggtgtcagtttcagtcattttgatgcctgtgctcgaggacatacaggtcactctcatagtgcagcgggacctagttcttatcattctggttggagaccacaaataggttcaaggagtggtatttccttggaggcctcgtctagtcatgtgctttcacaggctccatcacaatcgtttgacttttcaccttcatcagcacttgatcctgctaattgggaccctaattatagtgatgagtcactactgcaggacaattcactgtcagctgaactaagtagcaacctccactttggagatgcaactggccaagggagtggatctatcaggtcagcaaatttccaaggccacgtcttcgctacatctaaccctgtaccaacaaaccaaagagcagatcaattatttcatgtgtcttctcaaggattgagtgcccattccagtgttcccgtcaactacggtggttacaaccctccaaattatcctccgcaaaatctccgtcctcgtcgtggacaaccaattcttcatcagcgatataaccaggcaacttccagtccgatgcggccaatgggaagccatcacagtgggcagcctgcgtggcctagttttggcatgggcgatggagtgccctggggaggaacaggagggcactcatttacgacaagtgggctatcttcatctcttgcaagaaaggattatgggagcatcttttagtgtgttgtggacaggaggaatggcgttgattcattgcagtcgtaaattatttgtattagcaaaattggagtgcgatgattctggtttattgtttcgatgttgttaccccatccctccaattggtcctttgtgaacaagacagttgatatacaatatatgatcgatgacaatagcattcctttgcagccctttttttatcagtc

SEQ ID NO: 102076 - DNA, 1455 bp, Zea Mays
ataccgaatctttcttaaaccattatgccgtatacttgaaacttgtataggttggaagtgtcaacagatacctaccttcgaataatgcctaccctccaaaggttcctttttcttatgggagtagttatggaagctttggtagccatggtagctataccgccaatgctggttttggtaacagctacggaagcattggtgatgttaatgctatcaatatgtattattcacccttaagttcttctggattaacgcaaattggctctagtccagatgttagactaaggatgcttctcccacatgatagaggaattcgattgagccctggtagtcttgggcctatgtctcttggagccagtccatcacagtttaccccaccaaactaccagatgcaaatcccagctaattcggttgggaagcatggttctggttctcctgcaagtggaggcattcatggttctccgttaggaaaatctgcaggagtgggcccatacaacatgaggaggaacttgccaatgccgccacatgattatgtatctcagcatggacacgggcgttgtggagatggtgtcagtttcagtcattttgatgcctgtgctcgaggacatacaggtcactctcatagtgcagcgggacctagttcttatcattctggttggagaccacaaataggttcaaggagtggtatttccttggaggcctcgtctagtcatgtgctttcacaggctccatcacaatcgtttgacttttcaccttcatcagcacttgatcctgctaattgggaccctaattataggacaattcactgtcagctgaactaagtagcaacctccactttggagatgcaactggccaagggagtggatctatcaggtcagcaaatttccaaggccacgtcttcgctacatctaaccctgtaccaacaaaccaaagagcagatcaattatttcatgtgtcttctcaaggattgagtgcccattccagtgttcccgtcaactacggtggttacaaccctccaaattatcctccgcaaaatctccgtcctcgtcgtggacaaccaattcttcatcagcgatataaccaggcaacttccagtccgatgcggccaatgggaagccatcacagtgggcagcctgcgtggcctagttttggcatgggcgatggagtgccctggggaggaacaggagggcactcatttacgacaagtgggctatcttcatctcttgcaagaaaggattatgggagcatcttttagtgtgttgtggacaggaggaatggcgttgattcattgcagtcgtaaattatttgtattagcaaaattggagtgcgatgattctggtttattgtttcgatgttgttaccccatccctccaattggtcctttgtgaacaagacagttgatatacaatatatgatcgatgacaatagcattcctttgcagccctttttttatcagtc

SEQ ID NO: 102077 - DNA, 2753 bp, Zea Mays
aataatgggagcctgcaactcgtgcgaggccacggcggtggcggcggcgccggggccggcgacggcggaggcgagggtggtgctcgcggacggcgcgctgcggcggttcccgggcggcacgcgggcgtcgcaggccgtgaaggcggccgccgccggggcggcctcgtggttcctgtgcagcgcggacgggctggagctcggcggcgccgtggtgcccgtgcggcccgaggaggcgctgcagcccgggcagctgtacttcgtgctccccgccgcgatgcggcgccgcccgctgcaggcggaggagatggccgcgctcgccatccgcgccagcgccgcgctggccggcgaccacgacggcccgctcgtgttcccggaggccgccgctgccgccggcgccggggcgcggtgcggcaaggggccagctcgcttcacccctttcggtctcggcggccgtcgggcccacgccgcagaagccccgacggcgctagccgcgctacgctacgctacgctacgcaccgcgtttctccgcttcagcggttcgcctctgcgccgcaagctcctagagatggcggcgaagtctggatacacacgccggctcccgctcaccggggagaccgctcctccacctcccagcgccgtcctctatgtggccaactgcgggcccgcggtgggagtgaccgacgccgacgtccgctcgacattcggcgccttcggggaggtcgcaggagtccaggctgccgacgacagcggcgcccgcatcatcgtccggttccacgagcccgccgccgcggaggccgccatggctgcgctccacgggcgcccctgcgacctccttgcgggtcgcgtgctgcacataaggtactcggtgcccgtgaagccaaaggctcgtcctgggggctctgtaccggtggctcacgcggcatcggagctcggaatccccgggatttacatggttcaggagttcgtgactgccgctgaggaacaggagttactttcagctgtggatagcaagacgtggaaaagactggcgaaaagacgagttcagcattacggttatgagtttctgtacgaaacaaggaatgttgattcgaagcagttcttgggtgaactgcctacttttgtttcaactgtccttgagaagattgcttcttttcctggtgtgaaggactgcgccaccagattagttgatcaattgaccgtaaatgaatatccttgtggtgtaggtttgtctccacatatagacacacactcagcatttgaggaaatgatttttagcctttctttggctggaacttgcatcatggagttcagaaaatatactaaaggcacttggcgtgctccaagtgtggtcgatggagttgatgaagatagcagtcaagagccagaatgcataaggaaagccattttcctacctcctcggtcaatgctattgatgtcaggagaaggtcgttatgcctggcatcactatataccacatcataaaatcgatgccgtgggtggtcaagtcatcaaaaggaattcaaggcgagtttctttcactttccgaaaggtgaggatggggccttgtgattgcgaatacaagcaattttgtgatgctcatagcaagagatgttaagctgagaaggctgatattttcaaaactacctgctgctacaaccattggcaagtctcataacataataacaatctgtcggtattttgtctcgcacaatcaaaatggtcaaggagcccaccgatcaaactcatatcaatttacagatgtgtcatctgacgtgtgtgcaaatgaatagatagagaaatgtagggaatagccagatgtaacttttgaaccttgtattcatctcgttgagattgagaattgcttgaacgagcctgtagtttgtcattattttttcctgatatctcgaaacaacaaagttctatttataatatgatgaaaaaaatgacaccattgtttttgctactgtcgaacttggtggaattggccttcgtaccaggacatttttctagataacctggtttcatcatttggttactcagtttaatgatctcaaaaatttattggtgttgagctttacaataaaatgtctccttcaggtttcatagatgcacataagcataaggagataacgtccagcacaaagcaaaaaaaaaagtaactcgatgatttttcatcttcatttgagtacgccatcttcaatatgaacaaattgctgtacacttcaccatgcatgtcaggtgtcttggtcttggactgcgactaaaagctgtatgaggctacatgcaccgagcaaatacctttgctggtcttgtaaacactcactgctcaccgcggcttgcaagacgccgcattcaagtattcaactaatgcgatatccttcctgcatgactgcatccaggtccaggccatcagggtctcaacctgcagggttatttcaccgctcacgagtagtgcgggagttcagtttgttgttcatatatatgtaaatgttccgaaatgccccaatttcgtcaaggtgacaaggtgtcaatgctgcagataaccaaaaggccaatctgtcatagcctgagctgatcacgtcatgggacatgaacaaacaccagatcagcaagctttccactgctgcagtactgattcatgtcagatgatttcatctctaccgtaatcaactacatgcagtaatgagtgttcatggccatttttagggtagctttgcaatgctgcatgctggactttaatccaactagaacct

SEQ ID NO: 102078 - DNA, 1943 bp, Zea Mays
atgggagcctgcaactcgtgcgaggccacggcggtggcggcggcgccggggccggcgacggcggaggcgagggtggtgctcgcggacggcgcgctgcggcggttcccgggcggcacgcgggcgtcgcaggccgtgaaggcggccgccgccggggcggcctcgtggttcctgtgcagcgcggacgggctggagctcggcggcgccgtggtgcccgtgcggcccgaggaggcgctgcagcccgggcagctgtacttcgtgctccccgccgcgatgcggcgccgcccgctgcaggcggaggagatggccgcgctcgccatccgcgccagcgccgcgctggccggcgaccacgacggcccgctcgtgttcccggaggccgccgctgccgccggcgccggggcgcggtgcggcaaggggccagctcgcttcacccctttcggtctcggcggccgtcgggcccacgccgcagaagccccgacggcgctagccgcgctacgctacgctacgctacgcaccgcgtttctccgcttcagcggttcgcctctgcgccgcaagctcctagagatggcggcgaagtctggatacacacgccggctcccgctcaccggggagaccgctcctccacctcccagcgccgtcctctatgtggccaactgcgggcccgcggtgggagtgaccgacgccgacgtccgctcgacattcggcgccttcggggaggtcgcaggagtccaggctgccgacgacagcggcgcccgcatcatcgtccggttccacgagcccgccgccgcggaggccgccatggctgcgctccacgggcgcccctgcgacctccttgcgggtcgcgtgctgcacataaggtactcggtgcccgtgaagccaaaggctcgtcctgggggctctgtaccggtggctcacgcggcatcggagctcggaatccccgggatttacatggttcaggagttcgtgactgccgctgaggaacaggagttactttcagctgtggatagcaagacgtggaaaagactggcgaaaagacgagttcagcattacggttatgagtttctgtacgaagtaagttcgaccttacaaggaatgttgattcgaagcagttcttgggtgaactgcctacttttgtttcaactgtccttgagaagattgcttcttttcctggtgtgaaggactgcgccaccagattagttgatcaattgaccgtttgtctccacatatagacacacactcagcatttgaggaaatgatttttagcctttctttggctggaacttgcatcatggagttcagaaaatatactaaaggcacttggcgtgctccaagtgtggtcgatggagttgatgaagatagcagtcaagagccagaatgcataaggaaagccattttcctacctcctcggtcaatgctattgatgtcaggagaaggtcgttatgcctggcatcactatataccacatcataaaatcgatgccgtgggtggtcaagtcatcaaaaggaattcaaggcgagtttctttcactttccgaaaggtgaggatggggccttgtgattgcgaatacaagcaattttgtgatgctcatagcaagagatgttaagctgagaaggctgatattttcaaaactacctgctgctacaaccattggcaagtctcataacataataacaatctgtcggtattttgtctcgcacaatcaaaatggtcaaggagcccaccgatcaaactcatatcaatttacagatgtgtcatctgacgtgtgtgcaaatgaatagatagagaaatgtagggaatagccagatgtaacttttgaaccttgtattcatctcgttgagattgagaattgcttgaacgagcctgtagtttgtcattattttttcctgatatctcgaaacaacaaagttctatttataatatgatgaaaaaaatgacaccattgtttt

SEQ ID NO: 102079 - DNA, 1884 bp, Zea Mays
accactacttcactcgctcgctcgtgaagcgtctcgctgccctgcccccaccgatccaccacccccccactcatcacccctcagccaccgcccaccggccatgtcgtcgccgtcggtagccagcctccgtctcccgatgctcccagcgtcgccgcccctctcccgccgcgctatcgccggagttaccccgagcgcggccgcaccccgcgctcttctcctacaacccctcgcgcccaaggcgctcgcggcgtaccaccagcctgcgctcctcctccaccagcgacgccggcatggaccgccccccgtcgccgctgtcactgcctccaagccggttctcaaggacccgaagaagtaccaggagtgggactccatgacggccaagttcgctggcgccgccaacatccccttcctactgctccagctcccgcagatcgtcctcaacacccgcaacctcctcgccggcaacaagaccgcgctcttcgccgtgccgtggcttggaatgctcactgggctgctgggcaacctctcgctcctctcctatttcgccaagaagaaggaaacggaggctgtcatcgtgcagactcttggcgtcatctccacctatgcggtcctcgtgcagctcgcaatggcggagtccatgccggtgccgcagttcgtggccacttcggttgttgtggccgcagggctcatcctaaacttcctcaactactttggctggatccctggaaccctcttgctgctgtgggaggatttcattacagtcggcggccttgccgtgctccctcaggtcatgtggtcaacttttgttcccttcatccccaatagcgtactgcctggcataatctctggttctttagctgttgcagctgttgcgatgggcatacttaccaacttatcaatcaagcactaaaagcaaggatgggcaagctttccaatgcaggggttaaatttgttgggtcattgtctggttggacagccacacttctcttcatgtggatgccagtggcacagatgtggacaaattaccttaacccaagtaacatcaaagggctgtcagctttcagcatgttgcttgcaatgcttggaaacggacttatgattcctcgcgctgtattcatccgtgatttgatgtggttcactggttctgcatgggcatctgtcctacagggttggggtaacctggcgtgcatgtactgctttaatagcatcagcggagaagttttctttgcaacatcagctggtctgcttctatggctaggatttactctatggagagatgccattgcctatggcaacagctcgcccttctcttccttgaaggagctgttttttgggaagtgatgaaccgtcggcaaccttgtttctcttgcactttaagcagctaactgttcccgggtaggacgctctcctgcaataaatcatggtagctgttaagaacggtggttcagttgctcccatatggtctgaagaaacggtgcttcagtctttagcattttgaggaggaaacgtgaaacttactggtcagctgaaggctataaacattgccatggccctggactggaagccccaactttcccaagcctgtagaaagcgccgtgtgcctctacagaagccaccgcgtgatgaccagcttcatccggcagggtgggtacagtagcaagctatagccctagtctgatgtaagaacaaatttatattatccatcccatattgtctttaattagattcatttttgaaaccaatgcaatttcagctcttgctgtcgtgcaaatctgtacccattgtccatggatgagtagatgacctgggagaatcacacaatacatattgtaatatcagttcacgttttaaagaagtgaatatgagtagatgacctagggtctc

SEQ ID NO: 102080 - DNA, 1776 bp, Zea Mays
ctcgctcgtgaagcgtctcgctgccctgcccccaccgatccaccacccccccactcatcacccctcagccaccgcccaccggccatgtcgtcgccgtcggtagccagcctccgtctcccgatgctcccagcgtcgccgcccctctcccgccgcgctatcgccggagttaccccgagcgcggccgcaccccgcgctcttctcctacaacccctcgcgcccaaggcgctcgcggcgtaccaccagcctgcgctcctcctccaccagcgacgccggcatggaccgccccccgtcgccgctgtcactgcctccaagccggttctcaaggacccgaagaagtaccaggagtgggactccatgacggccaagttcgctggcgccgccaacatccccttcctactgctccagctcccgcagatcgtcctcaacacccgcaacctcctcgccggcaacaagaccgcgctcttcgccgtgccgtggcttggaatgctcactgggctgctgggcaacctctcgctcctctcctatttcgccaagaagaaggaaacggaggctgtcatcgtgcagactcttggcgtcatctccacctatgcggtcctcgtgcagctcgcaatggcggagtccatgccggtgccgcagttcgtggccacttcggttgttgtggccgcagggctcatcctaaacttcctcaactactttggctggatccctggaaccctcttgctgctgtgggaggatttcattacagtcggcggccttgccgtgctccctcaggtcatgtggtcaacttttgttcccttcatccccaatagcgtactgcctggcataatctctggttctttagctgttgcagctgttgcgatggcaaggatgggcaagctttccaatgcaggggttaaatttgttgggtcattgtctggttggacagccacacttctcttcatgtggatgccagtggcacagatgtggacaaattaccttaacccaagtaacatcaaagggctgtcagctttcagcatgttgcttgcaatgcttggaaacggacttatgattcctcgcgctgtattcatccgtgatttgatgtggttcactggttctgcatgggcatctgtcctacagggttggggtaacctggcgtgcatgtactgctttaatagcatcagcggagaagttttctttgcaacatcagctggtctgcttctatggctaggatttactctatggagagatgccattgcctatggcaacagctcgcccttctcttccttgaaggagctgttttttgggaagtgatgaaccgtcggcaaccttgtttctcttgcactttaagcagctaactgttcccgggtaggacgctctcctgcaataaatcatggtagctgttaagaacggtggttcagttgctcccatatggtctgaagaaacggtgcttcagtctttagcattttgaggaggaaacgtgaaacttactggtcagctgaaggctataaacattgccatggccctggactggaagccccaactttcccaagcctgtagaaagcgccgtgtgcctctacagaagccaccgcgtgatgaccagcttcatccggcagggtgggtacagtagcaagctatagccctagtctgatgtaagaacaaatttatattatccatcccatattgtctttaattagattcatttttgaaaccaatgcaatttcagctcttgctgtcgtgcaaatctgtacccattgtccatggatgagtagatgacctgggagaatcacacaatacata

SEQ ID NO: 102081 - DNA, 1392 bp, Zea Mays
gaatgggcagaaaagtaacggcaggcagaggcgagaagcaagaagaaaacttagaaaagcgaggcgagcaagcaaatcgaggcaagaaaacgggggttaagggcagggcctgcagtccccctccgcggccgcgcctcgccgcggtttacagcctgtcgttagggattgctaccgttggtcaagtcgcgctgaggagacgagggcaggaggggcggtgggctgtgggatgatggaggcgggcggcgcgggcgcgggagcgggaggaagggacgagagggtaccgcagtggggcgcgcaggagacgcgggagctaatcatggcgcgcggggagatggagcgggagaccgtcgcggcgcgccgcagcgccaagacgatgtgggaggccgtcgccgcgcgcctccgggagcgaggctaccgacgaaccgccgagcagtgcaagtgcaagtggaagaacctcgtcaaccgctacaaggggaaagaaacttcagatccagaaaatggtaggcagtgtcccttctttgaagagctgcatggtgtcttcacagagcgtgctagaaatatgcagcaacaactccttgagtctgaatctggagtttctgtcaaaacgaaactgaagcgacctggtggtgactggtcatctcgggagtctgacgacaaggaagatgatggtgaagaaagtgacgatgagaagccgatgcacaacagaaagaggaaagctgatgacaagaaacagcaacatcaaagaatgtctgagaagtcaagaacaggaatttcgagcatccatgaactgctgcaggatttcctggtgcagcaacagcacattgatgtccggtggcgggagatgatcgagagacgtgcccaggagcgggtggttttcgaacaacaatggcggctgacaatgcagaggctggagcaggagcggttgttgctggaacactcgtggatggaacgggaggagcgaagaaggatgaaagaagaagcacgagctgaaaaaagggatgcactcctgaccactctgttgaacaaactcctgcaggaagatctatagcaggataagcttgctcttcgtttcatcagggtttagctgcagaagtggacattttctcaccttgttttatcaattctttgtagctactacatttattgacatgtgatttgtcaatttctttcagcatctgtattaggttcctagggctcttttttccagttatttagtagagcaaagctaattttatgcttaattgtggttgtaagtatcatactgccaagtaggtctacagaccaatgctaatatgcttgagagataattggtttctctgtcagcaatggacagaagtttatgtaatcggcctgtacaaaaataagttcatgtggcctcaaaggaaaaaaaaa

SEQ ID NO: 102082 - DNA, 1498 bp, Zea Mays
cgactccgagaacgaaccgggcagcaccccagcggcaatggagggccagccgctccctctcctcctcggtcttcgcccagccccaccaccctcgcctcatcctcaaccaccctacccgcctccgactccgcgtacaccgtcgcgagtcgaaccagctcgccgcagtgcgtttgaggcgtccatcgggcagtcagacgcacatggccctgaccgtagcggctgggagcgggtgccgacgctctggcggcgctggtgttccagctgaccgtgtcctcgctcccttttctcttccccaaccgtgcccgagtcctcgcgctcccgccccctctgggggccgctgcggtggttgaggcgacgcaggaggactggaggaggacaaggagtgggacttgggaggctgcgctgcagaagtggaagaccaagacttacgcgctctcggtgcccctccggaaaggcgcgctacgcggctccttccctccatcttggattaaggatttcgttgaagttcaggggaagaagctcaaattcagtgccgagctccgtgctaatcttgatgggatcttctctgagatgtcacggtgtatggacaagggtcaagttcagccaaagtccgcaatggcagctgatgtcgtgtcccttggtgactcctggcttggctatgctatctgtaaggaattgctagagcctgtcaagaatgctgaagaacaggattggttccgtagactgagtgacagatggaaggactgggaggatttatggaggcccgaacttgctgggaggatttcaatggtctactagagaggtgattggtgcagttctgaagcatctggggtcatcatataacacggttgatatggaaatagaggtcaatggtggtagagcagcagtcctgaatagctttacacaactacagaagcaggtccaactattccacggcatgaactatctgaaatcgtttagtctcggagatgtatgggtcgcagtgggttggagcagcgatgtggtcgttccctgctgcaaagcgaatgtctaatgtcgcggtggtcgttcccaagtctggcagcagcctatgggctgatctgtgggcaacaccgcgcgccacaggattccagaccgaccaaatcggtagccgaaccagaggcccatcttctccactcatccaccagtggttcgacttctgcctgcagagtgctaggagcctacccttctgccaagacgtcatccccggagcatctccgcactccgctgtacctcgagagccccgtgcctccagaggcccctcgagatagtaacaagcggaggacgaagctggacacgaaccttgtcaggggagtgccgccgcccgagatcctggaaagatgcgagtttttggaacccctgtcaggtaaggcgctggaggattaccggtagctggtgtccagcgtgcagagacctcggctcggtttggttgggaatgcagaagatgtcagctgtactagacttcagagaaagattatag

SEQ ID NO: 102083 - DNA, 704 bp, Zea Mays
aagattagggacccattaaaccagaatcatacacctcatcgatatagctttatttcccttgcccttttccagggcacaccccctccagctctccgccgtcggccatgggtcaagcctggggtaatctccaagataggctccaagggcggcggtggaaggagcaccaggtgaggaagatcaccgacaaggtgttcgaccgcctcacggaggacgcccagaagcgcgacaaggaggccctcagattcgaggaggtctacatcgccgtcctctgcgtctacaagtacagaagcgaagcgggccgtatgctacctcgtaacaccctgcagttttcatctgtttctgactgattggtgccgttcttgtcggtggcagtgacatcaataagtacttgccggggccgcaccacgaccccccgtccaaggagaagctcagggccatgatggaggtaaccacatccttctccttcgtttagattttgctgtttcagtatggccaatcgaatatcgtgttcttccggctgttccttgaactggaagcaaagtgttcttgatttatgtgtttaattatggtcacaaagtcagtgatttgatttggaagtctagaagtaattattgttttttccccttgtcgagatcccagttgcttcagctgccacagcctacaggtagttcttgggttgagtcattgagtgtggtttatcactg

SEQ ID NO: 102084 - DNA, 864 bp, Zea Mays
aagattagggacccattaaaccagaatcatacacctcatcgatatagctttatttcccttgcccttttccagggcacaccccctccagctctccgccgtcggccatgggtcaagcctggggtaatctccaagataggctccaagggcggcggtggaaggagcaccaggtgaggaagatcaccgacaaggtgttcgaccgcctcacggaggacgcccagaagcgcgacaaggaggccctcagattcgaggaggtctacatcgccgtcctctgcgtctacaatgacatcaataagtacttgccggggccgcaccacgaccccccgtccaaggagaagctcagggccatgatggaggagtacgacgtgaacctggacgggctcctggaccgcgaggagttcgcggagttcatccggaagctgaccgcggactcgctgtgctcgatcagcgtgaagctgctgatcacgctggtggcggcgccggcgctggcgatggcgaccaagcgggcgacggagggcgtccccggcgtgggcaaggtggtacgcaaggtgcccaacgcgctctacgcctccgccatcaccctgggcgttgtgctgttgcagagatcaaccgagggcgtcgagtgactcgcgctgctgaaactgcaatgtcgtcggctgtgtagatggagcagcgtatctaggataggtgttggttctttacggcttgtgcggtgaattgatctgtgtatcaattcgatgtgatttatcctggatttgggacaaatagttgtggatccttgtgaattgtcttgcttttttacctttaagatccggaacaaggctcaataagaagagagagagttacatgcgtcagcggcgcaaacaa

SEQ ID NO: 102085 - DNA, 1722 bp, Zea Mays
ctcgacgagatagaggagggagggagggagggaggcgcagtaggacagggctgcaggcaggtgcttgtccttagctggaaccctcccgtgtcggcctcatcccaccgccccgccctgccgtcctgccctgcgcggctgcggtcgcctataaggctagcccaggccatttgccctttgcccccgtccgtccgtccctcacctcacctcacctcacctcggcccgcctccctcatcaggtagccgtagcgagcagtatagcacgcacagccgccgccctgccctgccctgccctgctcggcgtaggcacaggcacagcccagagcgagcgagacagagggaaagagacagagccagccaggtaaaaggcaaaagcacagcacattaaaagagaggccggaagcagcggcagagcggagagagagagagaactagaagcatatatggcgatgccctttgcctccctgtctccggcagccgaccaccgcccctcctccctcctcccctactgccgcgccgcccctctctccgcggtgggagaggacgccgccgcgcaggcgcaacagcagcagcagcacgctatgagcggcaggtgggcagcgaggccgccggcgctcttcaccgcggcgcagtacgaggagctggagcaccaggcgcttatatacaagtacctcgtcgccggcgtgcccgtcccgccggacctcctcctccccctacgccgaggcttcgtctaccaccaacccgcccgtaagcaagcacggcccccgcgccgcctccgcaccccttcacactcacacgcacgtttaaccgcttttgcactgcacaaccccggccgcccggcggcggcgtccgtgccttgatctggttgtttactcggatcgagggattcagatgtcctctccgtccgtttgttaatcggctccggtcatttcttaatctcgtcctggattcggtcacgaaaagctagaggtcaagattttgctctcgattactatatccttgcctcatgttctaatggagtttattttattggtctgatgtgattagataggatgctagccaggcttgtctccggccaaaagcggcggtttagtttattgatgattgcttctttccttgggggatttattcctgtctggttgttgggagcctaaccacgctcctattgctgctgcggtttactaaccatctgcgccagtacacctactccatggaccccaaaatacagttcttccaaccattccccccctccatctgctttctcgcgggcaaataaaaacgtgtagaacgacggtgtagtaggcagatctactccttgtgccgctacgctagcccgctaccgaagatcgggcccgtttcaaccggttcgttggtctgagcggagctaagatggggcgcatttcattttttggtcctttcgtctgattggagaagtgcccattccggtatcgctccccggcctccaaatacgcaccgacacagaacgtgttcgtacgcacgtacacatggtatgcgcaccgtgctgctggccatagccgttgactcaccgggattcactcctctctcgcgtgtgtgtgtgtggcttccttgcagttgggtacgggccctacttcggcaagaaggtggacccggagcccgggcggtgccggcgtacggacggcaagaagtggcggtgctccaaggaggccgccccggactccaagtactgcgagcgccacatgcacc

SEQ ID NO: 102086 - DNA, 2466 bp, Zea Mays
ctcgacgagatagaggagggagggagggagggaggcgcagtaggacagggctgcaggcaggtgcttgtccttagctggaaccctcccgtgtcggcctcatcccaccgccccgccctgccgtcctgccctgcgcggctgcggtcgcctataaggctagcccaggccatttgccctttgcccccgtccgtccgtccctcacctcacctcacctcacctcggcccgcctccctcatcaggtagccgtagcgagcagtatagcacgcacagccgccgccctgccctgccctgccctgctcggcgtaggcacaggcacagcccagagcgagcgagacagagggaaagagacagagccagccaggtaaaaggcaaaagcacagcacattaaaagagaggccggaagcagcggcagagcggagagagagagagaactagaagcatatatggcgatgccctttgcctccctgtctccggcagccgaccaccgcccctcctccctcctcccctactgccgcgccgcccctctctccgcggtgggagaggacgccgccgcgcaggcgcaacagcagcagcagcacgctatgagcggcaggtgggcagcgaggccgccggcgctcttcaccgcggcgcagtacgaggagctggagcaccaggcgcttatatacaagtacctcgtcgccggcgtgcccgtcccgccggacctcctcctccccctacgccgaggcttcgtctaccaccaacccgcccttgggtacgggccctacttcggcaagaaggtggacccggagcccgggcggtgccggcgtacggacggcaagaagtggcggtgctccaaggaggccgccccggactccaagtactgcgagcgccacatgcaccgcggccgcaaccgttcaagaaagcctgtggaagcgcagctcgtgcccccgccgcacgcccagcagcagcagcagcagcaggcccccgcgcccaccgctggcttccagagccaccccatgtacccatccatcctcgccggcaacggcggcggcggcggcggggtaggtggtggtgctggtggcggtggcacgttcggcctggggcccacctctcagctgcacatggacagtgccgctgcttacgcgactgctgctggtggagggagcaaagatctcaggtactctgcctacggggtgaagtctctgtcggacgagcacagccagctcttgtccggcggcggcggcatggacgcgtcaatggacaactcgtggcgcctgttgccgtcccaaaccgccgccacgttccaggccacaagctaccctctgttcggcgcgctgagcggtctggacgagagcaccatcgcctcgctgcccaagacgcagagggagcccctctccttcttcgggagcgacttcgtgaccccgaagcaggagaaccagacgctgcgccccttcttcgacgagtggcccaagtcgagggactcgtggccggagctgaacgaggacaacagcctcggctcctcggccacccagctctccatctccatccccatggcgccctccgacttcaacaccagctccagatcgccgaatggaataccgtcaagatgaacctgagtaaccatgcggaccccaacatctcagagctgacgactctttgctgctggcctggcctcatcgtaccttgaggcgtcaaggaatacttcattaccactagtatcatgctcctggattttcgaacaatatatatatgcttatgtaccgctatttctctcatcttttacacttctttacccgtttggaattgtatgttctgcgtggcacggttgttcatttgacctttttggatttgattgaaagctccgtttcttgcttactccagcgcatcgtgagcaatgtccctgtctccgctgcatgtgaaagatctaccgctgcatgcatcagtagttcaaagatgttcagtgctgcgggagggaacatgatcctgatgggcacccgtcaggtccaagtcgtggcctcgtgggtgtttggagaagataaagcgtggcaacgctggatctgccgcaaagcttccagagttggtggaggaacaggctctaaccctggacgtgggtccttgcacgcactagttcgctggtccagtccagggacagggagcagagacgcaaggcagagccactgtactacgacggcactgcgggtgaaggcgcttgcctggtgcgattcgcatcacgtgttgtatcgggttccctccttgtcgctgacgcctttaccctttgggcttgcatggacacatggttttccatggatgcttgggttcacggtaccgacgcatcggcccgttggcgacaagggagaaaagccaagcctggttgcgtatcgcgccatggagcagtcagcactcggcagtggtggtggtctctccggtgtacggacgaacggtcccggcgttggaccatatgcaagtgtccacgacaacgagtccacgtga

SEQ ID NO: 102087 - DNA, 103 bp, Zea Mays
gtctgttatctatttctcttctaatatattgaagaggcaagtcttttgccgcttcctttcaaaaaaaagatatctaattatgaattataacattctgtactag

SEQ ID NO: 102088 - DNA, 489 bp, Zea Mays
atgctcaagtccttgcagagcgcagtctttaagaagtcaggttctgttgatcctgtaacaataacgataacgattttcttgagacattttgacattggcattgatgttgcgctgttatctcagtacatatctttgatgttcattgggatgttagttgtcatatctgttcgaggtttcttggcaaatgttatgaaattcttcttcgctagttctagagttgggagtcggtctacaaccaatgttgtccttgtcctatcagagatcatggccaggtacttcatatcttccattctcctcataagaaaaagcctggcaaatgaatataggtattccggtgatcattactgcggtgttttgggtggtgatatccaatttgacttctaccaccgctggtttgatgctatatttttggctagtgcattcctgtcattggttctgatatctgcccaatacaccaccaggcagacagacaagcgtccgattgattga

SEQ ID NO: 102089 - DNA, 213 bp, Zea Mays
ttctctacttttaccagataatgctgctgaacatgttgtacgctgatgacagatttttagctgcttgtcatgtgttgaacacaatttttggttactagtactaggagcatatatggctggctcatcgtcgaaacggaagcagagagatatatacagttgatgatgatgtggtcttcgatgtttgtttgtttaattccctctggtctaaaaagc

SEQ ID NO: 102090 - DNA, 1671 bp, Zea Mays
ctcttcccaaacccatcccgccgttctcttcctgcttcgttcttctctccacccgtcgctcctccctcctctcggcgagggagacccccctctcttcacagcgtggattattccattcttcgtctgccgtttgccgtggcgcgtcatcgatggcttgactctgatcgtcgtcggcggtgttgctgttttccagagctccaagatcgacaccgacagcatagcacctcctgctcaaggacatggtgctcaagttctccggctccagcaagcagtgcaaggggacggccgggacccagtcgttcaggagcagcggggacaggtaccgccgcccctaccccggcttcatcgacgacacaggcttcacgcccgcgagcaaggttctcggcgaggactactacccaaggaccgcattggcgggggcagcaggcgccgccggtggcgcgcgaacggcttcgtcggatacgttggacatgggcaggagcaaccgcaagagccccgggagtagcggctggattccgggcaccgacgaggcagcggcgggcggggacgatgtcctcgctctggaggacgccgccgcgcccagggagtggacggcgcaggtggagcccggcgtccagatcaccttcggtaccatcccgaccggcggcaacgacctcaagcgcatccgattcagtcgggagatgttcaacaagtgggaggcacagcggtggtggggcgagaactacgaccgcatcgtggagttgtacaacgtggtgatgttcagcggccggcagcaagggtgctccactccggtgtcctccgtcgacgacttggcgctgagggactcgtcctactcccgtggcggctcgacaagcaggggcagcccgatcacagcgccgccgccgccgccgccactgccgccggtggcaagcaaagaaccgatcacccggagcgcgtcgtacaaggcaacggcagcagggtcctcctcggcaccgtacgcggccgcgcattccaccagggcggcagcggcatacttcccgtccgcggccgtgcccgacccgtcggaccacgtctgggcgcaccacttcaacatgctcaactccgctgctgcggcggccggcacgtcagcggcgatgggcggcggggccccgtcgtcctacgacccgtcgcgcgccaccacgtcgtccagggacgaggcctccgtgtccctcagcaacgtgagcgacctggaagccacggagtggatcgaggaagacgagccgggcgtgtgcctcaccatccgcgagctcggcgatggcactcgcgaactccgccgcatccggttcagccgggagatattcggcgaggatagggccaaggtgtggtgggagcagaacagggagagaatacaggcggaatatctgtagcaagcgatcagacactgagctgatgcaattttcaggcctgatgggataatcaaatatgtttgtgagaggatagattagggagatgataccgctatatacatggtgaaaacaacgtgaagggggaaactgtgaaagtgaaagaaatggtacctgtccttagttgcctaaactaataataagtttgtacatcgttggtacaatggtaccgtgtctggtttaaagttactttgtactgtacgtgtactgtacatcttggttccttcggtggtttaatttgtttttttaa

SEQ ID NO: 102091 - DNA, 1427 bp, Zea Mays
gcaaatatgtgttcgtcctgctgtcgtgctacaagtcgcgctaggccgctggcccattgcacacacggcccaaaatagtcttgcaaagtccaaggaaacgacgggttcacagccgctgcgctcaattgaccctcccctcgccggcgtccggcgatcgccggcatccgagcgatggatcacccatccacgtgatggatccgacagctccttccccggccccccctgcgggcgatggggcacagccatcggaccagaaccggcagcgaccaaggtctgcactccgtggcgccctcggggtggccttccccatcgcggtatcgttcctcttctccttcctcgttgggctcgctgggctcgcgcttggtggcctctcgtccaccgcatcggtctccatgccctccacctgccgcatcctctccagtggcgttgaccttaggtcatcaaaagtttgcgagcttgggttattgaactatagagctaagcatgtcttctacccatcgagtaagaggagattccgctgccatgatgactactactgggcttcagttttacaggttgaatacacagaatatttttctggccaattatcttatgcagtggccgaggccccgaaagaggctcttcctcataattgtcggcctgattttggtgctgcatggtcaacaacattaaagttcaaggtcaatgaatcatacagctgcagatatatgctaggtagtaacaaggctgatattcactcgaacaagctattcaattgtactgctgaggaaccttcgactggggagctgttcaaaaggatacttatactgttttcagagatgtatgtgtcagaagatttcagttcagggcgaatgcttgtatatgtggcagcaggtgttgtgctgggcatgctgagttcgatgttcattacggccttattcagaggtatgtatgggttgttgctcgctgccgccaggtgggctgtgaggaagcattgcatcagagtatttgccagccggttgaagcgtgcctgccttcttgtcgcctatgtatccgctgttggctggatcaccttgcagtacagcaaatttatcgggttgaaagaactcttgtcggattctgaagtcatggagaggttcttttaggctgtagatgtattcgccggtgtatattgtacttgtaataccattcggttatttaggaaggtttcttcttcttctttttgatgtgaaaccaatgctctgttgtacgagtatgtacatgccagttgccagctacactgctgctctgtcacaaacgtgttgttcatgccacattttatcagggacagctagctgacgacctgagtacctgacgtctctgacgatgcatccttttttctccttgggaaatggatggaattgtatgttgcaaactgttgaatggttccatttcaccaccaattccgt

SEQ ID NO: 102092 - DNA, 1435 bp, Zea Mays
cttcggtcccgatcacatcatgttcctgctgtcctgcacgtgcacgtataaaacccaccccaacggaaaagccccattgttcagcaacaacaacaacacaaatcatcggttccgttccgtcgcagaaatagaaaaaaggctttcttgtcccacagggcagggagaccgagagagcagtctagtgattagttgatcaccagacgtccagacaccatgagctcccgcatggctggagcagcgcttctgcgccacctaggcccgcgcctgttcgcggccgggcctgcggtgtccgggctcaccgcgaggggcggcatgcccgcggccgcgaggcttctccccgcgcggatggccagcaccgccgcggaggctgccagagaggacgccggtgcaaataaacggcacggcggcaccgagaagcatgaggaggaggcagcaggcgggcagagcaagaaggccgtcgtcagctactggggcatcgacacgcccaagctcgtgaaggaagacggcacggagtggaagtggaccagcttccggccgtgggacgcgtacacgtcggacacgtccatcgacatagggaagcaccacgcgccgacgacgctgcccgacaaggcggcgtacctgatcgtcaagtcgctgcgcgtgcccatggacctcttcttccagcgccggcacgccagccacgcgctgctgctcgagacggtggcggccgtgccgggcatggtgggcggcatgctcctccacctgcgctcgctccgccgcttcgagcacagcggcggctggatccgcgcgctgctcgaggaggccgagaacgagcgcatgcacctcatgacgttcctcgaggtcacgcagccgcgctggtgggagcgcgcgctcgtgctcaccgcgcagggcgtcttcttcaacgcctacttcgtcggctacctcctctcccccaagttcgcgcaccgcgtcgtcggctacctcgaggaggaggcagtgcactcgtacaccgagtacctcaaggacctcgaggccggcatcatcgacaacaccccggcgccggccatcgccatcgactactggcgcctccccgccgacgccaagctcaaggacgtcgtcaccgtcgtgcgcgccgacgaggcgcaccaccgcgacgtcaaccacttcgcgtcggacatccattaccaggggatgaagctcaaggacacgcccgcaccgctcagttatcactgacaagtaggcgttgcctgcctgctgctcaattcagagttcttacacgttagactgtcattggtcttaatatgttgttgtgctagccaaagttgcttagcagatcaagactggtttgctactcggaggtgaactagttgcctatatggtttgtacgtaccagtatattgtagatatttgaaataacaaatataagaatccggtgtgatgttacttattaaacaaa

SEQ ID NO: 102093 - DNA, 1406 bp, Zea Mays
gctgccggctgcgcttctactccatctgtccaagaagcttcgctgccagccgccggccgagtccaacagtcccacatgcacctataagaaccactccacaatggaaggacgtttccttgtaccagaacaccaaaagccatctgatctccactcctgcgaagagatctagcacatcgccacatccacacacacttccagctcctccaaatatttcgcgccacttgcgggctctgacggtttagctccactccagccatgagctcccgaatggccggagcagcgctcctgcgccacctaggcccccgcctcttcgcggccgagccggtgaccgggctcgcggcgaggggcgtcatgcccgcggccgcgaggattctccccgcacggatgtccagcacggccgcggaggccgccaaagaagctgccgcgccacaacagcgccaaaagcccgaggccgcggccgcggcgccggaggggcaggacaagaaggccgtcgtcagctactggggcatcgagccgcgaaagctcgtgaaggaggacggcacggagtggaggtggttctgcttcaggccatgggacacgtacagagcggacacgtcgatcgacatgaagaagcaccacgagccgaaggcgctgccggacaagctggcctactggctggtcaagtcgctggtcgtgcccaagcagctcttcttccagcgccggcacgccagccacgcgctgctgctggagacggtggcggccgtgccgggcatggtgggcggcatgctgctccacctgcgctcgctgcgccgcttcgagcacagcggcggctggatccgcgcgctgctggaggaggccgagaacgagcggatgcacctcatgacgttcctggaggtggcgcagcccaagtggtgggagcgcgcgctcgtgctcgccgcgcagggcgtctacttcaacgcctacttcgtcgcctacctcgcctcgcccaagttcgcccaccgcttcgtcggctacctcgaggaggaggccgtgcactcctacacggagtacctcaaggacctcgaggccggcatcatcgacaacacgccggcgccggccatcgctatcgactactggcgcctccccgccgatgccaggctcaaggacgtcgtcgccgtcgtgcgcgccgacgaggcgcaccaccgcgatgtcaatcacttcgcatcggacatccattaccagggcatgaagctgagggacacgcctgcgcctctcggctaccactaattagtcaacgtggcctgctagtttagcaatgtcgcctgtattacgggtcggtcatgatgttaattaacctactgccttatttgtgatcaatttgtctgcattatttgtgtataaataaataatatagttgtgtcacgtgctaatcgatcgagtctgattta

SEQ ID NO: 102094 - DNA, 1664 bp, Zea Mays
gcgtgtaccaatttcgcatcacaagtagatacagattttagcgtgcaaaacgttacacgtgagaaccctaatgacacaggctgcttccaaccataagaaaaaaatcacggggtaattaaaaccattcgacttggagaagaagaaaggacctcctgggtttctggaagcccggggaagcaaggctccttccccgtcactgacggggcggatccaccagtcctgtataaaagtccttccccaaaacatccgcctcacttccaaactgcaacgaaaacccacgtctaaaacaggtggcccaccaacgattcacttccccgatcccagggggcggcgatcggaattcgcaacttctcccacgcggcgaacacggcagagatgatgagctcccgggccggatccatcctcctccgccacgccggctcccgtctcttcaccgcagcggcgatctctccggcggcggcctcgaggccactgctcgccggcggcaatggtgttccggcagtcatgctacggcttatgtccacgtcctcccccgccgctcccacggaggcgaaggacgaggcagccaaggcctccaaggtgggaggagacaagaaggcggtggtgatcaacagctactgggggatcgagcaaaacaacaagctagcgcgggacgacggcaccgagtggaagtggacttgctttaggccatgggagacgtacacggcggacacgtccattgacctcaccagacaccatgagcccaagacgctgatggataaggtcgcatactggaccgtcaagtcgctgcgcttccccacggacatcttcttccagaggcggtatggctgccgggcgatgatgctggaaaccgtggctgcggtgcctgggatggtgggcggcatgctgctccacctgcgctcactccgccgcttcgagcagagcggcggctggatccgcgctttgctggaggaggccgagaacgagcgcatgcacctcatgaccttcatggaggtggcgaagccgaggtggtacgagcgcgcgctcgttatcaccgtccagggcgtcttcttcaacgcatacttcctcggctacctcttgtccccgaagttcgcgcaccgcgtcgtcggctacctggaggaggaggccatccactcgtacaccgagtacctcaaggatctggaggccggcaagatcgagaacgtccccgccccggccatcgccatcgactactggcgcctccccgctaacgccacgctcaaggacgtagtcaccgtcgtccgcgccgacgaggctcaccaccgcgacgtcaaccactttgcatcggacatccattgccagggaatgcagctgaagcagtcccctgcgccgatcggataccactgaggatgtttgtgctcttcttaattttgcatcgctaataagcaattgtctttaagggaaggaaaggatgcttattgagttacgagtactgctacggcgattaggatattttccaaccagttgtttgagagtgaaacctattatatgtacgcatgttacatgtacatatctctaagtgcgagaggtgcttttctggcgtttatcacttcttcctggagttcctttgttcttcatgtcagctgaattgggctcgctaatatcgaatgtacaatttttgcataatccctatcttgtttgtagat

SEQ ID NO: 102095 - DNA, 990 bp, Zea Mays
aacccgactcctcgacgcggagagcagattcgcgtgcaaaactccccgcgcgtccgccgccgaaagcccacgccccgacccgcagggtgagaccgggccgaagggtggattctggaccaagtgtatggagaaattcagtcagtagagaggcttaggcagcaggacagagccacgatcggcatgcaaaactagagaggaagcatatctgctaatatatctactttgccatctaagctcggaggtgagaaggtagtttatgatgctaccaagaaaatcttctcaagctccagtggtctagctgaagatattctattcttattcacagattggttgtcactacttagagagattgtcaatattgaaacaagggctcggcgagcgagtcgtttccacccctagccaaggtggtcaagctcggccttgccgctgtgctggcctatgggctgttcgacgccgtcacctacacgacctccgtgctcgcattcctcggctacgagaagagtacagattgttatcctaatgtggactggtaacagcgtcacaaggccattccgtgtcgccggtacggatactttggccccaggctatcaacaaaggcttgaaaagcattcaggagaaacttaaccttccaagccaagtgtatgcctttgcacttgtggttggttctgtggcctcagtatgcttcacagttgttggtgtcttgatcctctcaaagtggggaaagggtcgcctctcatgcacatccacagttttgttctgttgcaatgttctgtttccatgctcttttccatgggtgtgagttttctacacattagtttgaagtaattgatatttgactaattcagttttctgtggataaaatccttctaacttggttaataattaagataatttagttttggtcttttgatttgtgggttaccacattaaaagagcagagtctcaatattcctggttcttaggagtataggaacttgggtttttgttttt

SEQ ID NO: 102096 - DNA, 367 bp, Zea Mays
aaagccatggagttatctagtcagggagaatgcacatcctgacagcttagttcttagaacaaacatggggagcaaaaacaaagacaataagatatgttctggtctgccacttcaaaagtgaattggtggaagttcaagctcactatacagggaggtacaaatcatgaggtgtctgaaggaattaagggatctggtgcaagtgattcaaatattgtaggctgtgacgttgtaatgcgccttaaaaggaatatgacctatatgtttatttcaagaatttttaaaagttcaattcaataaagctgggagctcaactacacttaggaccaaaagtaaagtagttgttgtatcaacaacaaaaccatttagt

SEQ ID NO: 102097 - DNA, 2610 bp, Zea Mays
atgattctggcaaaaatgtgctgcaagtatttctaagtccaccaagtaaaaaagaacatagacttgcagcatacgttctgccctacatattctcaatcgcttcagtcagtcagtcttactagtagccagccattggcttcattttttagccaaagacaaacaggaggagggaggagggatggttctccttcgtccctggcacatcctcttcttcctcacatgcttctccccatcctttgttcatcctatggaaccaggcacctaccgttgctccaatgtttccatcccatatccttttggcgttgctggtaagagcccctccctgtcccgtggatttaaagttgtgtgtggacacagtggtccgttgctgtccatcggaaacagcatgcttgggattcttgacatctcgttgcttgatggtcttgtgagcatattggctagtgctagttctcagcagtgcataggaggggaggcgaactctagcgttaaccttgaggggaccgtcttcacattctcagacacaaggaacaagttcacagctctgggttgtaacgtggtggccatgcttttgaatggcagcacggggtatagcggtggctgtgcttccttttgctctagcggaaatagcatcatcgacggctcatgctctggtgtggcttgctgccaagcgcctgttcccaaagggctaaagaagctggacttagagttcagtaatattaatataaccaacagcggcatcgattacgggccatgtggtcaggccttcatcgtggagcagaattcatatgtgttttcacttcctgatctgaactacacagttgacacaaaacctcaataccgacatgttgtgctcgagtggtctgtgaacggcagcagctgtgaagaggcgaaactgtccggatcatacgcctgcgcagagaatgcctactgctacaactcatcaaacggaatcggttaccgctgcaattgctccagtggattcgaggggaacccatacctgcaagggccaaatggatgcacagatattaatgaatgcatcaccagaaatccgtgcaccaataggtgctcaaacacaataggtggtttccagtgcacgtgcccagcagggatgagcggcgacggcctcaaggaaggaagtggttgcaatggagtaagcacactagtgattgcaatagttgcaggattagctctgctagtgcttctcctcatccttggcttctggactcactggcttgttaagaagaggaaacttgcaaagacaaggcaaaggtacttcatgcaaaatggtggcctgatgctgaagcagcagatgttttctgaggaggcgccgctgcacatattcacctccagtgagcttgacaaggctaccagcaacttcagtgatgacaatattgtcggcagaggagggtttgggactgtgtacagaggcattctgtccaatcaagtggttgtggcgatcaagaaggcgcagcgagttgatcaaacccagacggaacaattcatcaacgagatgatcattctttcacaggcgaaccacaaaaacgtggtccagctattaggctgctgtctcgagactgaggttcccttattggtctatgagttcatcaccaacggggcccttttccaccatcttcacaatacgtcggtccccatgtcatgggagagccgtctaagcatcgcggttgagactgcgtcggcacttgcatacttgcacttagctgcaaagatgccaattattcacagagatgtcaagtcgtccaacatactcctagatgacaacttcactgccaaggtgtccgatttcggtgcctcaaggccaataccgcacaaccagacccatgtgacaacattggtgcaagggacactagggtacatggaccctgagtacttccagacaagccaactgactgagaagagtgatgtgtacagctttggcgtcgtactcatcgagctactgacaagaaagaagcctatcatggatgatatcgcggaagacattagaagcctagcgctgcaatttagtatgctattccatggaaataagctgttggaaatcgttgatcctgtagtagctgaagaagctggagtcagacatgttgaaacggtttcgaagttggcgttacgatgcttaaggttgaaaggggaagaacgcccaaggatgatagatgttgcgattgaacttgaagcactgagaaggctgatgaaacaacacttcatcttgaagaacgagtctttgcttcaggagtcatgttgcaatgaagaaatgagcatcgacgcaccatcaagtttgttccttggcgttgatggcatttctgacgatgaaggcatggagatcattccacttacatgtccatccaaaattctcacatcctatccctaactcgcaactatcacaaataaaaaggattttagctgacttctaccttctcaattgccaattccgtcttagtaatctcttcgtcttatgattagcttccaacgtaactacccggttaatggaatatgactgagttatttggcttatcgtcattcagctatgttctctttttgttcctcttgcagttcaaaaggcgatggtagtttcgctatgttggtatctctactgtatcg

SEQ ID NO: 102098 - DNA, 871 bp, Zea Mays
aataaacagaattcaaaatttcatttggtatatccacgcagctcactgaaacaaatcctaggaaaaaaggacacagtaacacaagcatggacctcatctaaattttagcaatcccgcagagcaaccaatgaaataacaaagtgcgacgaacgatctgggatgtacctttaagctgaggggatctcgacctcaccatcatcgatctcctgctgcaagtccttggggtccttcccatcgacggtgcacccgacgctgacgcaggtccccaggatctccttgacggtcccggccaactccttggccatggacctgttccgcatggtcttggcgatctcgatgacgtcgtcgaggctgatgttgccgctgtgcttgatgttcttgaccttcttcctgtccctctcgggttccttgagcgccttgatgacgagcgccgcggcggaggggacgacggagaccttggcctgccggttctgcacggtgagcttgacggtgacgcggaggcccttccagtccttggcggtctccttggcgatgtcctcaccgatcttcttcggggagagaccgagcgggccgatcttgggggccagcgacgacgccgcgccgacctcgcctcccgtcacgcggacgaagacctccaccacctgagaggggtccaatttgggcggcatggctgctgcggcggcggcggcgggtacagatatctcatctacctgtattattaggatgctacaagcagtacatggaaagggacgacgcacaggcatctgcagtccagtggttcgtgccgcattcgtgcgtgtgtggtgtggtgactggtgacgacgtcggccgtgggccgtggcacggcgctgcacggtacggctttatgatg

SEQ ID NO: 102099 - DNA, 868 bp, Zea Mays
ccggtaggagtccacggaatcgaaaacccaccgcaccctttcatcagcctgcctgtccactgttggcttggtgacttcctccgctccgctccgctcccctccgctcccgaacggtcgatctttgcatggcagcagcagctggctccaaggggcgggcgatcgctggaagcttcgtcagccgcgtcctcgccggcaaggccgcctcgccgaggagggccgtgcacgcctcggcgtacgacaagaacctggaggaccaggtgcgcccggcgttcgtgccggacgatgtgatcggcagcgccgggagccccgacaagtactggagcccccaccccaagaccggcgtcttcggcccggcggcggtggaccccaagctggccgctggtggcgcgccggacgccggcgcggatgctgcaggaggcacggtgctggaccagaaggtgtggttccgcccgctcgaggacgtcgagaagccgccccccgccgcgtgagccgcgcggcgctgctaggccagcccacactgctgctcgctcataaaaagggcggcgggagagcctggcagtggcaggcactctgctcgtgctcggccgggctgggctccctgcttatatcactgcaatattatactactagtagtggtgcttgatagcagtgtgtggctgtgctaataccagtataatactggttctactataatacagtcgtatcaggcatggcgtgcatcaggactggttgtgatagtagcaacgtgatgctcgtgcctgtaataagaacaagcaggcgatgtgtgcctgtgatgtaccggtgtcgtcagtgttataagtacttgggtcaatggtttctgcatgtgtttgttaccttgttgcacttg

SEQ ID NO: 102100 - DNA, 1819 bp, Zea Mays
aacccatgcacatgtcttaacatgtttggcttccgagcaaactttctccagaccccccaagaaaatgtaagatccgatcagatatgtgtcgatgctcatcccagcgtactcccattgcaacgcacgagcacacaactagttaactataaactctataaatgtaagctactttcgcagtagctttacggatcctgtaattacattattttatggactgagggagggaggagaggatcaataagccacgcgggccccaccatatcttcatccacaaagccaccaccaagctttttcatggtcgtcgctttccgctttcctttgctgctgaccatatatctacggtagcaagacaagacaaggaagtcggctgatccatggcggccttcacggtgcacacgagcgccgccacctcgccctactcgccggcgggcacggccatccttctccgaagccggagtcgagcctaccccaccgccaccatccgcgtgtcgtgctcgaagacggtggtgatcggggtggcggcggactcagggtgcgggaagaccacgttcacgcggcgcctggcgagcgtgttgggcggcggggcggagccaccgagggccggccggaacccgggctccaacacgctcgtcagcgacaccaccacggtgatctgcctggacgactaccactcgctggacagggtcgggcggaaggcgaagggcgtcacggcgctggatccgaggttcgtcgacttcgacctcatgtacgagcaggtgagggccatcaaggagggccgcgccgtcgagaaacccgtctacaaccacgtcaccggcctcctcgacccgcccgagctcatcaccccgccgaacatcctcgtcatcaaggggctgcacccaatgttcgacgagcgcgtgagggacctgctagatttcagcatctacctggacatcagcaacgaggtgaagcttgcatggaaaatccagagagacatgggagagcgtggtgggcacagccttgagagcatcaaggcctccatcgaggcaaggaagcccgacttcgaagcttacattgagccgcagaagcagtacgcggacgccgtgatcgaggtcctgccgacgcagctgatcccgggcgacgacgagtgcaaggtggtgcgcgtgaagctgatcatgaaggaaggcgtggagcacttcgcccccgtgcacctcttcgacgaaggatccaccgtctactggatcccctgcggccggaagctctcctgctcctaccctggcatcaggttcgcctacggcttcgacacctacttcggacacgaggtgtcggtggtggagatggacgggcagttcgacaagctggacgagctcatctacgtggagacccacctgagcaacctgtcaaccaagttctacggggaggtgacgcagcagatgctcaggcacgccgacgtccccggcagcaacaacggcacggggctcttccagaccatcgtcgggctcaagatcagggacctctacgagcagatcgtcgcacgtcgctgaccatgacggccaaccctagcaaggtctcgtttttttgtcccatacaaacaatcaaacgcagaccgatacttgatcaatacatgtgcagagcctatttctgctcccacgggcaaccaaacacatcgattgtgttcgtgcgcatcagcacgggtgtagaatggataggcgtgtgtgtagttgtgtacaggctacacgcgtgtccggtccgatctttttgacagattcgtgcaatgtcgcgtgagttggtgtggatgtcggtacgtgggcattcttcttgcaaatgtccaggtcacactaga

SEQ ID NO: 102101 - DNA, 2007 bp, Zea Mays
aacccatgcacatgtcttaacatgtttggcttccgagcaaactttctccagaccccccaagaaaatgtaagatccgatcagatatgtgtcgatgctcatcccagcgtactcccattgcaacgcacgagcacacaactagttaactataaactctataaatgtaagctactttcgcagtagctttacggatcctgtaattacattattttatggactgagggagggaggagaggatcaataagccacgcgggccccaccatatcttcatccacaaagccaccaccaagctttttcatggtcgtcgctttccgctttcctttgctgctgaccatatatctacggtagcaagacaagacaaggaagtcggctgatccatggcggccttcacggtgcacacgagcgccgccacctcgccctactcgccggcgggcacggccatccttctccgaagccggagtcgagcctaccccaccgccaccatccgcgtgtcgtgctcgaagacggtggtgatcggggtggcggcggactcagggtgcgggaagaccacgttcacgcggcgcctggcgagcgtgttgggcggcggggcggagccaccgagggccggccggaacccgggctccaacacgctcgtcagcgacaccaccacggtgatctgcctggacgactaccactcgctggacagggtcgggcggaaggcgaagggcgtcacggcgctggatccgaggttcgtcgacttcgacctcatgtacgagcaggtgagggccatcaaggagggccgcgccgtcgagaaacccgtctacaaccacgtcaccggcctcctcgacccgcccgagctcatcaccccgccgaacatcctcgtcatcaaggggctgcacccaatgttcgacgagcgcgtgagggacctgctagatttcagcatctacctggacatcagcaacgaggtgaagcttgcatggaaaatccagagagacatgggagagcgtggtgggcacagccttgagagcatcaaggcctccatcgaggcaaggaagcccgacttcgaagcttacattggtgaaagcctgccggcaaccttgcatttgcacgccgaaaattcgcaagtcaaagtgcagagctgagtgctcctcttcttcctgctgctgtgcagagccgcagaagcagtacgcggacgccgtgatcgaggtcctgccgacgcagctgatcccgggcgacgacgagtgcaaggtggtgcgcgtgaagctgatcatgaaggaaggcgtggagcacttcgcccccgtgcacctcttcgacgaaggatccaccgtctactggatcccctgcggccggaagctctcctgctcctaccctggcatcaggttcgcctacggcttcgacacctacttcggacacgaggtgtcggtggtggagatggacgggcagttcgacaagctggacgagctcatctacgtggagacccacctgagcaacctgtcaaccaagttctacggggaggtgacgcagcagatgctcaggcacgccgacgtccccggcagcaacaacggcacggggctcttccagaccatcgtcgggctcaagatcagggacctctacgagcagatcgtcgcacgtcgctgaccatgacggccaaccctagcaaggtctcgtttttttgtcccatacaaacaatcaaacgcagaccgatacttgatcaatacatgtgcagagcctatttctgctcccacgggcaaccaaacacatcgattgtgttcgtgcgcatcagcacgggtgtagaatggataggcgtgtgtgtagttgtgtacaggctacacgcgtgtccggtccgatctttttgacagattcgtgcaatgtcgcgtgagttggtgtggatgtcggtacgtgggcattcttcttgcaaatgtccaggtcacactagatggagctgtctgtgttcaggaattctctgagagccgatctcttgggagctgagggcatatttgaggatacacatcttgagctgagagtcagctg

SEQ ID NO: 102102 - DNA, 2129 bp, Zea Mays
caaaactatagctagttagacaagagtatctgttatgtacgagtagtaaactaaagaaatttaactgtaggagtgtagtagaattgtaggaacataatacgcaggattcaaactattggtatgcacgcttagacactatcgcatgatgatgacctctcaacataattcacacacgcaaacacctcacccatttgaggttaccatctactctgcgcgctgcagcgcacagtattgaacttaaaagctaacggtcacaagtaaaaaggagccaggtagccctaaactgatcaagccgcacgctgtacgccagaatacaaccgactagggtcggtaaacgaaacgaaacatcattaatgatggaatcatgcggacctggacgacggcgagggcgaggaactgctccagcttgagggctggtttggtgaccggggatcccaagcggaagaaatccttttgctattcaaaattgaattgcaagggaattcctcccccatggatcccctagggatccctaatcaccaaatcagcccagggtgagctggtgccatagctttcgctggtacaggtcggcgagcgccgcgtaccattccgcgagctccggctgggtcgcgccctgcgcctccaggaactccaacgccgctgccatcgacagccaaagtcccccttttctttcgtcccggccaagaagacgagcacgggaagaaccgaagcacgaatgcacgacggaacgatctgctcggtcgcggtcgggctcgcaggcttcgcagcttctcaccgagcctgtatacacttgtatacttagaaggcccaacaccacccataaggcccacaagaggctgtagcgaagttggaatggatcactagtagagtagcaccagaaaggagtactccaccagaaagatagacacgtccgccgtctccgctccggttttcgctgtctcgctgccgtcctaggtttggagccaggtcaccggcgctaggagggcgtgaaatcgagtcgacggtcggcactcggcactcacgcgttctccacctactgctggcgctcctgtgaggcgacgccggaccggccaccccgcatgcgaacagcgcacggaccggccaccggtgtgacccctccatccaaggcttcagctccagaccgagccgccccgccaatcgccgtccgccgaaccgcctaggaatttgttttcctcatctaaagttactgcattgtattccatagaaatggctatggggttgattaatgctaatcctataatccatgagaaaaaagaaagacgcatccgacaggcaccagagaccacagatgaaaatgcggtagagtccatagaccagctggaaatatttgatcacattagagatataaaggatccagagcacccatactcactggaacagcttaatgtggtgactgaagactcaattgaactcaatgatgaaagcaatcatgtcagggttattttcaccccaacagtggagcactgcagtatggcaactattattggcctttgcatacgtgtgaaacttgtacggagtctccctccttattacaaggtggacataagggttgcccctggatcacacgcaactgaagctgctgtgaataagcaactgaatgacaaagaacgtgttgcggctgcattggaaaacccaaacctactggacatggttgaagagtgcttatcaccaacattcgattgaggtctcagttattgcacatctgggagccatggtgtttcatgttcagaagccacacaagcttattgccataggaattcactcctgaatattatatttgagggccatggtgtttcatgtgcatgattttttttgtcctccgtccctttgagttaatacaattgttatctttttggacatttgttggtgcttgtgacctccctgggcaaagggacatgtaatcagatcttgtgtagtagctttcagagcgtttccagtgccacgccattttgtggctgtgtacccccagtcaactgaacttggtaggtgaatcctagaatcctcaagcacgagttgtttatgtctctatacgcaggaaatgttttatcttctcagctcaactgatcatgctaattatttggcttgattgcctcctgtttttcccactg

SEQ ID NO: 102103 - DNA, 1342 bp, Zea Mays
atctcaggaacccaaacagccgacggaatctcacctgctctgctctgctcgccggctccagcccatgccttcgctcttcgctgccccgagccctccgcgtcccgccgtcacccgcccgcgccgcgatgccggcgtgggcccaagcggcgctcgtgctcgcctcgccatcccccgcaaccgtctcctcgaccacgtcgacatttggcgtcaggccgctcgtcgccgtggaatcaagcaggttcttctgcaagatcaaaaacttacttaagcaaatactgacgtcggatcagcccctcactgctcttatattcaatccatgtcacgaatccacaaggaaagatgagtctatcgtcactatgaatgcctatgttagtcccgagaccgattcaaatccagatcctaatctcattaaagtgaagcttttcgtggcaaacgcaaatcaatctgtagtacatgccgaggtgggtgaagaattttgcaatctcctgttcagtttcctgaccttacctcttgggcacgtggtgaagctccttggcgtgcgctcgtcaatctcgtgcattgataacctctataggagtttgaagttcaacctggatgattgcatgaattcagatgaaattagagacatggtcgtctcccccaggctgcctcccttcttcagttgtaccaaccccttgtttcccaagtgatgagaagcccccaactgtatcttctgtcgcttgctgccctccttgcatcagaaaccgttgtctggtgcatgcagaaatgaaatgcgaccatggcacgacgaagctcttggctgtgaatcccaaggtgccaaccgtgacaacagagatcggtggtggctatgcaaagggaccaggcaagttcttggtgactgatggacttggcattgctccattctcgctaatcaacgtcttgaacgaactgaaggccaaggaactctctgtgtcaaaccttgtgacaacagaggtcacattcacacaagtgaaggcactcgacctgttgagggctgcattggtctctcgcaatgcgctgaccctcgcctgcctgccgaccaaaccaaagagacggcctaatcatcgctagtagttccaaagacgggcagggagagttcttcttaatggcaatttcagttcattgcagtcttttgcacgtttccggaaagtatatgcattcatttgtggcgaatttgaacttgttccaggaaggcaattgaagtttgagtctgggctgagttttttttgtttgttaccttgtgtttgtcttcataggtctaatgtctttatatttatataaagtgctcagccctttatgacctgttggtttggatttaatccgt

SEQ ID NO: 102104 - DNA, 770 bp, Zea Mays
aagctatcaaaatgtatgatgaggcttgttcagttctagaagaagatgggaaggaacatatggcttttgacttgtaccgtgtcgcagcagctttgtatatcaagatggaaaaatattcagatgttgctgctttgtttttaagacttggttcagctgctgataagtgcaatgccatcaatagccaatgcaaggcctatctgagtgcgatcatcatctatctttacgcacatgattttcagcaagctcaaaaatgctacaatgactgctcagaggttcaagccttcctcaatagcggacagaatcgatgcacaacaaagctattgtctgcttatgaggaaggtgatgctgaagaaatcaaacgcattgctcaatcaagtgccttcaatcatcttgaccatgtggtaattaggctttcatggaagctaccaacaggtgatctgtaggccatcaagaaagctgacgatggcgaggaatccttggacgaggatgatgtgacttaaaacgatctcccgagccaaaaggtgcatagagcaaacgtcatagtttgccatcggtgggggaacagctgtaaaaagaagttatgcgagttacatactaaaaacttgtgggcagcattcccagatctataaacatgaaatttgtagggcccaattatgttgtatccgtacgggtggtttggtgttaccgaaactttagtggtatgtttatggtgccatgtgctacatgattcttgcaaatccagcatggtgtatatgtgttggccaataatt

SEQ ID NO: 102105 - DNA, 284 bp, Zea Mays
ctttactcgcgaaagcagtagcaacagaatgctcattgaactttcttagcgtcaaaggtccagaactgataaacatgtatgttggagaatcagagaaaaatggtcgggatatttttgagaaggctaggtctgcacgcccatgtgtcattttctttgatgagcttgattccctcgctcctgcacgaggatcctcagcagattctggcggtgtcatggacagggttgtttcccaggtatcattagcttcgtccctgaggcggtgtcacaacttctcacaagtcttc

SEQ ID NO: 102106 - DNA, 1492 bp, Zea Mays
aaagcagtagcaacagaatgctcattgaactttcttagcgtcaaaggtccagaactgataaacatgtatgttggagaatcagagaaaaatggtcgggatatttttgagaaggctaggtctgcacgcccatgtgtcattttctttgatgagcttgattccctcgctcctgcacgaggatcctcagcagattctggcggtgtcatggacagggttgtttcccagttacttgtggagatcgatgggttgagtgacaacagccaggaccttttcattattggggctaccaataggcctgaccttcttgattctgcccttcttcgccttggtcggttcgacaagcttctttatgtcggtgtaaatactgaggcatcatacagggaaaggatccttaaagcacagacgcgcaagtataagctgcacaagaacgtttctctcttgtcagttgcacaagaatggtttcatgcagcaaagcgatcagtgagtatttctgccgacccgttacgccatatgttgggctcttcctagctttgctccgttgatcttgcgtgtggtattttttaggttgaaacattcgaaaccgatccttcaagaagtaatgacgccagtgccgaagaagtcatcgtcgagatcgacgattttatcacagtgttaggagatatcgcaccgtcgctctctctggacgagctacaaaactacgaacagttgaggcagaaggtcgaaggaccttctagatgaagttgggtttccactccctgctgacattcttaaactgctaacacaccaaaacattccctgtcttacattttcgtttgtacacaagttttcctccctgaaaacttgggcacttctatatccattcctgatttatacaatcacatccttgtagcagcatctgtattgacatcagaatgacattttctctgaagagaaacatcctgtcattctttgttagcagctctgcaactattctgaagcctttttttttttgcagatgatgcgaatcaactttgtatagttagtttcgtcgatgtacgcttgtaccatgttgtagtaaatgataaagagaataggagtccttggatcatctgctcgtttgaaccattcagttatcagccatcgaaaatagctgtctgctatattttttttcgtcagcgacgatctgtcaggatcagggacttttcattgcaacgagtgctaggtcattttttttgccaaactcaatttatgatatcccttgcttacgtgttatccaacttggtgattttagaaatgcttatcagtatggtagaaacacctcggctgcgcagattataggagtgagtatcaagttggctggacgagcgggagcgaaggggcgccgtgctgccgctcggctcacaggtgaggcagggaacaatcacttcttagattgatcaatgcttccaattgattacagacgcctggactttatagtccaactctaaacagactccttaatcttaggaactctaac

SEQ ID NO: 102107 - DNA, 835 bp, Zea Mays
gggaacaatcacttcttagattgatcaatgcttccaattgattacagacgcctggactttatagtccaactctaaacagactccttaatcttaggaactctaacagactctccttaaaaacagactccttaatattaggatctctaaacagattctccttatctaaggatcctcctaatccttatctatatgtccctctataatgggccgactagagggctgtttaggccgcctactataaaccataacacagtatttgcttggtttatatgttgcagtgttacaaagaacagtatgtatcagatgatgcagcctcagattgatatacttcttttttgagataatttttcctcttatgtgcttcaatgacaatgaccaaaagttatgggaagaagatccccatgaatatgttcgcaagggctatgatatcatcgaagatttgtacagtccccgaacagctgctatggactttgtgagtgaattgattagaaagcgagggaaaaacaatctccaaaagttcatccatttcattgtggatatttttaggaggtatgatgaagcacctgctgatcttaagccatatcgccaaaaagatggtgctcttctcgctattgggacactccgtgataaactgaagcaaacagatccatataaaacagagcttgagagtatgctggtccgacatgtctttcctgaattcaacagtcgtgttggacacttagctcaggcagcatgggttgctgggcagtatgcccatatcaacttttcagaccagaacaattttcgtcaggctatgcactgtattgtctcaggaatgtgtgatccagatcttcca

SEQ ID NO: 102108 - DNA, 1393 bp, Zea Mays
gaaaccgtaccacttcatcaggccaaatcgccagcaatccaccatggctaaaccagaggggccaaccattggcgtgaagctgttcgtggacaaagagaagaagaaggtgctctttgctgagtccgacaaggagttcgtcgatgtgctcttcagcttcctcaccatgccgctcggcaccatcgtccgcctgctggacaagcagtctcagatggggtgtctcgaccagctgtacaagagcgtggaggacctcaacttggagtacttccaaaccagtgcttgcaaggcgatgcttctgaaaccgctcaacgcggcttccggccactgctgccgcctcaagatcaacgttgatggaagctttccaagggtggtctatgtctgcaaggacacgtcgtgcagcgcactcagcgacaacgcgtttagttcgttccctggcacggtctgcaaatgtggttgcttgaagtttatcgtcaccgatgatctccaggttgcgccagcatctacctctcttatgatgtctttcttcgagaaatttggtgtgcttgatccagctgtcctagagcagcaggttctgcagttcagttctgaaaagataaaatgcttgttgaagagattgttgacgtccaagcaacctctcactgatcattatttcgaagctcttgttccacaagatgatgcaagcctagaagcgcttgttcagaacttacatcctaaacaagaaaacgaggaccaggaaatgccaggaaaccagaagatcagggttcttcagacgaaggacaactctgccctgctgtatgatgaagttggtgtcgattttgtggactctctcttcggcttattaagcattccactgggatcggcaattaagttatattgccagtgctcggcaaaaggctgcctcggtaatgcttacaggagcatagatggtagtgtcaaagaattcgtcagagaggagtgccagagtctccttctggacccaaagagtctatggttttcaggttgtaaccgttctcacgagttcgcttattctttgcgatgcaatgaagttttttgcgcgaataaggtgaagtccattaaactttgtgaggcgaacccaaaacgacaaaacggcggaagcgggcagacgaattttgtggtgaaagaaatcaaactaaaggttatggagctacagagggctgtccttgtgctgagtcgcaatatactcagctctgtgcttctgcatcctaagaagaccaagaagctgcaccattaccgtcgcatgtaatagtcgtcgttgttgctttactctataattagccccaataataacaatctatgtctgtgttttcctgctgaatttgtaagttatcattttggccactggtacttggtaactactataacagttcgagcatat

SEQ ID NO: 102109 - DNA, 1528 bp, Zea Mays
gaaaccgtaccacttcatcaggccaaatcgccagcaatccaccatggctaaaccagaggggccaaccattggcgtgaagctgttcgtggacaaagagaagaagaaggtgctctttgctgagtccgacaaggagttcgtcgatgtgctcttcagcttcctcaccatgccgctcggcaccatcgtccgcctgctggacaagcagtctcagatggggtgtctcgaccagctgtacaagagcgtggaggacctcaacttggagtacttccaaaccagtgcttgcaaggcgatgcttctgaaaccgctcaacgcggcttccggccactgctgccgcctcaagatcaacgttgatggaagctttccaagggtggtctatgtctgcaaggacacgtcgtgcagcgcactcagcgacaacgcgtttagttcgttccctggcacggtctgcaaatgtggtaaggtcatggagttcgttgggcggtgcccaaaatacgatggtgacactgaaaccgccgccgccgcttgttcagaggatggagtttttgtgataggttgcttgaagtttatcgtcaccgatgatctccaggttgcgccagcatctacctctcttatgatgtctttcttcgagaaatttggtgtgcttgatccagctgtcctagagcagcaggttctgcagttcagttctgaaaagataaaatgcttgttgaagagattgttgacgtccaagcaacctctcactgatcattatttcgaagctcttgttccacaagatgatgcaagcctagaagcgcttgttcagaacttacatcctaaacaagaaaacgaggaccaggaaatgccaggaaaccagaagatcagggttcttcagacgaaggacaactctgccctgctgtatgatgaagttggtgtcgattttgtggactctctcttcggcttattaagcattccactgggatcggcaattaagttatattgccagtgctcggcaaaaggctgcctcggtaatgcttacaggagcatagatggtagtgtcaaagaattcgtcagagaggagtgccagagtctccttctggacccaaagagtctatggttttcaggttgtaaccgttctcacgagttcgcttattctttgcgatgcaatgaagttttttgcgcgaataaggtgaagtccattaaactttgtgaggcgaacccaaaacgacaaaacggcggaagcgggcagacgaattttgtggtgaaagaaatcaaactaaaggttatggagctacagagggctgtccttgtgctgagtcgcaatatactcagctctgtgcttctgcatcctaagaagaccaagaagctgcaccattaccgtcgcatgtaatagtcgtcgttgttgctttactctataattagccccaataataacaatctatgtctgtgttttcctgctgaatttgtaagttatcattttggccactggtacttggtaactactataacagttcgagcatataataaactagtgcatcaggcgcgcccatgcgcgcgtacc

SEQ ID NO: 102110 - DNA, 1541 bp, Zea Mays
atggctaaaccagaggggccaaccattggcgtgaagctgttcgtggacaaagagaagaagaaggtgctctttgctgagtccgacaaggagttcgtcgatgtgctcttcagcttcctcaccatgccgctcggcaccatcgtccgcctgctggacaagcagtctcagatggggtgtctcgaccagctgtacaagagcgtggaggacctcaacttggagtacttccaaaccagtgcttgcaaggcgatgcttctgaaaccgctcaacgcggcttccggccactgctgccgcctcaagatcaacgttgatggaagctttccaagggtggtctatgtctgcaaggacacgtcgtgcagcgcactcagcgacaacgcgtttagttcgttccctggcacggtctgcaaatgtggtaaggtcatggagttcgttgggcggtgcccaaaatacgatggtgacactgaaaccgccgccgccgcttgttcagaggatggagtttttgtgataggttgcttgaagtttatcgtcaccgatgatctccaggttgcgccagcatctacctctcttatgatgtctttcttcgagaaatttggtgtgcttgatccagctgtcctagagcagcaggttctgcagttcagttctgaaaagataaaatgcttgttgaagagattgttgacgtccaagcaacctctcactgatcattatttcgaagctcttgttccacaagatgatgcaagcctagaagcgcttgttcagaacttacatcctaaacaagaaaacgaggaccaggaaatgccaggaaaccagaagatcagggttcttcagacgaaggacaactctgccctgctgtatgatgaagttggtgtcgattttgtggactctctcttcggcttattaagcattccactgggatcggcaattaagttatattgccagtgctcggcaaaaggctgcctcggtaatgcttacaggagcatagatggtagtgtcaaagaattcgtcagagaggagtgccagagtctccttctggacccaaaggtaccacccttctttggttgctgcgcttctaagatccttcaggttgacgaattagctccgagagaactgacgatggaagcctgctttgtttgcttcaagagtctatggttttcaggttgtaaccgttctcacgagttcgcttattctttgcgatgcaatgaagttttttgcgcgaataaggtgaagtccattaaactttgtgaggcgaacccaaaacgacaaaacggcggaagcgggcagacgaattttgtggtgaaagaaatcaaactaaaggttatggagctacagagggctgtccttgtgctgagtcgcaatatactcagctctgtgcttctgcatcctaagaagaccaagaagctgcaccattaccgtcgcatgtaatagtcgtcgttgttgctttactctataattagccccaataataacaatctatgtctgtgttttcctgctgaatttgtaagttatcattttggccactggtacttggtaactactataacagttcgagc

SEQ ID NO: 102111 - DNA, 1814 bp, Zea Mays
gcgcatgctgcacgcaccagatattttaagggtcacacttgcttgtttcatgtactagcacaagaagtaaccgtaccacttcttcaagccaaatcgccagcaatccaccatggctaaaccagaggggccaaccattggcgtgaagctgttcgtggacaaagagaagaagaaggtgctctttgctgagtccgacaaggagttcgtcgacgtgctcttcagcttcctcaccatgccgctcggcaccattgtccgcctgctggacaagcagtctcagatggggtgtctcgaccagctgtacaagagcgtggaggacctcaacttggagtacttccaaaccagtgcttgcaaggcgatgcttctgaaaccgctcaacgcggcttccggccactgccgtcgcctcaagatcaacgtcgatggaagcgttccaagggtggtctatgtctgcaaggacacgtcgtgcagcgcactcagcgacaacgcgttcagttcgttccctggcacggtctgcaaatgtggaaaggtcatggagtccattggacagtgcccaaaatacgatggtgacactgaaaccgccgccgccgccgcttgttcagaggatggagtttttgtgaaaggttgcttgaaatttatcgtcacccatgatctccaggttgcgccagcaactacctctcttatgatgtctctcttcgagaaatttggtgtgcttgatccagctgtcctagagcagcaggttctgcagttcagttcagaaaagataacatgcttgctgaagagattgttgacgtccaagcaacctctcactgatcattatttcgaagctcctgttccacaagatgatgcaagcctagaagcgcttgttcagaacttacatcctaaacaagaaagcgaggaccaggaaatgccaggtaacctgaagatcagggtccttcagacgaaggacgattccgccctgttgtatgctgaagttggtgttgattttgtggactctctcttcagcttattaagcattccactgggatccgcaattaagttatatggccagtgctcggcaaaaggctgcctcggtaatgtttacaggagcatagatggtagtgtccaagaattcgtcagagaggagtgccagagtcttcttctggacccaaagttgccacccttctttggttgctgcgcttctaagatccttcaggtcgacgaattagctccaagagaactgacgatcaaagcctgctttgtttgcttcaagagtctagggttttcaggttgtagcctttgtcacggttactacaacagtaactatgttttttgtgaagtgcggaaatatggtgaagtccattaaactttgtgaggcgaatccaaaacaaaaaggtggatgcgagaaaggcgaagtatatgtaagccggaaggcgaatttcctggttactgatgacctgcgtgttcttccactctcattagcatccactgttaagattgttagtgattccaaaatccagacctcgaatcttgtggtcaaagaaatcacattaacaaagtccaaggttatggagctacagagggctgtcctgctgctgagtcgcaacatactcagctccgtgcttctgcatcctaagaagaacaagaagctgcaccattaccatcgcatgtattagccgtcgttgttgctttactctatgattagccacaatgataactatgtactatgtctgtttttctgctgaatttgtaagttatcattttggccactggtattcggtaactactataacagttcgagcatataataaatataaacatttgattcgagggtttgtagggtc

SEQ ID NO: 102112 - DNA, 1764 bp, Zea Mays
gacttggaccggacccctagaaaaagccgaaaagaggtgtggccagatcgagcgagcccccgcacgtcgccacttcaccgcccccacccaaaatcgtctcgatggaaccgctgcggcgcgtgctgcgcctccgactcggacggcctctcgctataaaccccgcccactgaatacggccgttccatttttgactctattccccgcttcccgattcaagtcagcggtttttagggttcgagatctcggcatcgtgtcgcggaagccatggcggtgagcattctttgctttcctattgattgctcatctcctcgagcttgtgtgccgtgccattaccgatccggggcacctgctcgccgtttttactaattcgttctcggagccggagagcttgagagctggttttcgacttgcggattatgctccagtgatagccgcatctccccagcctgtcatggtagcaaagaaacatggggtaactgttggtaggaagcgaaaggggaaactggggcgtctgtggaactgggaaactgacgcgcgggatgctctttgacaagcatgcttagtaccgtgaaggtgagcaatgtatcactgaaagcagcacaacgtgatataaaggaattcttttccttttctggtgacattgtgcatgttgaaatgcagagtttcgatgagctttctcaagttgcctacattacttttaaagacaaacaaggagcagagacggcaatgcttctcacgggggccaccatagttgatatggctgtaatcgtcacaccagcaaatgattatgagctaccatcttctgttttagctgctcttgagcccaaagacacaaaaccttctgcccttcaaaaggccgaggacattgttgggaccatgctggcaaagggatttatcctcggtagggatgcactggacaaagcgaaagctttggatgagaagcatcagctgacgtcgactgccacagctagagtatcttccttcgacaagagaatcggtctaagtgagaagatcagtgttggcacttcagttgtaaacgataaagtgaaggaaatggatcagaaataccaagtctctgagaagacaaagtcagcactggcagctgctgaacatagtgtctcgactgctggatctgctatcatgaagaacaggtatgtgctaaccggagctgcatgggtaactggtgctttcagcaaggtcaccagtgcagccaacgaggccggtgcaaaggctaaggaaaaaatagcagtcgagcaggagcacaagaatgctgagggtggacctgcacaagcgaacatctcagagacccatgaagcgcacaggggtttggacggcggattctcaaggctacatgactctgaaacccctgaagatatccccatctctactgcgagtgtcccagctgttacggatgaggagcccagcaaggcttctccaccagctggtgttcctgaaaagccagaagctgcgcacgaattggtactataattgatgcggttttgcttcatacatgcatgtaaatagacatgaaatgggatagccctggaactcattctgtggtcttgtggttggcatcttcagattgaaaacctctttgaaggttgaaagttattgggatctaaaggagtttgcaatttgtacctggtctttttgatcaattagtaatcagtattacccggcagtggggaaatgaactttaatgcttgtgtaattgtactgttgttggtcatctattgtttcctggtatagtaactgcttctgttt

SEQ ID NO: 102113 - DNA, 1584 bp, Zea Mays
gacttggaccggacccctagaaaaagccgaaaagaggtgtggccagatcgagcgagcccccgcacgtcgccacttcaccgcccccacccaaaatcgtctcgatggaaccgctgcggcgcgtgctgcgcctccgactcggacggcctctcgctataaaccccgcccactgaatacggccgttccatttttgactctattccccgcttcccgattcaagtcagcggtttttagggttcgagatctcggcatcgtgtcgcggaagccatggcgacaagcatgcttagtaccgtgaaggtgagcaatgtatcactgaaagcagcacaacgtgatataaaggaattcttttccttttctggtgacattgtgcatgttgaaatgcagagtttcgatgagctttctcaagttgcctacattacttttaaagacaaacaaggagcagagacggcaatgcttctcacggtatttcttttttatctcatctggaagtgttggaggcttcataattttgtgtattttcatggattgaagatttgctggctgtattatcctgaaagtatgggggccaccatagttgatatggctgtaatcgtcacaccagcaaatgattatgagctaccatcttctgttttagctgctcttgagcccaaagacacaaaaccttctgcccttcaaaaggccgaggacattgttgggaccatgctggcaaagggatttatcctcggtagggatgcactggacaaagcgaaagctttggatgagaagcatcagctgacgtcgactgccacagctagagtatcttccttcgacaagagaatcggtctaagtgagaagatcagtgttggcacttcagttgtaaacgataaagtgaaggaaatggatcagaaataccaagtctctgagaagacaaagtcagcactggcagctgctgaacatagtgtctcgactgctggatctgctatcatgaagaacaggtatgtgctaaccggagctgcatgggtaactggtgctttcagcaaggtcaccagtgcagccaacgaggccggtgcaaaggctaaggaaaaaatagcagtcgagcaggagcacaagaatgctgagggtggacctgcacaagcgaacatctcagagacccatgaagcgcacaggggtttggacggcggattctcaaggctacatgactctgaaacccctgaagatatccccatctctactgcgagtgtcccagctgttacggatgaggagcccagcaaggcttctccaccagctggtgttcctgaaaagccagaagctgcgcacgaattggtactataattgatgcggttttgcttcatacatgcatgtaaatagacatgaaatgggatagccctggaactcattctgtggtcttgtggttggcatcttcagattgaaaacctctttgaaggttgaaagttattgggatctaaaggagtttgcaatttgtacctggtctttttgatcaattagtaatcagtattacccggcagtggggaaatgaactttaatgcttgtgtaattgtactgttgttggtcatctattgtttcctggtatagtaactgcttctgttt

SEQ ID NO: 102114 - DNA, 1557 bp, Zea Mays
gacttggaccggacccctagaaaaagccgaaaagaggtgtggccagatcgagcgagcccccgcacgtcgccacttcaccgcccccacccaaaatcgtctcgatggaaccgctgcggcgcgtgctgcgcctccgactcggacggcctctcgctataaaccccgcccactgaatacggccgttccatttttgactctattccccgcttcccgattcaagtcagcggtttttagggttcgagatctcggcatcgtgtcgcggaagccatggcgacaagcatgcttagtaccgtgaaggtgagcaatgtatcactgaaagcagcacaacgtgatataaaggaattcttttccttttctggtgacattgtgcatgttgaaatgcagaggttagtaccatatatgtggtgcctatttttcaccttgtgctatgacatgattaactatttagtgctgtgcagtttcgatgagctttctcaagttgcctacattacttttaaagacaaacaaggagcagagacggcaatgcttctcacgggggccaccatagttgatatggctgtaatcgtcacaccagcaaatgattatgagctaccatcttctgttttagctgctcttgagcccaaagacacaaaaccttctgcccttcaaaaggccgaggacattgttgggaccatgctggcaaagggatttatcctcggtagggatgcactggacaaagcgaaagctttggatgagaagcatcagctgacgtcgactgccacagctagagtatcttccttcgacaagagaatcggtctaagtgagaagatcagtgttggcacttcagttgtaaacgataaagtgaaggaaatggatcagaaataccaagtctctgagaagacaaagtcagcactggcagctgctgaacatagtgtctcgactgctggatctgctatcatgaagaacaggtatgtgctaaccggagctgcatgggtaactggtgctttcagcaaggtcaccagtgcagccaacgaggccggtgcaaaggctaaggaaaaaatagcagtcgagcaggagcacaagaatgctgagggtggacctgcacaagcgaacatctcagagacccatgaagcgcacaggggtttggacggcggattctcaaggctacatgactctgaaacccctgaagatatccccatctctactgcgagtgtcccagctgttacggatgaggagcccagcaaggcttctccaccagctggtgttcctgaaaagccagaagctgcgcacgaattggtactataattgatgcggttttgcttcatacatgcatgtaaatagacatgaaatgggatagccctggaactcattctgtggtcttgtggttggcatcttcagattgaaaacctctttgaaggttgaaagttattgggatctaaaggagtttgcaatttgtacctggtctttttgatcaattagtaatcagtattacccggcagtggggaaatgaactttaatgcttgtgtaattgtactgttgttggtcatctattgtttcctggtatagtaactgcttctgttt

SEQ ID NO: 102115 - DNA, 1494 bp, Zea Mays
gacttggaccggacccctagaaaaagccgaaaagaggtgtggccagatcgagcgagcccccgcacgtcgccacttcaccgcccccacccaaaatcgtctcgatggaaccgctgcggcgcgtgctgcgcctccgactcggacggcctctcgctataaaccccgcccactgaatacggccgttccatttttgactctattccccgcttcccgattcaagtcagcggtttttagggttcgagatctcggcatcgtgtcgcggaagccatggcgacaagcatgcttagtaccgtgaaggtgagcaatgtatcactgaaagcagcacaacgtgatataaaggaattcttttccttttctggtgacattgtgcatgttgaaatgcagagtttcgatgagctttctcaagttgcctacattacttttaaagacaaacaaggagcagagacggcaatgcttctcacgggggccaccatagttgatatggctgtaatcgtcacaccagcaaatgattatgagctaccatcttctgttttagctgctcttgagcccaaagacacaaaaccttctgcccttcaaaaggccgaggacattgttgggaccatgctggcaaagggatttatcctcggtagggatgcactggacaaagcgaaagctttggatgagaagcatcagctgacgtcgactgccacagctagagtatcttccttcgacaagagaatcggtctaagtgagaagatcagtgttggcacttcagttgtaaacgataaagtgaaggaaatggatcagaaataccaagtctctgagaagacaaagtcagcactggcagctgctgaacatagtgtctcgactgctggatctgctatcatgaagaacaggtatgtgctaaccggagctgcatgggtaactggtgctttcagcaaggtcaccagtgcagccaacgaggccggtgcaaaggctaaggaaaaaatagcagtcgagcaggagcacaagaatgctgagggtggacctgcacaagcgaacatctcagagacccatgaagcgcacaggggtttggacggcggattctcaaggctacatgactctgaaacccctgaagatatccccatctctactgcgagtgtcccagctgttacggatgaggagcccagcaaggcttctccaccagctggtgttcctgaaaagccagaagctgcgcacgaattggtactataattgatgcggttttgcttcatacatgcatgtaaatagacatgaaatgggatagccctggaactcattctgtggtcttgtggttggcatcttcagattgaaaacctctttgaaggttgaaagttattgggatctaaaggagtttgcaatttgtacctggtctttttgatcaattagtaatcagtattacccggcagtggggaaatgaactttaatgcttgtgtaattgtactgttgttggtcatctattgtttcctggtatagtaactgcttctgtttaagaaatta

SEQ ID NO: 102116 - DNA, 1571 bp, Zea Mays
tgccactgtcctggctgcagctccgcacaggtccctggcacagggcgaggcactgtcacgcacggaatcgagcaatcgatcacacagagacacaggtcaggagcaggagctcgaggtgtcgccgcgcggcagcagcagcagcagcagcagcttgggactcgggacagccatggggaagggccgggcaccgtgctgcgccaaggtggggctcaacaagggctcctggacgccggaggaggacatgcgcctcgtcgcctacattcagaagtacggccacgccaactggcgcgccctgcccaagcaagcaggtttgctgcggtgcgggaagagctgccggctgcggtggatcaactacctccgcccggacctcaagcgcggcaacttcagcgccgaggaggaggagaccgtcatcaagctccacggcttgctcggcaacaagtggtccaagatcgcgtcgtgcctgccgggccggacggacaacgagatcaagaacgtctggaacacgcacctgaagaagcgggtatcgccgtccggcggggaggaggagcacggcgccgccgggtccaacaagaacaagaagaagaagaagaagaaagccgctggcggcgccgaggagccgctcccgtcaccgactccgtctccgtcgccgtcctcgtccaccacgacgacggccaactgctccagcggcgactccggcgagcagcagagcaacaccagcaaggaggcggacgacgacgagctggacctggagaacctcgagatgatgcccatgctggacgacgacccaataaccttcggcttcgacatgctggtggaccccgtgccagcgccgtacggcccggccgtgtccgcgttcgcgtcggcgtccagacccacgtcgccctgcgcctcgtccacgtccccaccgccgccgccgggctgcgcgccgctcggcgtggacgacctgctcgtgctgccagagatcgacatcgaccaggagctgtggagcatcatcgacggcaacggcgacggcggcggcgacggaggaggctccgcttgcgccgtgtctgccgagacatcggcgccgtgctgccagagcaatgcgccggagccgacgacgaacggcgcctgcgcgaccagccaccacggagcggcggaggaggagggaaaggagtggtggttggaggacctggagagggagttgggcctgtggggccccgtggacgtggaggactaccactaccagtacccaacgggcccacatggtctggtggctaaccacccggacccgcttcctgccatggtggacgacccggtgtcctgctacttccaagcgggccccgcctccgccgtgctccaggaacccgggtactcggtgactagtagtagcaacctgatggggttgtgagatttatcgttcgtcgtcgtcgttttttttttattttttttagatagcagaacagaaatcctgaacaaacggatcgtattgcttgcttgcacaatgattgtacaagtgcatagctcagaggagcataaactcaatactaaaccgccggcggcgtattattataagtacataataataataataa

SEQ ID NO: 102117 - DNA, 743 bp, Zea Mays
cacagccaccctataaaatcgggccctagttcaccaacatactaccccaactgagccaaacagaaagagagaacaaatcttcagtcgctgcaagccttcaacccgtgctaactgtgcgggaaagaaaaaaaaacatgaagatgacctgcggcagaacgtcccccgtcgttgctgccgtcctggtggcgctcgccgtcgtcgccgcggccgtcggcccggcgccgaagcggagaggccaggagatccacctgttcgaggccacggtccgcttcccggacgacggcgtggacgagctcgactacaactaccgcctgctcgccaaagtgctcggcagcgtcgaagcagcgcggagagcaacgtacgacagtgagctcggggtattcagcgcgctcatcaccaacaaccagggccgtcggctgtcaaaagtaccaggcgtgctgaaggtcacacgactggaggaccctccttcgcttccggagacggacggccatctctgaaaaaaacttagtgctatagggtcgacaataactgcaaccatgttcgttgaaattgcagcagagtgtattgtacttgcatggtatggcactggcgcagagtaaagcgtgccccacttcctgctctaaataagtgagagcatcagcgtggcttgctcatcgttatagtagaacatgacatcgttatagtagaacatgacctcgcatcacatcaactaaacatctggctttcctacggagggaggcaaa

SEQ ID NO: 102118 - DNA, 1817 bp, Zea Mays
cgttctgccgcgcgcagcccgcatcccgcccgcggccggacctcgccccgcatcccgccgccctcccgcgctccttccatcctccgccctcatcctgccgccctctccttccattttgagctttgacggcgcggatccccaacgctcgcttccatcctcgtggatccccacccacgaatcccgcgctcccttccatcctcgtggcttccttcaacagcgcggatcccccaccctcgaatcccattgccgcaatggaaggtcgtctgtaccacgccgtggatccgccacccagtaccgcgccgtggatggcagacctcccaaccctaccgtctgcggattccgatgaaggcgcgaacccgtgacatggttgtatctctgctcgccgctcgatactccggttccggtaaaacctagcagccgccacttcgtcggactcggacctcagtgacacgcgcagcgtggcgccggcgttgcgcatccggatccggccagcagccagccacgcagtgtcgcggtcgtcggtcgtcgacgcaacttctcaggcgccgatgcagcacccggcagctggctgctcgtcttgggtatgtggcctcgacccccaactaacctgattcaatgggtgctcgatctggcgctgcagtccaacggcaagcctggcggcatcttcgacaccgccgaggagcgctcccaggagggaggtcaagaatcctaagaagccgctgtcgcgcgtggcctcgcggggcgtgcttccggccgacggtgacggcagcggctcgaccaagggcagctacgttcatgatgcagtagagacaagatatctgaatgctagcattcgggagcttggtgatcattttcagacaaaacgtgatggtgaaaatggtgttgatgcatcaattgaaaagagaacacctaagctacttcagtttacttttcaagagttgaaatctgccacgcttaacttcaggccaggcaatattcttggggagggtgggttcggttatgtattcaatgggtggattgagccaaacagcactgctcctgcaaaacctggcacaggggttactgtggcagtaaaaagtttgaagccagatgcgcttcaaggtcatagagaatgggtgaagttgactttctgggacagttgcatcataaacaccttgttaagttgattggatattgtattgaggatgatcaaaggttacttgtatatgaattcatggcacggggaagtcttgaaaatcatcttttcagaagggctcttcccctaccttggtccaacaggatgaagattgttctaggtgccgcgaaaggagtagccttcctccatggaggtcccaaacctgttatttacagggattttaagacatcgaatgttcttcttgatgtggagtacaacgcaaaactatccgatttcagtttagcaaaagctggtcctcagggtgataaaactcatgtatatactcgggttgttggcacctatggttatgctgcaccagagtatgtaatgacagatgcgttttttttgggaccaagccctatgggcaacaatggagatgaccagcgtcttggtttatcaagaggaagttaatccctctcaactgaaactcccatcaaatttggggcatagtgtgtcgattcaattgtaactattatatgtcattttgggttagcaaactgtatctactaatttctcagccttaagccttttgagctagaaacttgtgtaaggatttgttgcactaagtgacatgctgatatttgaactatttaggctgccaaatctgaattttttaactatcaagtatctcaacatttctctc

SEQ ID NO: 102119 - DNA, 819 bp, Zea Mays
atggggaggtccccgtgctgctgccacgacgccggcgtgaagaagggcccatggacggaggaggaggaccgcaccctggtggagcacatcaaaaggcacggcgggcacgtcagcagctggcgcgacctgcccaaggccgccgggctgaaccgctgcgggaagagctgccgcctccgaaagaagctggtgcgcatgggcatcgaccccgtcacgcaccaacgtctgcccccggaagacattatcgcctcccctatggcgatcctctcggcggcggcgagcctgggaggcctccacagcgctctgatgcaggtgcaggcgctgcagcttctgctgcaggccgtcaataacgacggaggaagaagcgctgctgccggtggtctcatcatgcctgacatcctcaacgcggccgcagataacgccatccttattaataacgcgagtcgtagtagcgtcgtcccgagcttacaggaccagacgaacctccccgccgcgtctcacgcgaactactacggttcacctgatcaccatctcagcagcaacatcgcgagctttgcagatcagcagcacgacgacgcttcggctccggtggtcggctgcgcgtacgcggagccgctggctgctgcattggtgtctgccgcttatccgcaggaagtggcagccgcagctgaggggtggccggtgcagggtttcgccgagcttctgtcggggcccatcgagatgcaggtgcagacgaaggcgaggacgtgctccctcgaggaggacgaccaagatgatttctggaaggacatgctgctagagagcagcaggttgccgctatga

SEQ ID NO: 102120 - DNA, 3156 bp, Zea Mays
aaaaaaaaaaaagttgttttgctgctggcgggacacgcttcgggcgcgacagtcgtcaccccgctttcccctactggatccagccacttgacttcgcttaaaccctgatcctcttcctccctctcctccggtcctcccgcgccgccacccccatctcccaccgcaaaaccttaggtccgacgagcccccgccgttgccgtgggcgccagaagcagccatggcttcgagttcgacgtgtgttcttaagaagaactaccgctgcgaccgctccctgcagcagttttacactggtgggccctttgcggtcgggcttgcccccggcggcgatggcgagggcggcgccgaggctgaggccttcctcgcatgcgcctgcggtggagaggtgcgcgtggtgtcctccgcggacgcctctgccataggggagcccgtcgacggcgactcggaggccatcaccgcgctggcgctgtcccccgactcacggctcctctttgccgcggggcacagcaggcttattagggcctgggacctcgcgtcccgagcttgcatacgcagctggaagggacatgatggtcctatcatggccatggcatgccatgtttctggtggtttgcttgcaactgccggagcagacaagaaggtctgcgtatgggatgtggatggtggattttgcacccatttccttagaggccatacaggggttgtgacatccgttatgttccacaaagatccaaagcgccttctgttgttttcaggaagtgaagatggcaccgtgcgagtgtggaaccttgaaactaaaaaatgtgttgctgtgcttaaagagcatttttcagcagttacttcattggcattgtctgatgatggacaaacattgctgagcgctgggagggataagattgttaccgcgtgggatattcgtaaatacagctcaaagaagacaataccgacatatgaaatgatagaagctgtttccttcattggaccaggaagtgagtttttggcttgtttgggcatagaactggcaaacaaaaaggagaaagatactgcttatttccttacagttggtgaacgtggggtcgtgcgcatctggtgcttggagagttgtctttgcgtatttgagcagcaaacatctgatgtaactgttaactcagagaacaaggaaacaaggaggggctttacatctgctgttatgttgccaaatgaacaaggattgctatgtgttactgctgatcagcagtttttgttctattgtcccaaaaggactgatgatgggacctttgaactgtccctatatagacgactaataggttataatgatgagattcttgacttaaagtttattggggaggaggaacaatatcttgctgtagctaccaacttggagcaggtccgtgtttatgatgttgcgtcaatgtcatgttcttatgtgcttgctggccacaccgaaataattgtttgcattgacacatgtgtctctgcttccgggaagacacttgttgtaactgggagcaaggataacactgtgaggttatgggatgctgaaagaaaaagctgtattggcattggcaaaggccatctgggagctgttggttctgttgccttctcgaagaaaacaaaggacttttttgttagtggcagcagcgatcgaaccatcaaggtatggacctgggacaacacacttggtgatgctgaggatgaagtccctcttaaagcaaaggctgttgtagctgcacatgataaagatattaattatctgacagtttcacctaatgatggtcttgtttgcagtggttctgaggaccggactgcttgcatatggaaactccctaatctagtgttctctgttgcccttaaggggcacaaaagaggaatctggtcagttgagttttctcctgttgaacaatgtgtcatgacatcctcgggtgatagaacaatcaaaatatggtccgttgctgatggctcttgtttgaagacatttgagggtcatacatcaagtgttctgcgagcgtctttcctttcacgtggaactcaagttgtttcttgtggaagtgatggtctagtgaagctatggacaattaagacaaatgaatgcattgctacttatgataagcatgatgggaaggtctgggcattggctgttggcaggaaaactgaaatggttgctactggtggaaccgatgctgtcctcaatctgtggcatgattgcaccatggaagataagcaggaagatttccgtaagaaggagcaagaagttttaagaggccaggaattggaaaatgctgtgtcagattctgactatgcaaaggcaatacaacttgcatttgagcttagaagaccacacaagcttctagatttattctcacagcttgccaggcgagctgacgcagaggatccaatagaaaaggctcttcttggtcttccaaaggatggccttcgtgtgcttctagagtacgcccgtgaatggaatacgaagcccaagttctgtcatgttgcgcagtttgtgctttttcgggtattgaggagtttctctcccactgatatcctggagataaagggcatcagtgagctcctcgagggccttattccgtattcgcagaggcatttcagcagagtggacagactagtccgaagcacgtttctgttggactatacgctgacgcgaatgtccgtggtagacccagatgtggatgcggggtcaatcaaagacgaaatgaatggttcgtctgtggagaacggtgaacttgcagagcctcggcctgcttcacctgtgccagagaagtcaagcaagaagagaaaatctggcaaatcaagtaaaaagggaaaggagaaggtgatgaagcttgcctcgagtggacttggcaagggtgtttctgttgaagcctgaaaatctagctgagaatctggttttgcttatgcatgcatgcatccaattttgtagcagctgttgaaactgacgttgcccaacgcacgaatcacatttgatgtaaatgcagttttttgctgcgtttattagaaggccgcagcgcatttaatgcattggagtgtatgatttgctatcaaaatttggcacgccaaaggttttgataagccaaagttgctaaaagttgggcaaaatatgttatatagatatagcaagccaaatgtggcaagtttttgtgc

SEQ ID NO: 102121 - DNA, 1381 bp, Zea Mays
attccagctctccccctcggcccctcttctctccctccctccctccgtccccgcattaaactcggcgaacgggccaagaaaagcaaaccgagggaggagaaaggcaaggaaagtgggaaggtaggagagagagggagacagggaaagctctcttcctcctcctcctcctctcgaattcgtctcttgtccctgtcgtcctcgcccggtttccccggtttttgagaggggaaagaggaggcggaggagagggatggggagggacgagaggttcccggtgtgggaggccgcgctcggcgccggagtcgccgccgccttcgccgctggactcgtcggtgtctacctttccatgccggactccgactacagcttcctcaagttgccacgtaatctcgaggaactccaaatcctcacgtgttggtaggttattgcgctgtgtacatcttcatgcagaccttcatgatcccagggacaatattcatgtcactgcttgctggtgctctatttgggcaactgcgtggccttgcactggtggtctttgctgccactgcaggtgcttcttcgtgctatttcctgtcaaagatgattgggaagccactggtgttcacactgtggccagataagctcagcttcttccagagacaggttgctaaaagaagagagaagttgttgaattacatgcttttcctcagggtgaccccaacattgccaaataccttcatcaacttagcttcacccatagtagatgtcccctaccatatattcttactgggaactctcattggtcttatcccagctgcttatgtcactgtcagggctggaattgctcttggagagttaacttcgctgagtgacctttacgacacccagtcgatagcactgctattcctgatcggtgttgtttcagtcacaccagcattgctgggcaaggatgaggcacaagagaaaccaccagaaatggcggtaggcgcgtcatgatcaccaaagcacctagcggtgtccacgtcacctgtatatatgtcaacatccagcatgcagtggcttcattagttcggatcaacgggcccttgtggctggatgataaaaacggttcgcatggccacacagcttggcgggacctcggcctaaactccctccactgctggcctagagaggcgcctgtgttgccatcatcagaacatgattcggtagccattcaccacattattaatgaatgaacctgggaagcagaattgcctgtagacgagctgctctgatgtgtaaacgagtagcgctgttcggataggacaggcatttagtccaatccctgtatatattaaccagattcattcaatccatattcagtggttcaaagataatgccctgttcagctgctgtgttcttg

SEQ ID NO: 102122 - DNA, 1421 bp, Zea Mays
attccagctctccccctcggcccctcttctctccctccctccctccgtccccgcattaaactcggcgaacgggccaagaaaagcaaaccgagggaggagaaaggcaaggaaagtgggaaggtaggagagagagggagacagggaaagctctcttcctcctcctcctcctctcgaattcgtctcttgtccctgtcgtcctcgcccggtttccccggtttttgagaggggaaagaggaggcggaggagagggatggggagggacgagaggttcccggtgtgggaggccgcgctcggcgccggagtcgccgccgccttcgccgctggactcgtcggtgtctacctttccatgccggactccgactacagcttcctcaagttgccacgtaatctcgaggaactccaaatcctcactggccatcttgagaactatactagtgactacaccctacaggtgttggtaggttattgcgctgtgtacatcttcatgcagaccttcatgatcccagggacaatattcatgtcactgcttgctggtgctctatttgggcaactgcgtggccttgcactggtggtctttgctgccactgcaggtgcttcttcgtgctatttcctgtcaaagatgattgggaagccactggtgttcacactgtggccagataagctcagcttcttccagagacaggttgctaaaagaagagagaagttgttgaattacatgcttttcctcagggtgaccccaacattgccaaataccttcatcaacttagcttcacccatagtagatgtcccctaccatatattcttactgggaactctcattggtcttatcccagctgcttatgtcactgtcagggctggaattgctcttggagagttaacttcgctgagtgacctttacgacacccagtcgatagcactgctattcctgatcggtgttgtttcagtcacaccagcattgctgggcaaggatgaggcacaagagaaaccaccagaaatggcggtaggcgcgtcatgatcaccaaagcacctagcggtgtccacgtcacctgtatatatgtcaacatccagcatgcagtggcttcattagttcggatcaacgggcccttgtggctggatgataaaaacggttcgcatggccacacagcttggcgggacctcggcctaaactccctccactgctggcctagagaggcgcctgtgttgccatcatcagaacatgattcggtagccattcaccacattattaatgaatgaacctgggaagcagaattgcctgtagacgagctgctctgatgtgtaaacgagtagcgctgttcggataggacaggcatttagtccaatccctgtatatattaaccagattcattcaatccatattcagtggttcaaagataatgccctgttcagctgctgtgttcttg

SEQ ID NO: 102123 - DNA, 1672 bp, Zea Mays
gtgctgcgatacttgtcgttgctgctgcctgctttttccccggtctacaaagacctcagctttcctacctccacttcttctttcttccaaagccttcgcctttttcctctcgtcttcctctctctcccccgctccaaatcccaccctctctctttctctctccacattctccctgctgtgcaccttgcagcagccttgggctgtggatcggaaatggcaatcgacgatgaatcgccgctcagagtcaacaccagaggcggcgccatgggaggaggggagcgtgacggcggggagaaccagcggtggccgccgtggctgaagccgctgctggggacgagcttcttcggccaatgcaagctgcacgcggacgcgcacaagagcgagtgcaacatgtactgcctcgactgcatgaacggcgcgctctgctcccagtgcctcgcctaccaccgcgaccaccacgccatccagatacggaggtcctcctaccacgacgtgatccgggtgtcggagatccagaaggtgctggacatcagcggcgtgcagacctacatcatcaacagcgcgcgcgtggtgttcctgaacgagcggccgcagccgaggcccggcaagggcgtcaccaacacctgcgaggtctgcgagcgcagcctcctcgacaccttccgcttctgctccctcggctgcaagatcgtcaggacctccggcgacttccgcatccggaagaagcacgccatcgtcgcaaagaagaagagggagaagaagcatgcgccgcagcagaagcagcacaggggcgcggcggactcggcggacgacgacgacgacgactcgtccaccagcaccagcggcggcagcgacaagagcagcgtggtgcagagcttcaccccgtcgaccccgccggcgacgaccgccaacagcttccgcgccgggaagcggcgcaagggcgtgccgcaccggtcgccgttcggcagcctcgtggtggagttctagacaaaaaaaaaggcgcgccgcccggtcgcgatggacgctcaccaaaaaaaaaacacacacacacagcggtacaccactgtagcatacgcacttcttctacataccattaccatctataggtgctgccggatcgaccgggctacatacataagtacatagccagcccaaaaataggagcaagcaataaccagggccccatttgcacgccgcccgcgcttctggacggacgaggacgagggggccggtgcaatgcggctcgtgcggggtacggttacttccacttccatatagcagttactgtgctgggtaacaatggtttgggtttggtgcctcactgctagcagttactcttgtcgtcgtcagcctcagctactactaagttttgcgagttttacctataggtgtttgctagttttttttaccagttgcttggtataccgtatacgcgagtagaatgtacatgtacgtatactgtcagagatgggggaatggtggtagggggtgtagctcctggtgtagtggtgttcatattcgtgtgttgccttgctggcctgtaataataataaaaataaaaaagggataaggatgctgctcctggatggtcttcgatgtgaagggttgtgcttgcttgcttgattttggtggtgctttctctctctctctctctctctctctctctctctctctc

SEQ ID NO: 102124 - DNA, 1118 bp, Zea Mays
cccagttcccagcccgaaccaccggcgacgcacgctccgcttcgctatggcgctctcgctcgcgcgcagccccaaccccgccgcggcgctccccgccccgcgtgttccccactttgcccttcctctcctcacgctccgctgccctcgccgccagaaccaggcacgcctccgcgtcgcagcatcctcgcccccggaggcgcaggctgcccccgtggcggaggatgagcagggggagaagcggcggaagctatacgttgccaacctgccctggtcgttcccggcgccggagatcgagaagctcttcgcgcagcacggcactgtcaaggacgtcgaggtcatcaaggggaaggatggaagaaacagggggttcgcgttcgtgacgatgtcgacagcggaggaggcggccgccgccgctgataagcttaactcccatgatgtaatggggcggacaatcaaggtggagttttcaaagagcttcagaagaccagctccgcctcctcctccaggcactattatagagaggcacaagctttacgtgtccaatctcccatggaaagcaagggctcccaatgttaaagaattctttgcaaactttaacccgctttctgctaacgttatattcgacaatggaaaagcagctgggtacggtttcgtttcctttgggacaaaagaagaagcagaggctgctctcactgagcttgatggaaaggaacttctgggaaggcctgtacgcttgaattggcgggaaagtggtgatgataaggttgaagttgcaaaggctgacagtgaagttgaagctgtaaatattgaaggagcatgcgttgatgatgccagcacggatggaggtgaagataaacaggaatagtaaaaaaaaatattatagtggcctacggcaagaaagtttcatctgccttattggtatgcacacagatgtggagccttgttgtacagttacagttttttttttcctacactacctggtgagtgagtgcatgatcattgtgcctataagtgcacttactactcatggttggtatttgaactaatttgtttctgtggaaaatttaattccacgacatcatcggaattcttctaattgaatgtacactttcggggaa

SEQ ID NO: 102125 - DNA, 121 bp, Zea Mays
gttggcggggctagttctcaagggaaaaagggacgatcctgttccctgtttggtccaccattcatcagtcttctacaaaccttctattaatccatttccatttacgtacagggaaaatgag

SEQ ID NO: 102126 - DNA, 1904 bp, Zea Mays
cccaaccaccaccatctccacgtctccttccatccaccctgaacaagcttccctgcctctcagagtctcaaatccagcagcgtcatctgatctctccccccatatcctctcacaattcccgacaccgagaaaggagcatggatccaaggcacctagcatgtcctctctcttccgaccacaatgatttatcccagaagaagatcactcgtggagatgctctgctagcacctggacactcatcagtctcagagactgaggagtgaagtagctaccatctcgcctcgtttctcccagtctgccgttgctgctgctgccagatcccagagttcgtggtaggtggcaatggcctcgtcaccgcttgcaatctcggggacgcagcctacctgggtcccctatgaaccaaccaaagattgctctcagggcctgtgcagcatgtactgcccccagtggtgctacttcatcttccctccgcctccgccgttcgacgtgggcgggcccagcccggacgactcctccggccccgtcttctctccgctcgtcatcgctatcatcggcgtcctggcgatcgccttcctcctcgtcagctactacactttcatctccaggtactgtggcaccttccgttccttccggggccgggtcttcagttccagctcaggtggtggcggtggtgcccgcggcagcggcggcggcggcggcggaggaggaggccagggacagtccaggagccaagagtcgtggaacatctcgccgtcgacggggctggacgagaccctgatcagcaagatcgccctgtgcaagtacaggcgcggtgacgcgtcgtcggtccacgccacggactgccccgtgtgcctcggcgagttcagggacggggagagcctgcggctgctgcccaagtgcagccacgccttccaccagcagtgcatcgacaagtggctcaagtcgcactccaactgcccgctgtgccgctccaacatcacgttcatcaccgtgggggcggggcagatgctgccgacgccgcaggacgctgcgggccgccgtggtccaggcgagggtgttgggagagatgccgccgccgccgccgccgccgccgcccatgaggtggttgtggcgatggacgacttggagatcatgtgcgaagagcagcagagcatggcgggcagcacggacggtgatgagcgggaggcgagtggtggcccggagggaccggacgaggccgacagcaaggccgaggagatcagagaagagcgcccgccgccgccgccgatgaagctgtgggggccttcgtcgtcggagccagacccgatcagccacgacgtccgcatgtccatcgccgacgtcctgcatgccagcatggaggacgagcggatggcggccagggacggcggcgccggcacgtcgaggcggtggtgccatggcgagaacagcaaggggggacgcagcagcagccggcgtgcgctgcaggacggcacggacacgaagcggttgcctcctgctgggcggtcctgcttcagcagcaacagcaagagcgggagggggaggggcccggatcatccgatgtgaggaggctcagagctgtttcagattttacctaggattttactgggcgggttcttgtccgctcgcaagtcgcaacatggagaatgtggacggggaaaagcagggaccgacaccacagtctatggcgcctcgtgagacgtgggtcgtgacaatgttcatccctacgtacaatgtggtgatcgatgccagggtccaatagttcgtctgcattgctcggtgaggcctctgcagctggttcttttctcttgtcatatttttttttggttggctcttccacctctcatgtattgccaagacccacattccattatttcagagaacatgttactggctttgcaatgaaa

SEQ ID NO: 102127 - DNA, 750 bp, Zea Mays
aaagctccccgtccccgcagaagcggcagacgcggcgttgaaggtgtcgtagatgagatgagtacgtcgcggcacaaagcttccagcgtcatgtcgatcggcgatttggcggcttgtggacttgtggtatggcacggaggccagcaaggaacctacgcgcgcgaccgccgcccggtctcttctctatgccactacggtggctacggtacgcgcaggcgcaggggcagctactggcctactggctactgcccttttcacctgcgcaccttcctcgctgccgcctgcctgcgtgggtcctccactcctcctccttcacttcccaccgaggtccgagaagcagcagctacgcagccggtgctggtcttggtgctatgatgctatctccgtgtctctactctccagcggtgagcgcagcacggcggaagccgcatattgctagggcatgcatactgcgtggctggcgggcgggcgggcgacagtggacgcagcagtagtttggactttggagtagcctgaggatgagagggctttgtgcttggcagcttgggcagtcaatgagcgcggcggcagcggtagcgcttcagccagcgcgcgcagatgagtggcagtggcaggccacttcagcagctgcacgcgtcgtgccagatccggctcgccgccgcaatgctccaagagattaccaccaaaagctcgctttgttttgacttcgcggcgaaacagaaatctctgggaggcggccgtggggcggag

SEQ ID NO: 102128 - DNA, 87 bp, Zea Mays
ctctggcataattgcacctcatcacggaatatctgggacaatttagagattccttgctctgatgctgatagactgctttttgcggca

SEQ ID NO: 102129 - DNA, 1044 bp, Zea Mays
atggccggcctcgacctcggcaccgctgcgacgcgctacgttcatcagctccaccacctccaccccgacctccagctgcagcacaactacgccaagcagccggagccatccgaggacgaccctaatggcggcggcggcggcaacagcaacaacggcggaccgtatggtgagcacgacggcgggtcgtcctcatccggcccagctggagatgcccccggtggcagcggcggtaacggggagatggtagtccgccggccccgcggacgcccaccgggctcgaagaataagccgaagccgccggtgatcatcacgcgggagagcgccaatacgctgcgcgcccacatcctggaggtggcgagcggctgcgacgtgttcgagagtgtctccacgtatgcgcgccggcggcagcgtggcgtctgcgtgctgagcggcagcggcgtcgtcaccaacgtgacgctacggcagccgtcggcgcccgcgggcgccgtggtgacgctgcacgggaggttcgagatcctgtcgctctcgggatctttcctcccgccgccggctccccccggcgccaccagcctcaccatcttcctcgcggggggccaggggcaggtggtcggtgggaacgtcgtcggtgcgctctacgccgcaggccccgtcatcgtcatcgccgcgtccttcgccaacgtcgcctacgagcgcctccccctggaggaggaagaggctcaggcagcgccaccgggcctccagatgcagccacccggcggtggtgtcgatggcgctggaggcatgggcggtgggccgttccctcccgatccgtcggcggctgccgggctgccgttcttcaacctgccgctcaacaacatgtccggtggcgggtcgccgctcccgcccggtgctgacggccatggttgggccggtttgagagaacacgaagatatcaagaagaaagcaatggacggcacgatggttaagggcggcttgcaaaaggtacaattaattgtttttgagttgtacaaaggtgttacatgcctgtgtgtgcaacaacaataa

SEQ ID NO: 102130 - DNA, 246 bp, Zea Mays
atggagagtgccggctctgttggtggtggtccaactgatgctgctggtactggtagtgctggtgcatatgatgctatggctgatccgaagcgtagagcaaagtccaacagtcctggatggaagtattggtattggacagaaattgggaaccgggataaggtcgtatgcaacctttgcaagaccgtgacaactggaggaatcaaaaggttgaaaaacaccttgtgggtggttatgcggatacattaa

SEQ ID NO: 102131 - DNA, 815 bp, Zea Mays
aaggataattctcaagaatccgaagaaaaattcattttcgagatgaacgaacagtccagaacccactgctcgaaaccgcagccactggccagtcgatgcccatgactgcggtgcccaggaccggccccggttgcctggggtcgccgccggctcaggctctgtcgagctcactagccggggttcaaggcgccccgaagcgactgggcgcatcgaagccgtcgtggatcgttcgcactgagtcaaacgtgaggagggagagagcaaaacgacctgatcctccttgcaccatctgcaagggcacagggagaatagactgccgcaactgctttggccgaggaagaacaaaccatgccgatgtggccatgcttccgaacggcgaatggccacaatggtgtcgaatttgtggtggtagtggactggattactgcctccggtgccatggaactggtgagtatcgtgaacccatgggcttccacttcactgtccaaagaaaatgagtgaggtgggatggccttgtatgctacgatgcagcgcagctgcggggacatcgtagccactcagcatgtttctccactgtctctcagaactcagatgatttatgtctagcgctaacgctgtaataacgttgcttcataaaaggaaaaaatgtcatgaaaaatcacagtggtctgccgtgcattgatagtcttttagtctgtgtactagtgacagtgcacgtgcggtacgcgaaaaaaaaaacatacaagatgttcatatatatctctatgtaatatcagattcattgatatatactggtcttttaattagttataata

SEQ ID NO: 102132 - DNA, 1033 bp, Zea Mays
aaggataattctcaagaatccgaagaaaaattcattttcgagatgaacgaacagtccagaacccactgctcgaaaccgcagccactggccagtcgatgcccatgactgcggtgcccaggaccggccccggttgcctggggtcgccgccggctcaggctctgtcgagctcactagccggggttcaaggcgccccgaagcgactgggcgcatcgaagccgtcgtggatcgttcgcactgagtcaaacgtgaggagggagagagcaaaacgacctgatcctccttgcaccatctgcaagggcacagggagaatagactgccgcaactgctttggccgaggaagaacaaaccatgccgatgtggccatgcttccgaacggcgaatggccacaatggtgtcgaatttgtggtggtagtggactggattactgcctccggtgccatggaactgaggaatcgcctgggggctgggggtccagtttccagccgttctcgagatcgaatctgcatgccatgacgtcccagggcccggcgtcgaacgaggtcttggcgaacgccttccagtggctgtcgcccaggtccgtcaccgcctgccgcgccgtgtgcctcaggtggtccgagctgctctcttcgccccgtctcgagtttctcgccgacgtcgacgacggcaacgccgactcgtccgcatgcttcgctggcctcggcggtgccagcgcgggccgcgcccggcgccggcgcaggcgcaggcgcggcgacaccgttccagcagcaacttggtttccgtcgctgcccaaacttcagcagaggcgatctaagaagaagcaagcgtaccggcgcatgttctgacggccgagcgcatgttctgacggccgtgttcacgtggtgtaagttctgtgtcgagtccaatctgtgtgtcccttgtttgtcaggtttagattctgctattctactactatagtcagagtgcacgatgcacgcaactgtacgtctctatcgttgttttcaacatgatgaacatgcgaatttcgtggtattaa

SEQ ID NO: 102133 - DNA, 818 bp, Zea Mays
atgactgaaattaattggaatgctgagaacgctcgagaaatttgtaaactatttgccgaacaagtagggaatcatccaaacacttgcttgaacttgattggttatgccgaggttgaaaaaggattgaaagacatggtccatattgtggcaaccaagacagaaataaagaacaaatgggacaagttgaaagaattcaaggcatggaagaagttgatgaggcagacatgtactggttggtgctctacaaaaggaaccatcgatatggatggcgagtggtggaaaaagctgaagacattccaagttgtgggaacttcaaaatatggaggaactagaaatatgttttggcagcatcacaagtattggttttgatcattggtctcctcatatggccactgcttccaccattgctgaacaaggaggtacaccacacgaggcaatcaattgtgacacacaagaagatggtgacaccaatgaatgtgaagtttcaccggtcaatccaaatggcaagtgaccgccaaggttcaatcaaaacaaaggcaagaagcagaaaacagaaaatagggacaacactaatcatcgttcaataaacagttacatctatgtctgtttcaactaattcttatgctgcaaaaaagggaaaaatttccattgatgaagtgatgaaacatgtgcttgcttgtggtgccacctatggtagtaacgagcacttcattgcaactgaattatttgtcaaactgacccaaaaagagatgttcatgacctttcttaccgaacatagattcaactggctttcagggaaatacataaccaagtatggt

SEQ ID NO: 102134 - DNA, 693 bp, Zea Mays
attgatagttccagcatctggccagctgtttggagggcggtagtgatcaactatgagaggagcctcactagggatcctcgagtactgcattattctttcaactgatatcattttgttttctgtgttgcaaatgttccaaattatggatgccagctgtgagttgaggttcaatgcataagtcactgcaagtccagcaatacctggaggctcactagcagagtcaaagaaaaggcaaagacaaagttggatagcatgtttagcctgaaagaaagccactccattgcggaaacgttatggaaccatggcctggagtggttgtcaacaagaccaagtaggtgtggaatcaaagaaggacattggggcacgcaggatgcagtggagcatgttcttgaagaacctttctgatgttagtagaccaatcagtgacacaagcaaggaccgaaataagacacacagggcacttcccatagatagtgctatgtatacagagaagaggaggcctaatccaacggttggagtggttgcagttgtaggaggtgatgcccatgccatccaatagttgctggctacctggaagatttgaaagaatgattgtgcagctattgttactggcactaaggctccaccatgaactgccctcaggtaagtccagtaaaccttcttgccaatgcctcctttttcccgttcttcttc

SEQ ID NO: 102135 - DNA, 703 bp, Zea Mays
atttctactgttgaaacattttatcatggtgattatgataagcaaaatcaagtgttgaatgaggaacttcataaatataaagatcaagttggccactttggaaaaaatgtagctaaggctggctgcaagaattatgacttttgcccacccaagtggtggggaaattatggaacacaagtactagctctccaaaagatggctataaggattctttcactcactgcaagtgcctcgggatgtgaaaggaattggagttgctttgaagggattcatgccaagaagagaaataggctaacttgtgaaagagttgaaaatattgtctgtgcgattcaattcacttcatataaagaaaaaagctaaggccaacaataacaacaaagtagatcccctgttggcagctgatgctgtttctgctcaagggtggattgttgaaggtggagatgaagaaagctctaatgtcaacattgtgactggactaacatggcaacagatcgcagatgcatgggggcctaaggaggtcacaaaactgcggaagagtgctagattggctcagccaagagacatcgaagaagagcaactcccatctaaaaatgaagaagaagaacccataaatgaggaagaaatagaatttgaatctgaccaggatgaagtgatcacaactggttattagctgcaggagcaagaagtagtcaatgatgactga

SEQ ID NO: 102136 - DNA, 909 bp, Zea Mays
agccaagctcaccagagcagagaaactcgcacgcactcactctcttccccccctcctgcccactctccaaagcggcgcaagcatctagcaaagctgcgcagcgcagccagcaagcttggtctggagagacagatatagccagccagagagcagcagacgaggcatggcgacgtccgtggcttgcgccttcttcttcgacgcggagccgctgggcgagcccgggcggcacgcgctggacgcctgcgcgctctgcgccaagccgctgagccgcaacagcgacatcttcatgtacaagggcgacaccccgttctgcagcgaggactgccgctacgagcagatgcaccacgacgcggcgtacgcaaggcaggcggccagcagccggcggaagcagcagcagtcgcagtcgcagcggagcagaggggcctcgtccgtgggcgccaaggcggacgtgtccgtggccagctagtcagtagtaaaagcaagcacagcgacgccgagaaaggaggaggaggaggaggagaagaagaaggccgtgctggttgaagcagcgttacagctgcaagagatcccgttgggggggcggcgctccgctccgctcctggctggccgggcggggcgctgcgccgcacaacgagtttcgtgcgcggaacagaggcaagcggaggtggatggatctgaagaccgaagaaggtgacagatcgaacctgatctgcgggttggaagcttaaaccgacgccatacgtgctctgctccccttgtttatgtgttcccctgacgggatcttctgggctgtgtgtgctagagcttgaggcgtgagggtgtgtgcgggagcaccatcggcctgtaataactgtacgaatcattccagcatatgttatgtgctagccctaaaattttgatcgcagacat

SEQ ID NO: 102137 - DNA, 853 bp, Zea Mays
agctcaccagagcagagaaactcgcacgcactcactctcttccccccctcctgcccactctccaaagcggcgcaagcatctagcaaagctgcgcagcgcagccagcaagcttggtctggagagacagatatagccagccagagagcagcagacgaggcatggcgacgtccgtggcttgcgccttcttcttcaagccgctgagccgcaacagcgacatcttcatgtacaagggcgacaccccgttctgcagcgaggactgccgctacgagcagatgcaccacgacgcggcgtacgcaaggcaggcggccagcagccggcggaagcagcagcagtcgcagtcgcagcggagcagaggggcctcgtccgtgggcgccaaggcggacgtgtccgtggccagctagtcagtagtaaaagcaagcacagcgacgccgagaaaggaggaggaggaggaggagaagaagaaggccgtgctggttgaagcagcgttacagctgcaagagatcccgttgggggggcggcgctccgctccgctcctggctggccgggcggggcgctgcgccgcacaacgagtttcgtgcgcggaacagaggcaagcggaggtggatggatctgaagaccgaagaaggtgacagatcgaacctgatctgcgggttggaagcttaaaccgacgccatacgtgctctgctccccttgtttatgtgttcccctgacgggatcttctgggctgtgtgtgctagagcttgaggcgtgagggtgtgtgcgggagcaccatcggcctgtaataactgtacgaatcattccagcatatgttatgtgctagccctaaaattttgatcgcagacatgttcttgtt

SEQ ID NO: 102138 - DNA, 201 bp, Zea Mays
aaacaaaagatccaaaaaaatgtccgaaatcaatgcacacacgtcagaacacccttggttctccttttatcttttgtttacgtcgcactcactactcatcgctgagtcaccggcagtccccacctcacccaatcatggcggcgagagacgtcatggggccggccatggggctggctgtggaaaaaaaaaagaaaaagagaa

SEQ ID NO: 102139 - DNA, 761 bp, Zea Mays
cagttcgcgtccgagctgagctcaaatcgcccatcccgtcctctccagtctctagttctttctctacactcttgcagtgcagctagcagcgcacggagagccaaaaccaaagccatggcagcacatctcgccagcgccttcttcttcgctgccgagcccgtcggcgagcccggcgtgcacgcgctctgcgccaagccgctggcgcgcgacagcgacatcttcatgtacagaggggacacgcccttctgcagcgaggagtgccgctacgagcagatgcagctcgacgccatccgcgccaggcagccgtacgcgtcagggacggaggcgcggagggggcaccgggaggccagcaaggtgtccgcggtggcgacctgatgaacgcccgccggagggtggcccggagctgcgcctgcacagattgagagactcaagccaacggtttggttggtcgtttgcctcgtgaaggttgggattcggagaaacgtactcttagatcagatcgagcggccctgagccgagcttcgcggtgaatgatgcccgcggatgccggaagtcggagaagacgatctccatcggagttgctctggttgcacgaggcttggcctgcgtgccacagtcagtgccttagtcctagtgtaacatgatttttgtaaattcgatgcatttggaaagcttttgcctccaaattcagagccaatttttggaacaccgtgtgcgcttcaactgttcatgaattggttcgagtaaactgtacttgctta

SEQ ID NO: 102140 - DNA, 1111 bp, Zea Mays
gcaccccacttccttccacagccggaaaagagaaagcaggagcaccaattcggcgcatagccaagccaaggaaatggcgcactaccaccccgtgtccgcggacacttaccaagacctcgaggctggcttctccggccactcctcctcccctctgaagcccgcggcctcgccgaggcggcccggccgcatgttctgcgacccctgcgacgacggcgacgagctccacggccgccaccactacctcgacatctgcttccggtgccgtaaactcctgtccggcaacagagacatcttcatgtacagaggtgacctgccgttctgcagcgaggagtgccggcaggagcagatcgagatcgacgaggcgagggagcagcggctgaagcagacggggcgggccgagcagcagcggcagcggcagcagaagcagagcccccagaggatccccatctgggcgtggtaggatgagaaaaattttgggcgccgggaaaacgaacgaacgaacgtagtaggatttagctgcacctcaagaagaaccccccaagcaagggcgacgcgctgcgtgtggaaacaaacgcccgtggatcaccgccggctcgacgcaggaggaggaaggccacgcgccacggcacaggccggcagggcagggcagagagcccatccaaccggctgctgcgtctttttaccttcgtttgttgacgaaaccgaatggcctccctcctcctgatctccgaaagatggagacggaggggttggtttgtgcgtgagtttttgcacggttgcacgagtgaaatggtgtgcgtgctgatcgccgtgtaaaccctgtcgatacggtatgaaacaagcgagaggcctaaacaagtccctctcgaatttctcgtcagttcagctgtcctccgcttctccttcccgagtctgagctcgtgatctctcgcttacacgtcttcttgcttgccgccgtgaaggagaaagatcatgttgatgctgccagctgagctgttgatgcttccgggagttctttgttaaaaaaaatagagagacggttgcattgaaacggccattgttcagttgttcctgtgaacagacaattcccgttgcaggctgcacagaaacc

SEQ ID NO: 102141 - DNA, 1025 bp, Zea Mays
cccgcaagctagccgagctcctcgggaatccggtgccaggcctcgccttctcgcggcggtgctccctccctcttcgtcccccagcgacgcaggcaggcgcgcgcgcggccatgaaggggggcggtgccatgaggccgtcgcctatgttctacgtccacgaggcggacgtcgtccagatccaccacttcctcgaggagtgctccctctgcgccaaatcgctctccggcgacatcttcatgtacaggggtgacacgccgttctgcagcgaggagtgcagggagcagcagatcgaggtggacagggcgaagcaccggcggaagaagcgcgcggcggcgcacgcgctgtccgcacgcagcagggagcaccggcaccagcagcagctgcagcagcaccaccaccagcagcagcaaccgcagccgcggaatgccggcatggacacccgccacccgtgggtcgacgccgggttcgccaggcccagggcgcccgcgctgcgcgtctgagcaaaagaattagcgcgccgcacgcacacggcacacttcccccgcgccgcgccccgcccccgccgcagcagcaccggttgcatgcatgcactagtgccgtgcgtaagtaccgtacgcgggcgagcgacagctggctcgggttttttttgctactacatacacgtagtatcctgatccaaggctagaactgtagagccatgcatgctgccggatcggagagccgtgggccatggaccgatggcgtctctctcccccgcttgttttcggcctctcgtattttggctgtagttcttgctctctcgttctcgtggaatgaaacacgtacgtatggattatcctaccagcagatcgactagtttttgtatttcagactctggatgtacctatacatctcattagatttttactgggtgctgcgtatattgccttgtcactgaggcggcagctcagactgtaaaagatatacgagacagaaaccgatgagtcggttccgaaggctagagaatatacatgtgaagtggattt

SEQ ID NO: 102142 - DNA, 1199 bp, Zea Mays
acctcctgtctcccctttaaacacaccgatacagcacaccgtccatctctcccctccccctcgcaccgccgcgcggacacgaacacgcgagccaccgaacgggtccgggcccgatcgcaccgaccagccgcgcccgcggggcggggaggtggatccagtccaggggtgggctcctcttcaccgccgccgatggacttgggcctcagcgtcgcgggtaggaccggcagcggaggaggaagagggggctggagagggagcgggggcggcgcgtccgcggcggcgtggacccggctcgtcagctctggcgtggaggacgagctggtggccgcgtcgggaggaggaggaggaggaggtggtggacgcgctggggcgagagccggaggcctgccgctgggccactttttggaggcctgcttcctctgccggaagcccctccccagcaaccgcgacatatttatgtacaggttcgccactctgccgccgccatggctacggctaccgctagcgctagcgctaccgctacctggccctgtgccgctcgtcttgctttacgctctctgttgggagggatggttttgggaatttctgcggcgggtcccgtggtatggacgtttccgacgtctttggaaggtgtattttcccttggaagagcagggaatttgactgccgaatcgtctgccggaaaaagtgggaggcggacgtattatttctcataactttccttttcttccgcggtttagttcgaacgtccaggccagattaaaaagaaaagtatactagtggcacgaaaaaattggtgagagctgagagctccttttcctctttccgatgtggtgttggtgggatggttttgtcgcccttgatgtgtttgttcaggttgcttttgcgcgtgaatcaattaaattcctgggaccctaaattggtgcgcttatttatggccatgccgtgagctcctgccaatttaccacggaataccctctctcgtttgttcttttatatatggaagttggtaatcggaaaaaagcttcgctgctaagcacgggagctttattggtttggtacctgtgaggcggtaaggcagtagtatagtattcctgaatgacgcgttgtggctatcgccagttccatgaatatgtgggcatgttgaagctactctgccatgggtctcgtatacccctttttaatttcatctataacac

SEQ ID NO: 102143 - DNA, 1137 bp, Zea Mays
acctcctgtctcccctttaaacacaccgatacagcacaccgtccatctctcccctccccctcgcaccgccgcgcggacacgaacacgcgagccaccgaacgggtccgggcccgatcgcaccgaccagccgcgcccgcggggcggggaggtggatccagtccaggggtgggctcctcttcaccgccgccgatggacttgggcctcagcgtcgcgggtaggaccggcagcggaggaggaagagggggctggagagggagcgggggcggcgcgtccgcggcggcgtggacccggctcgtcagctctggcgtggaggacgagctggtggccgcgtcgggaggaggaggaggaggaggtggtggacgcgctggggcgagagccggaggcctgccgctgggccactttttggaggcctgcttcctctgccggaagcccctccccagcaaccgcgacatatttatgtacagaggtgacatcccgttctgcaccgaggattgcaggagggagcagatcgaaatggacgaggagatggagcggaaggagagcaaacccaagaacgtggcgccgagaggagctccatcccccaaggacgtggactccccgccgaggcctcccaaggcccgggccgggtcaatccttgccggctaacaccgtgaagaagaaaaaaaaaagctcacaaacgagctctcacgtatgcgcgctccccctccccaaaaccaagagatcagaccccctcttaccaccacgaactaccaccgctacagttacgtatatgggtttgtgctttttgtttaaaccccttgcgccattggtggcgccgtgacctgctcagtgtcagtgcctgcctacctgtatggctgtgatgatgtatagagatgggggaggggaggggaggggaggagagcgcgctggtgtttaggaccgcatgcagctcttattgcgctgctgtgtcgttcgttgtatcatgtgtgggtgtttctgcctccgtttacaggggatttttgtgaaatttctgtgtgctacgtagtagtagtagtagtcggtaatgatggttttaggcttatggtttcccgtaatgatgacgacggaaaatggaaaacatatgtctacagaaagaaatagacatcaagtacatgacta

SEQ ID NO: 102144 - DNA, 111 bp, Zea Mays
tttttttttaaaccctttggcacaccgtacacagaggcgtcagcgagaaacggcgcgggaagcaaaagctagaggaggaaagtcgattcgtacagacgggtacagtcctcg

SEQ ID NO: 102145 - DNA, 1372 bp, Zea Mays
cgctagagccgctgaaactgaactcctgacatggccaggccagcacgcaaagccctgataggcgcgccctccgccgcgcgctcgcgcggcctacggaggcacgcgtttccaagatctgctgtcgctctcttcctcgccctcctcgtcgcgctgtccttggcggtgctataccgtgccgccgtctcgcgctcgctggggacgtcctggtcctgggggtgggactcgctggcgctgccctcgttcgccacatcccaggaggaggagggcgcggaaggcgacgatctggacagtgaagatctcaaacttgagcgagtcctaaagaaggcttcaatgcgagacaatacagttatcttgactacacttaatgctgcatgggcttctcctgggtcattgatagaccttttcatcgatagcttccgttctggtgttagaacaaatttgctgttgaaacaccttgtaattgtagcatttgattggaaagcatatgaggaatgtgttaaaatccatccctattgctttgctctgggaaccgatggtgtggatttctctgaagagaagaggttcctgacttctggatatctcgagatgatgtggagaaggctagatttcctgcggctggttcttgagaaaggttacaacttcatattctcggatgcagacattatgtggtttcgcaatccattcccacatttctatcccgatgtagactttcagattgcatgtgatcactatgtcaggaatgcaaccgacttgagaaatattgctaatggaggcttcagctatgtgaaatcaaatgagcgtagcatagagttttacagtttctggtattcgtcaagattgaggtatcctggctaccatgatcaggatgtattcaatgctataaagcatgatccttacattgtacacattggattgacatttaagtttctgagtacaaagtactttggagggttctgtgaaccaagcagagatctgaacgaagtctgcactatgcatgctaactgttgcattgggctgcaaagcaagattcatgatctgaagattatgatggaggattggaggagttatttgtccttgcctccaaatttgaaaagattgcaaatatctacttggcgggtaccacaaaattgcagccttgcatggtcgcgccattaaggcaacaaagcatgctgaggatcatgaaaagcatgtgagatcactagttgaaagattgcacctccccccctcctctcccggccaaacttataactgacctaactgataggtttcatctgtaaacaaaagctgcttcatttctgtgtgttctggaacttggattctttgaggggaaaacgtgataaatcatcaaatgagttgtagtttcttgatgtta

SEQ ID NO: 102146 - DNA, 1977 bp, Zea Mays
ccacaacaagacagcgctgaaagggtagacgagggttcccgggacaattatttgcggatcatgcatgctccacgcttttggatttaccctgttgttttctccaaagtgagattttagtcccatgtcccttcgtacctgatcctcttgcccccctcgtgctcatatagagaattatgcggtcaaacccatctcagctcatgctcgggtctatgttctaattttgcttcttatgccgatagttcatggccaagtcttaagcacgtatgatgttgagctggaggatgggctcctaaagaatacccaagcagtccttcggagtcgggactagacatgaagtccatgctccaggtttggggcatcttctgctgtgtgtgttcctgtgcacttggacaaaatacttctgcgcggcccagtgtcgtgaacgttggagctctcttcacgttccactcgacgattgggagagccgccaaggtggccatcgctgctgcggtcaatgacatcaacagagatccaagcgttcttcaggggacgaagctggttgttcagatgcaagataccaactacagcggtttcatcagcattgttcaaggaatttgatgctgttgttggggatgtagctattgtcacgaatcggacaaaagttgttgatttcacccagccatacgttgcttctggcctcgtcatacttaccgccgtcaagacacagagctcggatgcatgggctttcctgcagccgtttaccatcagaatgtggtctgtgacaggggtgttctttctggtcgtaggagcagtgatttggttgctcgagcacagaatcaacgacgacttccgtggtcctccagcgaagcaggttattactgttttctggttcagtttctcaactctgttctttgcccacagagaggacacgaggagcacgctgggccgcgtcgtggtcatcatctggctgttcgtagtcctgatcatccagtccagctacaccgcgagcctgacctccatcctcaccgtgcagcagctgacgtccccgatcaagggcatcgacagcctgatcgccagcgacgagcccatcgggttccaggttgggtccttcgcggagagctacctggtgcacgagctgggcgtctccccgtccaggctcaaggcgctcggcaccccggacgagtacaagaacgcgctagagctcgggcctcgcaagggaggcgtcgtggccatcgtcgacgagcgcccgtacgtcgaggtcttcctggtgcagcacgacaagttcgccatcgtgggcgcggagttcaccaagagcggctggggcttcgcgttcccgcgtgactcgcctctggccgtggacctgtcgacggcgatcctggcgctgtcggagaacggcgacctgcagaggatccacgacaagtggctgtcgaacgggccgtcgccccagtccacgaccgacctggagccggaacggctgcgggtgcagagcttctcggcgctgttcctcctctgcggcgcggcgtgcctcgcggcgctggccatccacggctgcatcctggcccggcagtactccctccacgtggcgtcccagccgccggacgcggtggccacgggggccgacggcgccatccgccgctccagccgcagcagcatccggtcgttcctgtccttcgcggaccgccgggaggcgcagtgcccgagggggagctgcaaggaccccgccgcggcgctgggagggtcctccagcagcggcgtcagcagcttcacgtcaagcaacgccagcgtatcgaggtagccgcgtccgatggaccggcatacgcacggcacgatacgtcgatgcctcagcacagatagtccacactactgtacgtgcgcgtaggccgtagatgccggcgtgtaaatggtcgtatcgtagagacattgattcgattttgctaccgtctggggtccatggtgcagtgaatttggatccccgtgtgctgaggaattgtatacgta

SEQ ID NO: 102147 - DNA, 3221 bp, Zea Mays
ctcagctcatgctcgggtctatgttctaattttgcttcttatgccgatagttcatggccaagtcttaagcacgtatgatgttgagctggaggatgggctcctaaagaatacccaagcagtccttcggagtcgggactagacatgaagtccatgctccaggtttggggcatcttctgctgtgtgtgttcctgtgcacttggacaaaatacttctgcgcggcccagtgtcgtgaacgttggagctctcttcacgttccactcgacgattgggagagccgccaaggtggccatcgctgctgcggtcaatgacatcaacagagatccaagcgttcttcaggggacgaagctggttgttcagatgcaagataccaactacagcggtttcatcagcattgttcaagccttgcaattcatggagaaagacacgatcgcgatcatcgggccacagtcttcagtcgttgcgcacgtcatatcccacgtcgcaaatgaactccaggtgcctctgatgtccttcgctgcaaccgatccgactctgacaccgcttcagtatcctttctttgtgcgcactgtccacagcgaccagttccagatggcttccgtggctgcgatagttgattactacgggtggaagatggtgacagccgtgtacatcgatgacgactacggaagaaacggcgtgtcctccttagacgacgagcttgccaagaggagactgaagatcctgtacaaagctgcgatcaggccaggggcaagaaagagcgagatggccgccgtgctggtcaaggctgcgatgatggagtcccgggttttcgtgctgcacgcgcgtgacgattctggaatcgacgtgttctcgctggcgtacaatctgagcatgacatccggtggatacgtgtggatcgcgacagattggctcaccgcgtgcctcgactcagctcctcgtcttggaactggattactgaacacgatgcagggtgttctcacgttgcgtcagcacacggagaacaccagtaggaagaaggcgttggtttcgcgatggagtgaagtggcgaaggaggaggaggaggaggacggcggcagcttgcccaatacctatggcctctatgcttatgacactgtctggatgcttgcccatgggttggatgcgtttttcaacagtggcggaaacatttccttctctccagaccccagactgcgtgcggttgtaggaggagctctgaatctggacgcactgagcgtcttcgacgaggggacgctgttgctagaaagaatccgcaacgtgagtttcatgggtgcgactggccctgtaaagttggactcagatggtaaccttatccagcctgcatatgacattgtaaacgtagtagggtctggtttgaggacgattggctattggtccaactactctgggctgtccgttgtgtcccctgagactctgtacaagaaaccattcaatgtcagtgcaaaccaggagctccacgctgccatctggccaggcgagactgtaacgaggccccggggatgggtgttccctaacaacgggaatgagctgaggattggagttcccgacagggtaagctaccgtcagtttatatcagtagacaatcaaactggaacggtgggaggtttctgcatcgatgtgtttgctgctgcgataaacctgctgcagtacccagtcacatataggtttgtgccttttggcaatggccgtgagaatccaagctacacggaacttatcggtcgaattctgacgaatgaatttgatgctgttgttggggatgtagctattgtcacgaatcggacaaaagttgttgatttcacccagccatacgttgcttctggcctcgtcatacttaccgccgtcaagacacagagctcggatgcatgggctttcctgcagccgtttaccatcagaatgtggtctgtgacaggggtgttctttctggtcgtaggagcagtgatttggttgctcgagcacagaatcaacgacgacttccgtggtcctccagcgaagcaggttattactgttttctggttcagtttctcaactctgttctttgcccacagagaggacacgaggagcacgctgggccgcgtcgtggtcatcatctggctgttcgtagtcctgatcatccagtccagctacaccgcgagcctgacctccatcctcaccgtgcagcagctgacgtccccgatcaagggcatcgacagcctgatcgccagcgacgagcccatcgggttccaggttgggtccttcgcggagagctacctggtgcacgagctgggcgtctccccgtccaggctcaaggcgctcggcaccccggacgagtacaagaacgcgctagagctcgggcctcgcaagggaggcgtcgtggccatcgtcgacgagcgcccgtacgtcgaggtcttcctggtgcagcacgacaagttcgccatcgtgggcgcggagttcaccaagagcggctggggcttcgcgttcccgcgtgactcgcctctggccgtggacctgtcgacggcgatcctggcgctgtcggagaacggcgacctgcagaggatccacgacaagtggctgtcgaacgggccgtcgccccagtccacgaccgacctggagccggaacggctgcgggtgcagagcttctcggcgctgttcctcctctgcggcgcggcgtgcctcgcggcgctggccatccacggctgcatcctggcccggcagtactccctccacgtggcgtcccagccgccggacgcggtggccacgggggccgacggcgccatccgccgctccagccgcagcagcatccggtcgttcctgtccttcgcggaccgccgggaggcgcagtgcccgagggggagctgcaaggaccccgccgcggcgctgggagggtcctccagcagcggcgtcagcagcttcacgtcaagcaacgccagcgtatcgaggtagccgcgtccgatggaccggcatacgcacggcacgatacgtcgatgcctcagcacagatagtccacactactgtacgtgcgcgtaggccgtagatgccggcgtgtaaatggtcgtatcgtagagacattgattcgattttgctaccgtctggggtccatggtgcagtgaatttggatccccgtgtgctgaggaattgtatacgtacgagtaaagcagcgcgcatggggggcaggcgggcagggcagtttcgcggccttgcagttgcagcacacgttgcggagatta

SEQ ID NO: 102148 - DNA, 1021 bp, Zea Mays
aaacccactgtctccgctccgactagcccaggccagcagaaacccactgtctccgctccgactcccttttcctctctctctctcgttctcatccatccagccaggcgagccaacaagcaagcaaaagggcgaggagctggagagacgccggcgacgcgaagcaaccgcccgatcgaagccgcggctgagcaggaggagggagccggagatggtgggtctcgtcggcggcagcacggcgcgggcggagcacgtcgtcgccaacgccggaggggaggcagagtacgtgcgccgcatgcaccgccacgcgccgaccgagcaccagtgcacctccaccctcgtcaagcacatcaaggcgcccgtccacctcgtgtgggagctggtgcggaggttcgaccagccgcagcggtacaagccattcgtcaggaactgcgtcgtgcgcggggaccagctcgaggtgggcagcctgcgcgacgtcaacgtcaatcccggcctgccggcgacgaccagcaccgagcgcctcgagcagctcgacgacgacctgcacatactcggcgtcaagttcgtcggcggggaccaccgcctccagcttgctggagtcgtggcagtcgaggtaactggcggacctgatgtccccttccaccccgggagggagttcaaacagattgtcatgaacatgcttgattgctttcgtttgactgtggagtacggagtacggagttcacaaaatctaggagatgaacaacctcaggcttgtgaaatcaaggcacagcttgtccgcacagccgaggcggctaggcagctcgcgctaatgctcgaagtcgagaggccaagctaccaaggccgcaactcagtctaccaatcttcctcaaagatgatgtcggctatctccgtggctcatttggggtgcaaagacatggacgccgtggacgtcggagtggtagggatggtggactcgcagagcctatcctcggcacttgagaaactctatttctgggagaggaagctgtatgctgaggtcaag

SEQ ID NO: 102149 - DNA, 862 bp, Zea Mays
caacctcagggtaaccctctcactgtctcatgccagcagccgcacccacgtcctgttctgtctcgcacgctctcgccaacttgtggttgtccatccgccgccaagcacccggccccagcagtcgcaatgtcagtgtttttctttcacagcaagcttctgttctgaaattatattgtctatgatttgtaacttgcttggtggtatcaacaagcttttgtctggtccttgatcgggtaggcggtcgtgttgtgcatggcggacttgagacagttgatggtttgtccgaagcattggaaatctgagaattacttctgtgaaaattatacggaacaagcagactgggcactcagaaggctatggttttattgagttttcctctcgagctgctgcagaacatactctgataaacttcaatgggcagatgatgtcgaatgttgagatgacttttaagctgaactgggcttctgctagcactggtgataagcgtggagatagtggttctgatcacacaatatttgttggtgatttggctcatggtgttactgactccatgttggaagatgtgttcagagctaagtacccttcagttagggagctaatgttgttgttgataggatgattggatggcccaaaggatatggtttcgtgcgttttggagatctgaataatgcattgtgaagatgtatatttgtgcttgtttaatctgaaaaggggacaacttttagatatagcataataggatatgaagatgaaagatctgtacttagaaatttgttcatgaatgctttgtttgacatttcacttcgtatgctggcatctcagtgtattaagtgttaatgttacagttattcttggatcaaca

SEQ ID NO: 102150 - DNA, 2292 bp, Zea Mays
ggcccctggtctcctactctcctccccactcctccctcggcctggagtccagtcctcgactccgcctgccgcctgctgcctgacaagccacgcgctgcggcagccgtacgggcactagggttttcttccacttcgaccgcgggctcgggatctcgcgccgcaccgcaatgcagcacacgtgccgctgatcccgtggccgcctccttcctttcctcctcctgcggtcctgcgccgcctctgctgcagcgggcagccgccatggcgcggcgccacgggtggcagctccccgcccacaccctgcaggtggtggctataacagtgtactctgtgctttgtatagcattctatgctttcttctctccatttcttgggaaggacttgtatcaatatatcgctgtcggtatttatagttttttggctttatctgtgctgattctatatgtcagatgtactgcgattgatcctgctgactctggcatcctgatttccatggatgacatactaatttataaatcagaagcacatgtagacactcaagatgaagctggtaagccaggattgaggaacgatgaggatatccgaaagcataaatcatgctttggaagggtttgtttttgttgcgctatttttacaactggggactgtcgcggaggggatgaagctaaccatcaagaagattatggtgaagaggcactcttttgcaccctttgcaacgcagaggtgcgcaaacatagcaagcactgtcgaagttgcgacaagtgtgttgatgggtttgatcatcactgccggtggctgaacaattgtgttggaagaaaaaattatatcacatttttatgccttatggctgtgagtctggcttggcttgctgctgagtgtggagttggtattgctgtttttgttcgttgcttcactgacaagacagtcatagaagatcagattggggaaaagctgggttacggtctttcacgtgcaccctttgcaaccattgtagccctggctacagctctttcaatgcttgcttcagtaccactaggagaactatttttcttccatatgatattaatccggaagggcataacaacttatgaatatgttgtggccatgagggctcagagtgaacctcctggaccttctgtcaatgatgaccaacaaagcttggcatcttctccaatgagttctgcaccaacagcttttagtgggagctcgtttgcacggcactacaaaggcgcatggtgcactcccccacgtatcttcattgaccaggacgaaatcatcccacacctggagcctggccgagttccttcaactgttgatcctgataccacagacccaatggaaagaaccaaaacccatcctaaacggccagtccgcatcagtgcgtggaagcttgcgaagctcgattcaaatgaggccatgaaagcagcagcgaaagccagagcctcttcgtccgtgctgaaaccgatcaatactcgcaaccagtatgaggcagacagtgatagcctcagtagcagaaacagtgtcataagtgctgataccggacaccataggtaccctcggtcttgcgggaattcgcagtacaagccctcttatccaccaagcagagcaagtgcagatgacatcgagttgtacccccagacaccgagcagcttccagagcaactcacggacttcaactcccatagccgagcaccatccatccaagcatttcaacccaatctaccagacatcagcaaacaggtctccattctcagcaaaagcaagtgtcagtgaagctcctgtctctgaaatcaccaatgcagggaggtcctaccccccaccacaagcggacagatcctcccggtcatctgtttactgggatcaggaagctggcaggttcgtgtctgctcaggcaaaccagggatctagctctcgccctgcctatcctgatcttctatacaccgggcagaatatattctttggtggacctctgattgcagatcccgcagcaagaagcttcagagatcctggtggctcgagccaaaggtctgccgggcctcggtcgcaccagctcccggtgttcgttcccagtgacccccagaaagatcagctgtccaggttaccgtgaaatgctatatcttttttttttggggggggggggggggtagtagtcttccgaaacacatgttgccctgccgggttattaatgtatagttattagctcttagacctgacagaatagttcatgactttgtatcgggttcatggaaattaagacctatttaggcactatcaaccataagcactgaagttatgg

SEQ ID NO: 102151 - DNA, 922 bp, Zea Mays
atccctcgtggcctctctcccctcctcacacaggcacacacgcactttctgtcagcttcctcccctgcgccgataagcaagcccgtgagccaacagtggtgccagcggcccgagcggcgaggatgcacagcggagcgaggaagctcatgtgggggaccagcccggacaggcccgacgaccacgacgtggtcatcgtgctcgcctcgctgctgtgcgcgctcatcaccgtcctcggcatcggcctcgtggcgcggtgcgcgtgcgcgcgcgggcccagcgcgcaggcggcggctgccgccaacaggggcgtcaagaagtcggtgctgcgcaggatccccaccgtgccctacgccgcctgcagccaaggggaaggggacgacgcggacgagtgcgccatctgcctggcggagttcgaggagggcgagcccacgcgcgtgctgccccagtgcggccacgccttccacgccgcctgcgtcgacaggtggctgcgcgcccactcgtcctgcccctcctgccgccgcatcctctccctccagctgccgcccggcgagcggtgccgccgctgcggcgcgcggcccctggacgacggggacgctgggtggaagcccacctactacagcgccatgccgccgttcctggcgtaagcggcggaggaatcgcccgatccggaagcaaaggaaagcaaagcaaagcaaaccttcgggttaagttcctcggctgcagatttcggtactgcctgtatgtggttggtagtgcgtagcaatctgggaatgaggaaaattaggggatcaattaggttgtttgttgcagctgaaaacactgcactgcagcgtgcgtagtagtagtactagtaccaggctggcgtgtacagtacagtttgtaaatactcaagtaattaatatgcatgcgatgagctttggta

SEQ ID NO: 102152 - DNA, 966 bp, Zea Mays
atggcagcctccgacaccgacctccgtctctctccatccccacctcggccttgagcacaccgagcccaaaccccaaagcctcctgaccctggttagcttctgttttttactccatgcaaggacgacaatggcgaccgcctccgtcgccacctccctccccttcggcctccttctccctccgcggctattccgtgggaggctggtgaggtggccgcggcagattagggcttcggcgtcgagcaacgcgagtaacgtcgcaggcggggagaggaaattgggggctctcaagggcagggtaggagatctgagggcgcttgtcgcctctatgcctgatgccgttggctcggtaaggactcgattatttggttagtgccaccattaggtgttattattgtggtggtgggggtcctatagttctatgagcaactaagtggcagactgatcttaatttggacggacaatttgttgaattgattagtacacagtgccacagtgatagtacgaacctagtgcctatatagataggatgaagacacaatgtacaatgcatttgtgaatgtgatttggcatcccctgtttctatgtccgtgatcctcagcgaaccttcaatttttttcagcacatcaggggttgaaaggtgtagcccttcttctttctgaacatctgccctgccatttgtaagttttattagggttgatggcccaatatggtctggtatctatcatctatggatatggacacagatagctacaatgttcctcatatttagattcgaatatggatagtgtcaactgcgtcgaataggataagaatggatatcaacattataatgcgatttgagtatttatatacggatacagtattggatattgaatatacagactcggatacggacggatctgaacttctctaatagatttgaactcggttacggttggaaaatatccgtacaatttgcatccctaa

SEQ ID NO: 102153 - DNA, 1457 bp, Zea Mays
atggcagcctccgacaccgacctccgtctctctccatccccacctcggccttgagcacaccgagcccaaaccccaaagcctcctgaccctggttagcttctgttttttactccatgcaaggacgacaatggcgaccgcctccgtcgccacctccctccccttcggcctccttctccctccgcggctattccgtgggaggctggtgaggtggccgcggcagattagggcttcggcgtcgagcaacgcgagtaacgtcgcaggcggggagaggaaattgggggctctcaagggcagggtaggagatctgagggcgcttgtcgcctctatgcctgatgccgttggctcgatccagaaaaacattggcccaaattttgttgctggtttctgtgttggcattgcatttttggctgctgttgcaagacagatcaccttaagaagtcgagagcatgataataaaggttctgttgctgatctagtaaggcgtggacagttaaaatcagggcaacgagggactgcaaagccccgcacattcgatgatcctttcaataatccattagtcaagattgatgagggtacatctactgtgcaaatgtttggcaaggagtaccgtctggctcctgttaggcttacaaaagaggaacaagaaatgcatcagaagaggagatcacgtgcatatcagtggaaaaggccaaccgtgtttctcagggaaggtgattccttacctccagatgttgatccagatacagttagatggattccagcaaaccatccttttgctgctgcgtcaagtgaagtagacgaggagaccgccaaacaaaatgtctatcaaaaggatggcgtcccatcccgtgttaaggctgagcatgaagctttgcaggcaaggctagaggcttcaaacgatgttaccagactccctccggatccaaggagtatgcagcgtaatgagagacaaatggaattgtcaggcaagccatctgaaaatcttcagggctccaagtttgagaaccaagatagacaactggttatcgagtctggtaaacatagctccgatggaagtttacaatcaaatgagccggaagggcaataaaatttgtgtactcaagcgctttgatgacatttgctttgttgcgtagtgttatcagctttgtggctgtagctgtagatagagaagtgttggaacagtgggcttaccggtttacatagtgagcagttaatatggaagtcgcttgacgtgttgtgaatggatatttatttttgacgagtacgtgggtactgggtaccttcaccgaacgactccggactagggtaggccaggccaattggccaaggacaaacctggctcggggtgtctcacccacttggcgcactcaggtagctgatgaaagtttgtacgggatacattatattgtgtattcagaaccaataatgcacaggaggaagtccacaatattatcgac

SEQ ID NO: 102154 - DNA, 1989 bp, Zea Mays
acactgtgcggagcgtccgagcgccgccaaccagaacgacccgttccttcccctgattccctcccacctccagcctcgcgaatcgcgcgatccgagcaccggtcgtccggtcctcgaggcgtctcgcgccggggccctaaatctccggtgggtttggtatgcccggagaatccggcaccgcttcctgctaccagcgggggcggcgcctctgggtctggggtgcttgccctcccgtttctcccgtgcaaattgcgcttgtttaggtgggaattgggtgattcttggtgtgcgctactaggcaagacaacaaccacatcagcgcggaggagggggaagaggacgtatctcacgggagcgaggcccggagggagatgaaggatgtggccgtggctggagaggattgcgtccgcgtgctgggaccgggtccggaagtacgcgcttacgaggaagggtgaggacgacgccgacaccgacgccgacgtcgacgccgtcgcggacgagctgctgtggtcgcgggacctcacccgtcacgcggcgggcgacttctccttcgccgtcgtgcaggccaacgacgtgttggaggaccagagtcaggtggagacggccgccgctgccaccttcgtcggcgtctacgacggccacgggggcgccgaggcgtcccgcttcatctctaaccacctttctgcgcacatcgtccgtcttgcacaggaacatggaacaatgtctgaggatgttgttcgaaaggccttttctgctacagaggaaggcttcctgtcgcttgtgcgcaggacacatttgataaaacctgctatggctactattggatcttgctgtctggttggtatcatatggagagggacactctacctggccaatcttggtgattctcgggcggttgttggttgtttggatggagcaaacaggatttttgctgaacagttaacaagggaccacaatgctagcatggaagagattaggcaggagcttaggtctcttcatcctgatgattcgcaaatcgttgttctgaagaatggtgtgtggcgcatcaaaggcatcatacaggtttcaaggtctataggtgatgcatacttgaagaagcgagaattcgctgttgatccatccacagctcgtttccacctctcggaacctctccgccggcctgttctgacgtcagaaccatctatatcttcaagaattcttggttcgcaagaccgttttttgatctttgcatcggatggactatgggagcacctctcaaaccagcaagctgttgaaattgtccacaatagtccacgagaaggtgttgcaaggagattggtacaaacagctctaaaagaagctgcgaggaagagggaaatgaggtatggcgatattaagaagctcgaaaaaggagtccggcgctacttccacgacgacataacagttgtcgtcgtcttcatagaccatgaactgcgggcggagcattcttcctcgacctctgttcctgaactctcggtccgtgggttcgttgatgcgggggcacgctccagcttttcagggatgaacgacattacttgatacagtaaccttgtgttgcctaaatttctgtcattttgatgtaacattagatcaaactggccttctgtagttttcttattctattggtgttactagcgcgtagtacggcatctttgcttctattaacatctggccacattggaatcacaattcgttctggcaatgtctggctactctatttctcgtttccccagctctcctgaagaataagtttcacatcggtaaatatctataggatattgctagctaatgttttttcattgctgatcttctaaagctgggactttacttgatgaatctatatgggaggtgaaactcgactaccatgtctttatttgctcgcctgtgaatttgccactaggataaatccttatgtctgctagcacttgctgtttactgcacgtttgtagttgcgaggccttctggttgctt

SEQ ID NO: 102155 - DNA, 3465 bp, Zea Mays
atggcggggagcttcgacctgaggacgccaaccagaggcgtcgagcaggctatcgttgctctgaagaaaggcgcacatctcctgaaatgtggcaagagggggaagcctaaattctgcgccttcagaatatcatctgatgagacaacattaatatggtactcaaaagggagggaaaaacacttgagcttaagctccgtgtcagctgtggttcttggccagaagacgatctgcagcgatagagatcaagctgaaaactggtatctgggcttgagggccctattaccaactccttgtaatccatgttcatcaattgaatcaaggagcagtaggcagatcgacagttgtacaaatactcccagcagctatattcagcttaagagtaagttactaagtgtgcatggcacaccaaggcacatacaggtatgttcatcgcaaaggaagcccaagaaggcacacggaacattttttggtggtagcgctgattgttcagaatcattattttacacaaggcagcgaacattctctgacataggtacctacttggaaaatcttacacgcaagatgtcaaatccagaaatacatgatttgaaggatgttatggttggtaaccaagaaaaggagcagaaaattacccaaacacctaaactgaaaacctttgaaggaccccgtgcagcatgtaggttagattctctgaaggatgtttttttctggggtgatgcttttggaagtattttagagtgtggtgatacctcaaaaccccttccaatgttagtggactcaacgaacatgcttgatgtacaaagcattgcttgcggagagactcatgcggccataatcactaagcaaggagaggtctactcctggggaaatgagagcagtggcagaattggaaatcaagtaaatatcaaagtctcccggcccaaggtcgttcaatctcttgcctctttacatgtgaaggatgtggcctatggatcaaagcacacttgtgcagtaactgtttctggtgaacttattgaatggggagaaggaccctatatgggccagttggacagctatgcgaggaatcaatggtttccgcataaattgtttagtccactggacggcatatctgttgtgaagattgcttgtggtccttggcacacagcaataataacgtcttctggtcagttatacacatatggggatggaacatttggtgttcttggtcatggagatacacaaggaactacccggcctaaagaagtagagtctttgaaaggctcaagagtgaaatgtgtggcatgtgggccatggcacacagctgccattgtggaagtgatcagtgatttcaagagcaattcaccaagaagcaagctgttcacatggggcgatgcagatcgggggaagctgggtcatgctgacaaaaagatgaagcttataccaacatgtgttgattcactcacagactatgattttattcaggtgtcctgcgggacggcactcactgttgctctctctgttactggtgtggtctttactagtggcagttcgatgcatgggcaattagggaacccccatgcagatggtaaaactgtttctgctgttgaaggactacttaagagcgagtttgtcagacatatatcatcaggttcttcccatgtagcagtggtgactacaaatgggaaagtgtttacatggggtaaaggcaaggaagggcagcttggtttaggtgacttccttaataggagcactccaactttagtagatgcattggaaggtaggcatgtggaaagcctatcttgtggttacaactacactgcagcagtatgtctgcataaagtaatctcaaggaaggacctctctgtatgtagtggttgcaagatggcttttggtttcactagaaagaagcacaactgttaccattgtggatccatgttctgtaattcctgtagtagtaacaaggttgccaaggcagcacttgcaccagataagagcagaaggtatcgtgtgtgtgatgggtgtttcagtcagctactgaaagttgtggattctggtaaggtaaagtctgaactaaataccagcaaaggagctgaaattataaggtcatacacaccaaagttgtctcgtatattcagggatgtaaacttacctgtggaaaaggaaaaggtggctttagtacaacgctccaatcagagaaatgaggtcctgtacactccagtccaagcgaaatctcagagatgggggcaagttgagtgcccagctcaatttctatctgcagaagacagttctcattatcaatctatatcgaagaatcacatgtatagtgcctctgtttccgagagaatgcatgaccccacagtgctgaagtctggcagatctttgcaacagcctaatgatgaccagaggaaagatcttaacagcatagaagaaaccttgctcactgaagaagtaaagcagcttcgttcacagatgacacttctcatggagcaataccatcagaaagctcttcaggttgaactgtataaacaaaaactcgatgagacatggctaattgttaggaatgaggctgcaaaatgcaaagctgccaaagatatcataaaggttctaactgatcagtgtaaggccttgtcagagaaacttttggtcggtcagcaatatgagaaccttgagacaaaatctaatatcagccaaggacaaacattttcagcagatttgcaacatcatcccagtgaaaaatttgccacaggcaaattcggacaactcgacaacaccaaaaatcaccagaccagcagccaaggagacgaagaatatacaccttcttcaagttctgatgtgcaggtagaaggattgtgtggtcatttgaatggttcaagaacatttgacagtaatggccgtattacagaagggaattccattgttgctcgcgtcacctccaatggtgtgatcgagcaaatcgagcgtggggtgtatgtcacatttgctgtatcaccttgtggcaagaaagacataaaacgtgtacgattcagtcggaagcattttggcgagaaggaagctcaacactggtgggaagagaataagggcagcgtctatgcaaagtacagcactgaaaaagcgcaacatcagctagaggttacaatcaagagtgtacaagagtaaccacaagttggattgggttacctactgctgagcaagatgaaaaaatgacatggagcaaataagatgatattaacggaacagataactgaccgtcctttttcaatgaaaataggcagtttaacttattgtagatacgaatgtacagataagaatgagtgaatgacggctggatgcctcctttcttttctccatttcctcctgattcagttggcatgatctagtctgatgaacaatgcagtgctgaattgaaccagtatcagtcgtaattttctggcagaaagtagaatttgttcagtattagttgtttcccttgattcttcagagcaacta

SEQ ID NO: 102156 - DNA, 591 bp, Zea Mays
atggcggagggtgaggaggctccgactggatctatggcggggggcgaggtagctccgacgaggtacatggcgcgagtggaggcagctgcgattccgacgaggtccacgtcggagggcgaggaggccgcgactggatctatggcggggggcgagtgggctgttgcaggatccatggtggaggggaaggtccgacgggatccatggctgggggtggtggagctggctgcgacagtatctacggcggagggcgagggtgtcccgacgggatccattttcgctgtccggcgacagcaacctgttgtgaagcaggcgggtctggagttccactgcgcgaaggttgtgtcccggcatctggtggcactgtcgatccagtgagggtgctcttcattttacttcatctttcctgtgctcgagtatattttcctagttctactgtttttttggatgttcagtatgcagtgtgtgttcttctgtttctattagcaaaggaacaaattatgcgattctagttaaaatttgtcccagtatatttgaggatagcatacgtattgttgaaatttatatatagttaatgcatgcaattttgaaatt

SEQ ID NO: 102157 - DNA, 885 bp, Zea Mays
gcgcatttccttgaacctggaacgggcacgctgctggaggtttcgatcgactccgtccatggccggctccgctgcttgtttgaggtaagaatgaatgttcagtaccgtggagagtgccacttgcacacttgactccccgactgacgtgtttggtgtgaggcatttgtcctccatgtgaacggaggaagccggtgatccactgccttcagctggcagggcctcagagcacatctgtgctgtggtcaacacagattttggggagcagttctcctgctcagacagggactgcgcctgcaactggggcttccgaagctgcttgattgcagcagaggcatccttgcctactgaattacccagcttgcgcgggtacgggtgcgtcggcctcctcttcggcctcggcggcggaatctgaagttgcggtggagcacctacgctgttgttgctgttgtccccagaggattctcggatgacctgcagcatgcaaagcaaaaaggcaatcagaagcacgtcttcggtggcacggcatggagagcacctgctgtccatggttgagctgacttacatcaccttgcaagcaacacaatccatggaatttcaggcagaagggggttttgatgtgtttttttttttcgttctgtgcgaaaggcaggcaacgagaccttggagaagaacttctgggcgtggctcctgatctgcacggcagtcttgctgcctatgtgctctgcagatcgtaccggttgtcagctaggttccgtgcagttctggttacaaagcttgtattgtatatgaccataaacgacagaggcactcaccttgtatacggcgccaggcacggccgtgctgctgcagggcctccaagaagagcttgtgctcgtcctcggtcca

SEQ ID NO: 102158 - DNA, 1018 bp, Zea Mays
gcgcatttccttgaacctggaacgggcacgctgctggaggtttcgatcgactccgtccatggccggctccgctgcttgtttgaggtaagaatgaatgttcagtaccgtggagagtgccacttgcacacttgactccccgactgacgtgtttggtgtgaggcatttgtcctccatgtgaacggaggaagccggtgatccactgccttcagctggcagggcctcagagcacatctgtgctgtggtcaacacagattttggggagcagttctcctgctcagacagggactgcgcctgcaactggggcttccgaagctgcttgattgcagcagaggcatccttgcctactgaattacccagcttgcgcgggtacgggtgcgtcggcctcctcttcggcctcggcggcggaatctgaagttgcggtggagcacctacgctgttgttgctgttgtccccagaggattctcggatgaccttggagaagaacttctgggcgtggctcctgatctgcacggcagtcttgctgcctatgtgctcttgtatacggcgccaggcacggccgtgctgctgcagggcctccaagaagagcttgtgctcgtcctcggtccatttctccctctgcttggatatcgtgtatggcttgcgtgccttaggggcccgtgctcctcctggcaagtccatgtcgccggagctcagggtgttcttcagatgatccatgaagtctctgtggccgacgtgatctgcagccggcctttgattgctcctcgcctggaaacgagccatctcaggatttctgaaccagcagaaccacagccaccgagtctgatagcggctcttcaccacgagcacgaatcaagcagcagcagcagcaggaggaggcgagagcgtgcgccaccgagacgaagccaccagctcctgaacacccttgcgagtgctgccggtttcgcaggggagaagagaagagaggagaggagaggagggaggcaaggggcgaaatggaaggaaaggctgtatgtatggt

SEQ ID NO: 102159 - DNA, 857 bp, Zea Mays
acgccccagctccaccctcccacggatccacacgaaaccacctcccgctcggcacttctccaaacttccccattccctcccaaaccccattgataaatacccctccccaccccaaatccgaactcagtcgcccacaaaaacccagtaactcgcatcttcctccgtgatccaagttctagcagcgcagcgctcggtttcggcaatgtcggggcgcggcaagggcggcaagggtctgggcaagggcggcgccaagcgccaccgcaaggtcctgcgcgacaacatccagggcatcaccaagccggcgatccggaggctggctaggaggggcggcgtcaagcgcatctccgggctcatctacgaggagacccgcggtgtgctcaagatctttctggagaacgtcatccgtgacgccgtcacctacaccgagcacgcccgccgcaagaccgtcaccgccatggatgtcgtctacgcgctcaagcgacagggccgcaccctctacggcttcggcggctaggtcgcttcctcatctggtggcgaactgcatctgtgtcggcggtggtcgtgttgtgtgcctaatctagtgtagtccgttctctatatcgtcgctgtgttctgtggtgtcttgtatcccatttcctgcaataccaacttgccattatcaatggaaaaccctcgttttcatcctcgacgtgtctagttctgattttgttttgttctcgtttattgttcgtatgagatgtacatagggctgctgttgctttggtgtttgattgcaatttttattttgcccagagagctgcagttctgtgtgttatgcaaaaaagttctgtgattgattggatctcttcgtttggaca

SEQ ID NO: 102160 - DNA, 267 bp, Zea Mays
atgtcggggcgcggcaagggcggcaagggtctgggcaagggcggcgccaagcgccaccgcaaggtcctgcgcgacaacatccagggcatcaccaagccggcgatccggaggctggctaggaggggcggcgtcaagcgcatctccgggctcatctacgaggagacccgcggtgtgctcaagatctttctggagaacaccgtcaccgccatggatgtcgtctacgcgctcaagcgacagggccgcaccctctacggcttcggcggctag

SEQ ID NO: 102161 - DNA, 261 bp, Zea Mays
atgtcggggcgcggcaagggcggcaagggtctgggcaagggcggcccggcgatccggaggctggctaggaggggcggcgtcaagcgcatctccgggctcatctacgaggagacccgcggtgtgctcaagatctttctggagaacgtcatccgtgacgccgtcacctacaccgagcacgcccgccgcaagaccgtcaccgccatggatgtcgtctacgcgctcaagcgacagggccgcaccctctacggcttcggcggctag

SEQ ID NO: 102162 - DNA, 1395 bp, Zea Mays
gtcaatcgtgggttcccatgctctctcgtgtgcccatgtgtcttatctggaggcttctaggtgacacttctttcctcctcacatcctctctctccatcctgactcacgctccctccccaagcatccgtgcccacccacggctctggcgacagtggccaccgttttggactctggatccggccgccatcgctgcaacggtctaggtaagcggctaatctgctccgttgtgccctgctctgctcctagtcctagcgacgcaagggttttggttcagtttttttccctagggaaaagcgaagtgcatgaaatacaaagatttgctttgggattttttgggggcactgctagtgtgtgtcatggcattggaacggagcaaaaagtgagggtttggtttggtatttttggagcactcctgacttagtgtatgtgtcgtggtattttatttcaagatcaatctatttggtcccctattttctcatgtcggctaaacattttcccattcttgatttacaacattatttcagtgcagttttattaactcctttttttcctttagcatgtcttcatttagtttcttattatgcccatccttttatttttgactatgaagcaggctttctggaatcacatttcttgagaactatctgttggagagctaaactaggctcttgttcatattatggatcagcaagctaagattgatgctgattttttttgaaccaactgtactcttagatgagacacattaccaggaggggtacagaaatggctataatgatggtttggcatctggaaatgaagaggggaggcaggttggtttaaagatgggtttccaggtcggtgaagaactgggtttctttcagggctgtctggatgtgtggacgtctgcaattctcattgatcagaatgccttcacagctcgggtcatgaagaatatcgagcaactggctgcattggtgggcagctatccgctgtccgatccggagaatgaacaaattcaagacgtgatggagaagataaggctgaaattcagggtcatcactgcaagcttaggggtgaagttagagtatgaagggcaccccaaatcatctaaacaggatgttgaggatctgtgagcggtgattgaaattacattttagtttctccgcccttgctgtttaaagctcttcaacttattggcatcatgaggaactgccgtgagacatcaatggtcagagtccgaccataaccacatatatagttttaacaatgtctcaagttttgtgttattacctgttgtctgttgtctgtcatatgtaatagtttcctttcagaaggcaaaagcacttccttcctattttctttgaagtacttgttcttatttaatagataatgaacacatcccagatttatgct

SEQ ID NO: 102163 - DNA, 1024 bp, Zea Mays
ccctcgctcctcgtcaatcttatcctcctgcctccgccctccgacaccgctagtccgctacctttatagctctagcttccttccttcattctctacccatgccttcatcttcgtcgtcttgcagccccgcaacagtcgttagcttagagcatcgcacctcatcgttccaccgtccgtccgtccgctcgttcgcgtgatctgtttgagagttggggaatggaggcctacgtcctgttcgcgcccgccaaggaggtgatcaggttcgaggagcaggaggaggacatcggctgcccgtccgagtcgtccgcggcgcgttcaacgtcgtcgtcctcctcctcgtcagacggggtggacctcgccgacgacgccagctcgtccgggtccagctgtcacttcgagatggcctccctcatgacgcagctcccgatcaagtacgtacgccgtacgcacgtactcgccgatggggcgggcattgctgcggcgctccttcctgattacagagatctgatcctggcgggtgtgctgtggtctgacgccgcgctgcttttatttgggtgtgcaggaggggcctgtccaagttcttcgacggcaagtcgcagtcgttcgcgtcgctggcggcggtcggcggcctcgaggacctgcccaagccgccggcgaagcggctcaagacgtcgcggagctgcggcgtcggcctcgaggacgcgcaccgccgtggccctccctccgcgaccggcaggaagcaggcgtccagggctcggctgacgccgccggcgctcgcctcggcgccgagaaggctggtgcgagcgcggccgctcgtactggcgagaccggcggcggccgggaagcccctgttatttgcgtaggggatccggcggccgcctaccaggaaaatcgctgtgacatgatacggctgttagtttgcctgagacttgaaaatgaaatggccaaacgagatttggcgactaggcgcgtgtaaatattttgcaagtcccagctaacatgttacttacaaatgtttctctct

SEQ ID NO: 102164 - DNA, 934 bp, Zea Mays
ccctcgctcctcgtcaatcttatcctcctgcctccgccctccgacaccgctagtccgctacctttatagctctagcttccttccttcattctctacccatgccttcatcttcgtcgtcttgcagccccgcaacagtcgttagcttagagcatcgcacctcatcgttccaccgtccgtccgtccgctcgttcgcgtgatctgtttgagagttggggaatggaggcctacgtcctgttcgcgcccgccaaggaggtgatcaggttcgaggagcaggaggaggacatcggctgcccgtccgagtcgtccgcggcgcgttcaacgtcgtcgtcctcctcctcgtcagacggggtggacctcgccgacgacgccagctcgtccgggtccagctgtcacttcgagatggcctccctcatgacgcagctcccgatcaagaggggcctgtccaagttcttcgacggcaagtcgcagtcgttcgcgtcgctggcggcggtcggcggcctcgaggacctgcccaagccgccggcgaagcggctcaagacgtcgcggagctgcggcgtcggcctcgaggacgcgcaccgccgtggccctccctccgcgaccggcaggaagcaggcgtccagggctcggctgacgccgccggcgctcgcctcggcgccgagaaggctggtgcgagcgcggccgctcgtactggcgagaccggcggcggccgggaagcccctgttatttgcgtaggggatccggcggccgcctaccaggaaaatcgctgtgacatgatacggctgttagtttgcctgagacttgaaaatgaaatggccaaacgagatttggcgactaggcgcgtgtaaatattttgcaagtcccagctaacatgttacttacaaatgtttctctctctgaatttgttccaatttgcatcaaattggtctgtcctttc

SEQ ID NO: 102165 - DNA, 708 bp, Zea Mays
atccgcacactgaatcacgaatctctcgagccgcagtccagtccatccggctgcaggctctctgctgattctgagtacgttggcgttccaggcgatagctagcttagcttggcttggcacagtcgatcgtctccgatggcggcggacatgcagattgtcctggccgcggggaggaagatcgaggcgcagtatgtggagatgaaggtgccgctctactcctacggctgcgagaagaagatcaagaaggcactgtcacatctcaaaggtatacattcggttcaggcagactaccacgagcagaaggtgaccgtgtgggggatctgcgaccgcgacgacgtgctcgctgccgtccggaagaagcgccgagccgcgcggttctgggatgatgatggcggcgaactgggtccacgcgagcgtgcgccgacgcccggccgagaagctcccaagcagtacctggcagccttcgccgcgtacaggtggaggaagtcgtggaagaagcttttcccgctgatccgcctctgaagctcaccgtgtgtgcttaagcttattggcttctagcttctccacaagtgagcagtgtgtgtgcctgcgtcttgacgacgtctcaggaaccggaaaaaggggttggaacatggaacttaagttctaacagtagcccgtgcttcttggtagcaaataaacatgcttcgttaccgaagccttttggta

SEQ ID NO: 102166 - DNA, 2044 bp, Zea Mays
cagctcgctttacccctcccaacaagcgccaccaatcgctggagactggagagagagaagaaccagccacacaactctaattaccacgcactctctctctctctccgtcctatcgatcccggcctccctcccccagccccagcggatcggagcccccggctggcttcctaccctgccccctcttcctccgacgcgcgggcggaggagttcgatccgagcgcgagagggaaggagagagaaactaaagaaagagaggggcagagagcagacagataggagtggtagatatagataggctggggctggcctcatcgcggatagatccccctcctcctcctcctcactctccccagcgagcaagcaaccaagcagccagctagtcagtctccgccaagcagggaccgcgtcgcatcaaagccgctgcccgcaacagggacaaggcaggccagcgcgcgctcgaaaggggaggcgtcgttctacacgaagacgaggaggaggagccctgcagggcgtagctagctatggagttcgcgagctcttcgagtaggttttccagggaggaggacgaggaggaagagcaggaggaagaggaggaggaggaggaggcgtctccgcgcgagatccccttcatgacagcggcagcgacggccgacaccggagccgccgcctcctcgtcctcgccttccgcggcggcctcatcgggtcctgctgctgccccccgctcgagcgacggcgccggggcgtccgggagcggcggcggcgggagcgacgacgtgcaggtgatcgagaaggagcacatgttcgacaaggtggtgacgcccagcgacgtggggaagctcaaccggctggtgatcccgaagcagcacgcggagaagtacttcccgctggacgcggcggccaacgagaagggccagctgctcagcttcgaggaccgcgccggtaagctctggcgcttccgctactcctactggaacagcagccagagctacgtcatgaccaagggctggagccgcttcgtcaaggagaagcgcctcgacgccggcgacaccgtctccttctgccgcggcgccggcgacaccgcgcgggaccgcctcttcatcgactggaagcgccgcgccgactcccgcgacccgcaccgcatgccgcgcctcccgctccccatggcgcccgtcgcgtcgccctacggcccctggggcggcggcggcggcggcggcgcgggcggtttcttcatgccgcccgcgccgcccgccacactctacgagcaccaccgcttccgccaggccctcgacttccgcaacatcaacgccgcggccgcgccggccaggcagctcctcttcttcggctcagccggcatgcccccgcgcgcgtccatgccgcagcagcagcagccgcctccgcccccgcacccgcctctgcacagcattatgttggtgcaacccagccccgcgccgcccacggccagcgtgcccatgcttctcgactcggtaccgctcgtcaacagcccaacggcagcgtcgaagcgcgtccgcctgtttggggtcaacctcgacaacccgcaaccaggcacaagtgcggagtcaagccaagatgccaacgcattgtcgctgaggacaccgggatggcaaaggccggggccgttgaggttcttcgaatcgcctcaacgcggcgccgagtcatctgcagcctcctcgccgtcgtcatcgtcgtcctccaagagagaagcgcactcgtccttggatctcgatctgtgagcgagagatcgatcagctggcgaactcgatcgatcgggggagtaaaaaaggaaagttgaaaatttcctccttccgtctgctaccttcttcttcaccttttgagattccattataacttttgatcataggatctagagtagccttcttaacacttgttctccgatttttctttcggccattcaaattcttgtgctggcttgacaatatatatagagagaagttaggcgaattaattaatcaattattgttgctttcatatggcttgaaatctgactcggtttttgcttcgctac

SEQ ID NO: 102167 - DNA, 1484 bp, Zea Mays
ctaaactacagctaacactgcagccccaagatcgatcgagcgtccacagccccaaggaacatagtataacatggccccagccatttccaagcctctccttaccgatctcgttgcacagatcgggaaggtcccatcgagccacatcaggcctgtcggagaccgcccggacctcgccaatgtcgacaacgagtccggcgccgggatcccgctcatcgacctcaagaagctcaacggcccggagcgccgtaaggtggtggaggccatcggcaaggcctgcgaatccgacggcttcttcatggtgacgaaccacggcatcccggcggcggtcgtggagggcatgctgcgcgtggcgcgggagttcttccacctgccggagtcggagcggctcaagtgctactccgacgaccccaacaaggcgatccggctgtccaccagcttcaacgtgcgcacggagaaggtcagcaactggcgcgacttcctgcgcctgcattgctaccccctccagagcttcgtcgaccagtggccgtcaaacccgccgtccttcaggcaagtggtgggcacctacgcgacggaggccagggcgctggcgctgaggctgctggaggccatatcggagagcctgggcctggagcggagccacatggtggcggccatggggaggcacgcgcagcacatggcggtgaactactacccgccgtgcccgcagccggagctcacctacgggctgccgggccacaaggaccccaatgccatcacgctgctgctgcaggacggcgtctccggcctccaggtgcagcgtggcggccgctgggtggccgtcaaccccgtgcccaacgcgctggtcatcaacatcggagaccagatgcaggcactgagcaacgaccggtacaagagcgtgctccaccgcgtgatcgtcaacagcgagagcgagcggatctcggtgccgacgttctactgcccgtccccggacgcggtgatcgcgccggccgacgcgctggtggacgacggccaccctctggcctaccgccccttcacttaccaggagtactacgacgcgttctggaacatgggcctccagtcggccagctgcctcgaccggtttaggcccggaggatcgttggagtgagtgaactacgccggccacgacagggaaaaaaaaatgaagacctttttgtattcttgagcatctgccaataactggatctttgaaatcctcctctggactggagtcttggattcccttcgggtcccacctaacattacgttgggtccaccctgaagatgcagacaaggtttaggttgacaaattccgatgtaaggatgattttgtccaacttattactatttccttgtgctaattacaaagtacagatgtaagcttccacaaaacattgcttttgatagatgttgatccatccattacaaattctaagttaattagacttttctgagaataaaaagtatataacttttgttatgtacct

SEQ ID NO: 102168 - DNA, 781 bp, Zea Mays
acgcaggcagcagcacgcggctgcgctcgatcaggcatcagtgatgtgctaccacagcctaccgcgtatgtatcgccgatgagcaaccccagcttcgaccacagctacgagctccctctgcggcgaaacctcctgcttctgcgcgacctcctcgacctcctccgcttcatcgccggggtgatcctggaccgcctcggcgtcgcgccgtgccagggcgaggtgcatctgccaggacaggctttaggcggcgtcggcgagcatgtcaacgatgttgacttggaacgcctcctggaggcgatgctgtgggagaccgtgacgcggtcgctcacggctccacggtacaggcggcggcgggttgcgcagccggcggacgtccagctggacgcagaaggcgacgccgagggcgcggccgtctgcgcgatttgcttggcgggtctggaacagggagatttccaggcggtcgtggagctgtgcggctgctcgcacgcgtttcacgccgcctgcatcgatgcttgggtccgcagtggcgacggtgcggccacctgcccgctgtgccgcgcgcccatgttgcccacggcgtgggacgacgtgcagagttcgttcggcgctcgccggggtgactgaggtttctgtctccctcccgtatagtaattgctgcgctagcacgtctcgacagacagacagatagatagataaacatgcgccatcgtctatagcggaaagatgcaataatgtgtatgcatgtattcgcgcggatcgatcgtttccctctgaactaaga

SEQ ID NO: 102169 - DNA, 1005 bp, Zea Mays
ctctctttcggttgcctcgtccctatatgtcccgcgcctttgtgttgtgcgtgccctccggaatccgatccgagccatattaaacagacgcatgcacgccgcgccggctggagcgcacggcggcggcggcctcctgcccacccagcttcgcgctattagctagcttgctgcagcagcgtacgtgctttttcgttcgtcctgccggtctccatgaccttcccgctggtttgctactgctacgcggtgccgcgccccgtggccgcgctgctcaagctcctccacgccgccgtgctcgtgttcgtgctgctcctctccttcctcggcctctacgagttctcctacgaccccgaggatcacgcgccaccagccatcaacggcggccgccccaggccagaggcggtgaagcggcgcctcccgctcgtcgagttcctggagctggtggattcgtcgtcgtcaccgtcgtcggggctgggggcggagccgacgtgccgggtgtgcctcgagtggcttgaggccaaggacgaggtgcggcggctgggcaactgcacccacgcgttccacacgcgatgcatcgaccgctggatcgacctgggcgaggtgacgtgcccgctttgccgctcccacctgctgccgcgccggcgcgccggcctactcggcatggcacggctcggctagtcgcgcgtccctggttcccttcatcccttgccacgtacgatacgtgcccgtccacagccgtgctcggcttcaggccggcggcgcgcggccggtacgcgcgcagatgccactgggcactggtgccggatgggggcagaccatgagaccaaccgtgaactaggacgactgtctaattaacctgatgtaaagaatttttttccgtcaatggatgggcgcaagccaaattactggaggttggcataaagcgttacttgacgcgaaatattgtttgccctgcgttggacggacaacgctatacgaacgtatcgaatacaaaccacgttttcatgt

SEQ ID NO: 102170 - DNA, 1074 bp, Zea Mays
gccatcatgctcgctttcgctcgtccaactaaaatgtccccatgctgtccctgtattacgccaccgcttctacttccaactgccatgacgacaggtgttctgcgccccgaaggttttctcctgctgctgctcctccaggcgaccgttgcgcttgccgttccgcagcagcaggtgctgcagctgcaggacaccgtcctgatagacgacgtcgtgcaggaggccgccgaggagtggtaccacgggcggcaccggaggacgggcgtcgcgtacccgctctcgctaccggggagcctgtcgggcgtcgaggccaccgtggcgcggttccgcgccggcagccttcggaggtacggcgtgcgccggttcggcgagttctccgtgccgccgggcctcgccgcgcgcggccgcgccgcgcacctgatcgcggtgcgcgtcaatctggggaacctctcctccgtgtacgacgagtacgcggtgggcgccgggtaccgcctcgcgtcgccggtgctcgggctcatgttctacggcctggcgcggcacaacggcacggcggcgctggagatcgacctcacgggcgccgccatccgcgtcaacttctccgtggccatcccggcgctccagccgggggccgcgccgctctgcctggccgtggggctgaacggcagcgtcaccgtgacgaacgtggaggacgggaccaacacctgccacgcgtcggaccagggccacttcgcgctcgtcgttgggggagctggcgacggcgacggtggcggcggcggcggggaagaggcggatatcggggaggtcagcaagtggaagctggcgctgttcggcgcggcgctgggcgcgggcggcaccgtgcttctggggatggtcgccgtggccgtggtaagcatccagcggcgcaagtcggagatggcggagatggagcgtcgggcctacgaggacgaggcgctgcgcgtgtccatggtcggacacgtgcgcgcgccgtcagcggccggttcgcgcaccacgccggacgagctcgagagcgagtactgtgccacgttgtgacacagtgtagactggaaaccttggaag

SEQ ID NO: 102171 - DNA, 758 bp, Zea Mays
cggactgaggcgtcttgcgtataccatccaccgatccacgcgctgctctcgtctgctggtatggcttccggaggcgtcgcccgcgcccgcctcgccgaggagcgcaagtcgtggcgcaggagccatccccacggcttcatggccaagccggcgacgctgccggatggctctgtaaatctcatgctctggaattgcgtcgtccccggcaagcaaggcactgattgggagggtggtcatttcccattgaccttgcattttgatgaggactacccaagtcggcctccccactgcaagtttccagcaggtttcttccatgtcaatgtctacaacactggttctgtatgcttgtcgatccttggcgacgcatggaagccttctatcacagtgcggcagactctaatcggcatccaggaccttctagataatccaaatccagcctccccagcgcagaatttgtcctacgtgctctttacacagaatatgccggagtatgcgagtcgtgttcgtcaacaggccaagcgttacccttcgcttgtgtaacgttggatcatctagcaaaccagctcctcacttcgtcggacactgtcacgatcgtggttatattatccatcgtttcagtaggcttgttgggactgttaaaatgcagttcagtggcttggcgttcataaacaagcttctgttctgtatgagatgttttcctatttcataattggctgtcaaggattctggtaccagcgcaaaacggaattgctgcaagt

SEQ ID NO: 102172 - DNA, 1632 bp, Zea Mays
atggttgcggcctcgccagagaagctccactgcggcgcggcggggtcaagtgacaaagaaaaggaggtggcggggagggatgatgccgaggttatgttgccgcagctctcggatgagccgctgcgggagaaggcgcagcgcatccaggtcatgctcaccggaggcatgtccgaacgcctccctgaccgcggcaagaagctgctcgccacactcgatgccatccaccgggagcaagaccgccgccaggcccaaggcgacggggcacgagcgccgctgggatctctgaccagtggaaactggaatgctgtaattgtacaatatagtgacggcttgggctttgtggccaagccggcgatgctgccggatggttctgtcaatctcatgctctggaactgcgtcgtccccggcaaggaaggcaaaaagaacaattttagtctgttgtcccaaaacagaaacaagcagagcattataagattttcagaattcatgagtgggattctaagcagtgtccagcagcttgcgaatcagctcgcggatgcacattttgcgcgaccgcatcccactattcacacttccagcagatcgcaaatgccccaaaatgtgcagtcggccatgcggttgcgcgttctctcttttctgtgggagaggatgcacattcgcatccgcgagccgctggacacgggcgctttttccgttgcgcaaacgagggccgcgacgcgggagatgcgcttccgcatccgtccgccgttggacacaaacacaactatacttctgaaccttttgcttgaaacaaaaacaagggacatgttatattatggtaatcatacaattaagttgttctgctttcttgcgctggccgcaaagcgcgggctggtgggttcctcccctggtctgattaagttgttctgctttatttgtaaatattctccatttttactggttctcagttcattattttttgtcaaccataccactttttctattggtggatagtcttcatcgcactgtgttacaaaaaaattgtggctctactcattctcctcatcccaaactgccttgtcatataaccaaaaccgtgtgattgattcatctttatgcagactgattgggaaggtggatatttcccggtcactctccatttcactgaaaattacccaagtaaccccccaacctgcaagttcccacgaaggtttttccatgtcaatgtctatgattctggggatgtatgcctgtcaatacttggtgatgcatgggcgccttctatcacagtgcggcaaattctaataggcatccaggagctgctggagaacccaaacccagcctctcccgcacaggattttgcttacgatgtttttgcagagaatatgccagaatacaagagacgcgtccgtgagcaagccaagaggtatccgtcgctcgtgtagccgtggacctctgcaacacaattgctgctaaccaagtagtcactcactttggtgtagtggaacttgttcatgacgtgcttaactatggtgtctagttagccgtacgcttgttggaactgctaaagtgcagcttattggaactgctaaaatgcccttgactacgtcttattattatggtttatcagtatagtgttgtcaacatccaaaa

SEQ ID NO: 102173 - DNA, 1043 bp, Zea Mays
cacggtcccacacacccgacgtcccgccctccgagcccacctcccaatgtcacctccctcgcatgtcgacccgacgcgtgaagtttggttgataacaccactaaacaatgatctatacatacacaagtgtcaccctgccagttgattaccttattaaataatgacctatgcctgcataagtattacccgttgcaacgcacggtcatatgcctaataaaaggcataaacctggcctcaccccaccgcgagccgaaccggagcgtcaagcaaacatccgtcgatcccgattccgaccactgcgctcgcgccatcgcgccatccacccggcattgtgcgcccgagccgggctcgttggatggcgtccggaggcgccgcccgcggtcgccttgctgaggagcgcaaggcgtggcgcaagagccatcccctcggctttgtggccaagccggcgatgctgccggatggttctgtcaatctcatgctctggaactgcgtcgtccccggcaaggaaggcactgattgggaaggtggatatttcccggtcactctccatttcactgaaaattacccaagtaaccccccaacctgcaagttcccacgaaggtttttccatgtcaatgtctatgattctggggatgtatgcctgtcaatacttggtgatgcatgggcgccttctatcacagtgcggcaaattctaataggcatccaggagctgctggagaacccaaacccagcctctcccgcacaggattttgcttacgatgtttttgcagagaatatgccagaatacaagagacgcgtccgtgagcaagccaagaggtatccgtcgctcgtgtagccgtggacctctgcaacacaattgctgctaaccaagtagtcactcactttggtgtagtggaacttgttcatgacgtgcttaactatggtgtctagttagccgtacgcttgttggaactgctaaagtgcagcttattggaactgctaaaatgcccttgactacgtcttattattatggtttatcagtatagtgttgtcaacatccaaaa

SEQ ID NO: 102174 - DNA, 2333 bp, Zea Mays
ggcggttttattatcggagaagcaaattgaattgaatggcaccggctcccattagctggacccgtagctgttgttgtagccatagcatttggaggtagccatagcccatagcattccattcctccctccctccctccctcctcggtagattcgtctcgtcaccttcctcctcctcctctctttctgctctccctgccccgacctgccccgccctgcatggagccaggcgcgccgtggcgcgatccgcgccagggttactcctacggggtcggatcggcgatgcagctccagctccagctgcagcagcgggccgacgcggcagccggtggaggagtgctcaagaggagcctcggcgagctggagaggtggcagcaccaccagcagcagcaggtggccgcgcaacaggcgctgtacctgcgcgccgtgaggcagcgcacggctgcggcggtcgatatcgccgccttgctgggaggcaccccggctcagcctctggttctacccgggtccagctttggagggggcctagcgtcgccttcgtcgacgctctcgtcgtcgctcaccaccgcgtccagggcggcggtgccgctgatgcagccgcagctgcagcggcaggtgccgctcacgacgtcctcaccgcagacgcagcccttcgggctgtcgacggcgccgctgcctcagccgtcggtttcgagcgagctgttcattttgcaggagctcgagaagcagctgctggacgacgacgacgacgacgagccggttgcggcgatgagcggcaccggttccgccgtcaccaactccgagtgggaggagacgatacagcagctcagctccatcgcggccgcgccgtcgcccgggctccctgcagcggcgaccccaaacaacaacaataataacgtcgggatgacgaggtcaccgtcaaactcctccacggcgtcctcgtccgcgtcctgctcgccgccgacccccggggccgcgtcgaggcagctattgtctgaagccgcggtcgctatcgcggatggccatcacgaagcggcggccgcccatctggccgccctgaagcgcgcggctaaccagcacggcgatgcggaacagcggctgattgccatgatggtggccgccctgtcctcccgcattgctccggccgcctccgccccatctcaactcctcgccgacctctgcagcgtcgagcagcgcgccgggtcccaactcctacaggacctctccccgtgcttccgcgtcgccctccacgccgccagcgccgccatcgtcgaagcggtgggcgaccaccgcgccatccacctcgtcgacttcgacgtcagcttcccgcagcacgcggctctcatccagtacctcgccgaccgacgcgtgcagggcaggtccctgaaggtcaccgccgtcaccgacccgagctcgccgttcacgcagtctctaaccgcatcgctaccagccatcgaggagcggctgaagaagctcgccgagcgagctggcgtggagtaccgctttacagtggtcagctgcagagcagcagagctggatgcgtccaggctgtgctgcgagccgggggaggcggtcgcggtcaacctcgccttcgcactctcccacgtgcccgacgagagcgtctctccggccaacccccgcgacgagctgctccgccgcgtgcgcgcgctgggcccgcaggtggtgaccctcgtcgagcaggaactgaacaccaatacggcaccgctggcggcgcgcttcactgacgcgtgcgcgcactacggcgccatcctggagtcgctggacgcgacgctggcgcgggagattgcggagaaggccagggccgaggcggccctgtcgaagaaggcggcgaacgcggtcggccgggatggccccgaccggctggagcggtgcgaggtcttcggcaagtggcgcgccaggttcggcatggcgggcttccgcccggtgtcgctcggctcgagcattgccgaagagctggtcggcgcccgcgtcggccatgtaccgcccgggttcacagtcaaggcggagaacggcgtgctccggttctgttggatggggcgcgcggtgaccgtcgcctccgcgtggcgctagaccacggcgggcggccgaccgcccgcccgggccattattgccgtcactaaattgtcagttacataattcgagctattgctttcctcgttctcccttcttcctttttttttaccttgattgggtgaggagtgatgagtttgccatgatctggtaaaaatccttcctagctgtagcgactcataattcttataactgctcatagtagtatatggaaaagagtaagttatatcgcaatctcctcctaa

SEQ ID NO: 102175 - DNA, 1646 bp, Zea Mays
attcctccctccctccctccctcctcggtagattcgtctcgtcaccttcctcctcctcctctctttctgctctccctgccccgacctgccccgccctgcatggagccaggcgcgccgtggcgcgatccgcgccagggttactcctacggggtcggatcggcgatgcagctccagctccagctgcagcagcgggccgacgcggcagccggtggaggagtgctcaagaggagcctcggcgagctggagaggtggcagcaccaccagcagcagcaggtggccgcgcaacaggcgctgtacctgcgcgccgtgaggcagcgcacggctgcggcggtcgatatcgccgccttgctgggaggcaccccggctcagcctctggttctacccgggtccagctttggagggggcctagcgtcgccttcgtcgacgctctcgtcgtcgctcaccaccgcgtccagggcggcggtgccgctgatgcagccgcagctgcagcggcaggtgccgctcacgacgtcctcaccgcagacgcagcccttcgggctgtcgacggcgccgctgcctcagccgtcggtttcgagcgagctgttcattttgcaggagctcgagaagcagctgctggacgacgacgacgacgacgagccggttgcggcgatgagcggcaccggttccgccgtcaccaactccgagtgggaggagacgatacagcagctcagctccatcgcggccgcgccgtcgcccgggctccctgcagcggcgaccccaaacaacaacaataataacgtcgggatgacgaggtcaccgtcaaactcctccacggcgtcctcgtccgcgtcctgctcgccgccgacccccggggccgcgtcgaggcagctattgtctgaagccgcggtcgctatcgcggatggccatcacgaagcggcggccgcccatctggccgccctgaagcgcgcggctaaccagcacggcgatgcggaacagcggctgattgccatgatggtggccgccctgtcctcccgcattgctccggccgcctccgccccatctcaactcctcgccgacctctgcagcgtcgagcagcgcgccgggtcccaactcctacaggacctctccccgtgctggcgcgggagattgcggagaaggccagggccgaggcggccctgtcgaagaaggcggcgaacgcggtcggccgggatggccccgaccggctggagcggtgcgaggtcttcggcaagtggcgcgccaggttcggcatggcgggcttccgcccggtgtcgctcggctcgagcattgccgaagagctggtcggcgcccgcgtcggccatgtaccgcccgggttcacagtcaaggcggagaacggcgtgctccggttctgttggatggggcgcgcggtgaccgtcgcctccgcgtggcgctagaccacggcgggcggccgaccgcccgcccgggccattattgccgtcactaaattgtcagttacataattcgagctattgctttcctcgttctcccttcttcctttttttttaccttgattgggtgaggagtgatgagtttgccatgatctggtaaaaatccttcctagctgtagcgactcataattcttataactgctcatagtagtatatggaaaagagtaagttatatcgcaa

SEQ ID NO: 102176 - DNA, 1160 bp, Zea Mays
cccatccctcctcctcgcgctttatatagccaccaccgcgcccgcttcgcctctcccgtccacgcatcgccaccgcgccatatcggcatatccgcaagaagcacccggcacatcgcgtcgcccccaccttccccctcccaccaccgcaagcccggacacgcccagggcgcaaatccggacaagcgctgccccggtcgcggcaggcatgggtttcccggtgggctactcggagctggtgctcccgaagcagctgctccacctcctgctgctgctggggtacatccgccgcttcctcctctgggcgttcgacgccgtggggctcggcgacctgctggatctcggggacgaccaccaggcgctgctgcaggaccaccagcagcagcagcacggcgccgccgcgcaggggcgggacctgccgcagcaggcggcgatgctgcagcaccggcgcccggagttccgggcggtgccggcgatggtcatcgaggaggtcctccccgtggtgcggttcgacgagctggagctggagccggagcccggagactgcgcggtgtgcctgagcggcatcggcggccgcgacgaggtgcggcggctcagcaactgccgccacgtcttccaccgggcctgcctcgaccgctggatggagcacgaccagcgcacgtgcccgctctgccgcgcgccgctcatccccgacgagatggccggcgcgctctgggccgccgccgccggcgtccccgacgcctccgacttcgacttctcctacctcggcgcgccgctggcgcccgtgccctccccgacgctgctgcggccgcacgagctgctgctcaccggcctgggcggctaccagtgagagctcaccaccgcccgccacttcccccgtggggaatgcgcgtctgcctggatccatcgacgcttgcttgcttgcttccgttccgtgggagggacggggacggacagcagccgaggcagagaagaaacccaaggctctcgaattgtacataggcaaaatgagtaaagcggccacccccccaaaaaaaggctaggagattagatccctcttgtgcataggtagattccgtcttccaagtttgtggagttgtgaatctttgcgcggattaaatttttgtcgatgagctaggcgtgtcgatgcatgatttgggccc

SEQ ID NO: 102177 - DNA, 459 bp, Zea Mays
gaacttctcctgtcgacgggtagctcggcgtgggggcataaccctgccggcaaccacgggtcaaggctacgatctacgtagccgaggtcctcctaccttgggcaataccgcccttgacaacctctgtcctataagttttgattccttgatctcaatggttgactttttatatctccaagaatatttgggttttacacaaatatttttggccacaaaacaaaattcttttttctttgtgaagatattcactacatcgtacaggtccctacgaccttatcttcaatgggaagtccatctctggtgattattctttgaaaggacagatgaatgaaggcaaaaacatggagcagggcaactggacagcatgtagcatttgcaaatttaaagtataaatcttatgtcactccaaaggacgaggctaaagttaagaccgatgatgttggtcgtatacttctaact

SEQ ID NO: 102178 - DNA, 445 bp, Zea Mays
acacttaaccaacctcagagtaccactccccgaagttgtcgtccttcctatacgccatcccgagctttgtttctttcttcacctccttcttcttccctccgcctcccttggctgcgctgcccttgctggtcgacatggttcacggattcggtcctcggtcgcgcaactgtgtaccgggaatcagggagaaggatgaggcgcgagcgaggcggggtgtcctggtcagtgttcaacgaggcgctcttccgcgctcgcctgggcgcgcctctgggcggaggggtaccgtctttcctaggggctagccggcacctaaggcatggatacgtgggggcgacccggacgttgggcggcggtgcgggacaaaggtacgtcgggcggaggtcgccggtgggggaggaggggcgtcgagcggagtaggccggcgccggcggctggtatgcgggag

SEQ ID NO: 102179 - DNA, 2071 bp, Zea Mays
atcatttcaccagaagctgcaaattgcaagctctcctccctagctagcctctccagcagcccaaccacagcctgcagctgcagctcgcgttggcacagcgccgcctgaacgcgtgctaatttaagctctgtcgtagctcaacgcggccgccgggctttcgccgacgacgtcaaaatggccggtggtagcagtgccgagcagctcctatccaggatcgcctccggcgatggccacggcgagaactcgtcctacttcgacgggtggaaggcctacgacatggaccctttcgacctgcgccacaaccgcgacggcgtcatccagatgggcctcgccgagaaccaactgtccctggacctgatcgagcaatggagcatggagcacccggaggcgtccatctgcacggcgcagggagcgtcgcagttcaggaggatagccaacttccaggactaccacggcctgccggagttcagagaggcgatggccaagttcatgggccaggtgagggccgggaaggtgacgttcgaccccgaccgcgtcgtcatgtgcggaggcgccaccggcgcgcaggacactctcgccttctgcctcgctgacccgggcgacgcctacctcgtgccgacgccatactacccagctttcgaccgtgactgttgctggaggtcaggcgtgaagctgctgcccatcgaatgccacagctcaaacaacttcaccctcacacgggaggcgctcgtgtcggcctacgacggcgcgcggaggcagggcgtccgcgtcaagggcgtcctcatcaccaacccctccaacccgctgggcaccaccatggaccgcgccacgctggcgatgctcgccaggttcgccacggagcaccgtgtccacctcatctgcgacgagatctacgcgggctccgtcttcgccaagccggacttcgtgagcatcgccgaggtcatcgagcgcgacgtcccgggctgcaacagggacctcatccacatcgcgtacagcctctccaaggacttcggcctcccgggcttccgcgtcggcatcgtctactcgtacaacgacgacgtcgtggcctgcgcgcgcaagatgtccagcttcggcctcgtctcctcgcagacgcagcacttcctggcgaagatgctgtcggacgcggagttcatggcccgcttcctcgcggagagcgcgcggcggctggcggcgcgccacgaccgcttcgtcgcgggactccgcgaggtcggcatcgcgtgcctgcccggcaacgcggggctcttctcgtggatggacctgcggggcatgctccgggacaagacgcacgacgcggagctggagctgtggcgggtcatcgtacacaaggtgaagctcaacgtgtcgcccggcacgtcgttccactgcaacgagcccggctggttccgcgtctgccacgctaacatggacgacgagaccatggaggtcgcgctcgacaggatccgccgcttcgtgcgccagcaccagcacaaggccaaggccgagcgctgggcggccacgcggcccatgcgcctcagcttgccgcgccggggaggcgccaccgcttcgcacctccccatctccagccccatggcgttgctgtcgccgcagtccccgatggttcacgccagctagtcaccgagcatccggcaagactggctgtagggtgtgcccgtacatccgtacgtacacctttttttcccattcacgtgactgcaatcaagtctatgggatggttgacaaaagactatctagacaagagtgggcgtagtacgtaactagtttgacgttgtacaggcgtcagcaggtatcggtaagcagctagtcaaaagcacgcaagcaggacgcatttgtcctcgatactttcgtgtaaatctctctctatttttttttgcgaaattcgcgtgtatggtttgttttgacgttggtataaagtatggtagaataacgatgggaaatggcaatttagtcctcccgatcaattgttattgtaaaccactgacgaaagttaagaacagaagctgtaccagaagggtgaataaaaataccacataggtattgaattaataatcta

SEQ ID NO: 102180 - DNA, 1042 bp, Zea Mays
aactgaagcagccgtcgatcgtcgtcggcagactaacgtgggataccggatagcgatagacagaccgccaggcaccaccgcaccacacaccactcgtccggtcgtccctgactcaggccactgacaacgaccaccggaatccgcatgctggcgctgatgaccacctcttccgcgttctccgcccctctcctttcgttccggccgccgcctcgcctccccattaaccgcctgcgcctccacccccgccgtcacgctctgttccgctgcgacgcggtgtccgagattgccccggccgcctcagccgcctacggcgtcctcctcctgggcggcggcgccttcgcatatgcaaggtcggggagtaaaggctccatctacggggggctggctggagctgcgctcatgggcgctgcctattatctgatgcagtcgcctgagacgatggcagcaggtgatgctgttggatttggatctgcctttctatttgcctgcgtgtttggtatcaggttgtataacagccggaagctggtgccatctggccttcttctagccctttctcttggtgccttgggcgtcttttactctgcttacctgcaagacaaggtgtaagccaatttgattcagtagctgaagagtgcgtatcatctgaagcttccttgaaggcttgctctgttgggttgtagtcgtagatgtagaactttggatactgtcggtgcaccttcctttcgttgcagttgtaacagagagcatctagtgttattggtttgccaatgataatgatgttcaagcttttcagtggccagtgtgctgattgcatcgttttacgtgggccgagtgttggcggatgaatgaatagggccggcctgttgttgcctaggacgatcgtcggtgcagagtacaagaacgttttgttggcttgctatttccacgggcagctcgacagggtacatgtacatatattttgttggcgttggactgttggaggatggacatgaatcccgcaacgactatcatgtgcactggtctatatatttggcagtcagaa

SEQ ID NO: 102181 - DNA, 1232 bp, Zea Mays
ggcggagtcgtcgtcctggtggcgacgacgggctctcggtggccgcgggccgtcttggcggagaacgcctcgtcccagatctcggtgaaggcccggaggatggcgtcgtggtggtgcggcgcgttcagcgcgaggaagtggcggagcaggtcgcggagctcgtcgcacgtcgcgatccggttctccacgatcatgttcaccatggagcgccggaagtcgctcagcgggtcgtcggactgcttcaccacggccacggccacgctcccgtcgagcctcgcggggccggggccagtgccggcgccggcgtcgcagcttcttgctttccggtggttcggggcctgcggtgccggggaaacgttggcggcttctttcttgcagcctttgtcgtccgtgctcttcaccttgagctgctccggcggtactgacaatgatggaggtggtggtggcggcggcggcggcggttgcttggagtggaccacttcaacttgtcttgctgctttgtccttgtccatgctctttgacttccggtgctgctgcgtagtctggaactggaaaggacgcagcgcctgcggcggcggagagaagttgccgtgaccttctttgctgtcgccgccaccgctgtgcacagctcgttgcttcgctgatgaccgcgctggtaacggcggcggcggaggcggcgacaagtaatccttgctggcgctcttccgcccccacgacacgacgctctgctcgagctcgttgagctggcgcagcaggccggagaagctcgtcgtggccgccgagctctccctcttgcagtccacctcctcgccatcgccctcggcgtccatgtcctcccacgggaaggacgacgacgacgcggagggcacggtgagcgtgcccgtggacccggacgccgacgacgggtgcgtcgtcgtcctcgccctgcgccacgtcgcggtcgtcgccgtcgatgtcgtcgtctccgtggcgctggtggcggcagagtagggtgacacggacgacgatgccaccgccaccgccacggccttggcgtccctgcagccgcacccgagcgcgaaccccccgccggcgacggcgccaacgccgagacgcttcttggcagtaccggcgccggggctcatccctagcactctcgcggcgtagaagagtgtacgtgtgcgctcgtgtcgcgctcgcggctcacaggagtcttggacggtggccaccggccgtctggaccttatatgctg

SEQ ID NO: 102182 - DNA, 761 bp, Zea Mays
ggaaaaaaaatatttgtttggtgagccacgctcccgtccggatccgcgggggaggacggcgatttcgtccccagcctcacgaggtcgggaaggggttcccgcacccacatttgtgaacctcgccgccgcccgtcccctgccttcacgaacccgtcgccgcccgtcccctactcttcctcgtgcacccaccgtcgctcgtcccctcgtcttccttgcgctctcgccgtcgccgcctcctcaccctcacgcacttgaggccagctgcggaacgaggtcggacggcggagacgaggtcgaggtctgtgacctcctcaacttgcgcaagactgccgagactgcagggacaagctctttgctgcctcgtcagctgcttctcggatactaacaaatgggttctataattgagttgataaggaaacatttgaagcagttcagtaatgtcttctctttattacagatgtgctgatccaattcagttttcagggtgatacacaagggattttcatcaacaagtggccgccagaagaactgaaacatcaagatggcgtttgcttttaggtcatgccattcaggagtacactgagactgttttattatgagactatgttttattatgatgcactgagactatgtttgtgtacactgagactatgttttattatgatgcactgagactgttttattaagcagtgtggagttctcagctgctgttctcatttttaatgcaagtgtgttcaatgagcagtgttcaatgacaaaca

SEQ ID NO: 102183 - DNA, 734 bp, Zea Mays
ggaaaaaaaatatttgtttggtgagccacgctcccgtccggatccgcgggggaggacggcgatttcgtccccagcctcacgaggtcgggaaggggttcccgcacccacatttgtgaacctcgccgccgcccgtcccctgccttcacgaacccgtcgccgcccgtcccctactcttcctcgtgcacccaccgtcgctcgtcccctcgtcttccttgcgctctcgccgtcgccgcctcctcaccctcacgcacttgaggccagctgcggaacgaggtcggacggcggagacgaggtcgaggtctgtgacctcctcaacttgcgcaagactgccgagactgcagggacaagctctttgctgcctcgtcagctgcttctcggatactaacaaatgggttctataattgagttgataaggaaacatttgaagcagatgtgctgatccaattcagttttcagggtgatacacaagggattttcatcaacaagtggccgccagaagaactgaaacatcaagatggcgtttgcttttaggtcatgccattcaggagtacactgagactgttttattatgagactatgttttattatgatgcactgagactatgtttgtgtacactgagactatgttttattatgatgcactgagactgttttattaagcagtgtggagttctcagctgctgttctcatttttaatgcaagtgtgttcaatgagcagtgttcaatgacaaaca

SEQ ID NO: 102184 - DNA, 707 bp, Zea Mays
ggaaaaaaaatatttgtttggtgagccacgctcccgtccggatccgcgggggaggacggcgatttcgtccccagcctcacgaggtcgggaaggggttcccgcacccacatttgtgaacctcgccgccgcccgtcccctgccttcacgaacccgtcgccgcccgtcccctactcttcctcgtgcacccaccgtcgctcgtcccctcgtcttccttgcgctctcgccgtcgccgcctcctcaccctcacgcacttgaggccagctgcggaacgaggtcggacggcggagacgaggtcgaggtctgtgacctcctcaacttgcgcaagactgccgagactgcagggacaagctctttgctgcctcgtcagctgcttctcggatactaacaaatgggttctataattgagttgataaggaaacatttgaagcaggtgatacacaagggattttcatcaacaagtggccgccagaagaactgaaacatcaagatggcgtttgcttttaggtcatgccattcaggagtacactgagactgttttattatgagactatgttttattatgatgcactgagactatgtttgtgtacactgagactatgttttattatgatgcactgagactgttttattaagcagtgtggagttctcagctgctgttctcatttttaatgcaagtgtgttcaatgagcagtgttcaatgacaaaca

SEQ ID NO: 102185 - DNA, 680 bp, Zea Mays
ggaaaaaaaatatttgtttggtgagccacgctcccgtccggatccgcgggggaggacggcgatttcgtccccagcctcacgaggtcgggaaggggttcccgcacccacatttgtgaacctcgccgccgcccgtcccctgccttcacgaacccgtcgccgcccgtcccctactcttcctcgtgcacccaccgtcgctcgtcccctcgtcttccttgcgctctcgccgtcgccgcctcctcaccctcacgcacttgaggccagctgcggaacgaggtcggacggcggagacgaggtcgaggtctgtgacctcctcaacttgcgcaagactgccgagactgcagggacaagctctttgctgcctcgtcagctgcttctcatgtgctgatccaattcagttttcagggtgatacacaagggattttcatcaacaagtggccgccagaagaactgaaacatcaagatggcgtttgcttttaggtcatgccattcaggagtacactgagactgttttattatgagactatgttttattatgatgcactgagactatgtttgtgtacactgagactatgttttattatgatgcactgagactgttttattaagcagtgtggagttctcagctgctgttctcatttttaatgcaagtgtgttcaatgagcagtgttcaatgacaaaca

SEQ ID NO: 102186 - DNA, 653 bp, Zea Mays
ggaaaaaaaatatttgtttggtgagccacgctcccgtccggatccgcgggggaggacggcgatttcgtccccagcctcacgaggtcgggaaggggttcccgcacccacatttgtgaacctcgccgccgcccgtcccctgccttcacgaacccgtcgccgcccgtcccctactcttcctcgtgcacccaccgtcgctcgtcccctcgtcttccttgcgctctcgccgtcgccgcctcctcaccctcacgcacttgaggccagctgcggaacgaggtcggacggcggagacgaggtcgaggtctgtgacctcctcaacttgcgcaagactgccgagactgcagggacaagctctttgctgcctcgtcagctgcttctcgtgatacacaagggattttcatcaacaagtggccgccagaagaactgaaacatcaagatggcgtttgcttttaggtcatgccattcaggagtacactgagactgttttattatgagactatgttttattatgatgcactgagactatgtttgtgtacactgagactatgttttattatgatgcactgagactgttttattaagcagtgtggagttctcagctgctgttctcatttttaatgcaagtgtgttcaatgagcagtgttcaatgacaaaca

SEQ ID NO: 102187 - DNA, 1908 bp, Zea Mays
ggaaaaaaaatatttgtttggtgagccacgctcccgtccggatccgcgggggaggacggcgatttcgtccccagcctcacgaggtcgggaaggggttcccgcacccacatttgtgaacctcgccgccgcccgtcccctgccttcacgaacccgtcgccgcccgtcccctactcttcctcgtgcacccaccgtcgctcgtcccctcgtcttccttgcgctctcgccgtcgccgcctcctcaccctcacgcacttgaggccagctgcggaacgaggtcggacggcggagacgaggtcgaggtctgtgacctcctcaacttgcgcaagactgccgagactgcagggacaagctctttgctgcctcgtcagctgcttctcgtgagtactccttttttctttcattcttgccttcgcatccaccacccgcgccttgctgtagcttagtcgtacggcatagtttgctgtatgaacaccagaagaagaaggtcgtgaacagcaacacgtacaccttcacggccaccatcttccatatatgctggtttgagtggaaaggatgattaatttggacggttgctatgctagcttgggactgagagatgaatgtcgaatgcttgctactgatggaattaactagtttgatatttgtagcaaggccgaggagctagcaatgtaagtagggtagaacgttgagctacctgtgaagttctagtctgaatctcaagaacttcttttgcctttgtttgcaggcttgtagtatgtgaatatcttatttgacaaagtaattctctgaacttttttactgcataaggcctgaattttgactaggacgtattttttttatttttagttggaccactttttatatttaggcctgaacaaagtatttatctggatcttatatggttagttcattcatttatttagtgttgctgtactgtccctacatgtttccttaatatgggattctacatactcagccatgtacacacttgtcatatttctcaaacatgttcttttgttttagggatactaacaaatgggttctataattgagttgataaggaaacatttgaagcaggtagttatatataagcactcaatttctacaacattttttacttgcttcaatctgctatttcagttttttttgctagtaaaatctgctatttagttacctctattatttaattgcttaaatctgctatttcaattttgtttctagtaaaatctgccgctatttgagttcagctatttatgtttacataagcaagtgcttcataaacatctaaatccacacctttgttccagttcagtaatgtcttctctttattacagatgtgctgatccaattcagttttcagggtatgttgacaatctgaatttagttcaagcaataccttctctttattacatatgtttaagcaggtgcttcataaacatatgaattcagttcatcaatgtcttctttttattactgaatattgaattgaatataaaggctttcatgtccccaaatacagagggtctccaaattggatattgaactgaatatagaggaattgaatatatatacatttgtctaagttttctcatcaacaggtgatacacaagggattttcatcaacaagtggccgccagaagaactgaaacatcaagatggcgtttgcttttaggtcatgccattcaggagtacactgagactgttttattatgagactatgttttattatgatgcactgagactatgtttgtgtacactgagactatgttttattatgatgcactgagactgttttattaagcagtgtggagttctcagctgctgttctcatttttaatgcaagtgtgttcaatgagcagtgttcaatgacaaacagtgttctcagctgctgctcatttttatgcaaaca

SEQ ID NO: 102188 - DNA, 1158 bp, Zea Mays
cgctcggcgcccatcgaaaaaccctctcctctcccggacaggcggacagcggcaagctggccaccgcgtcaccgcctctacagccccaggctccactgctaaacgccggtaatggcccaggctccggcgcgcgccgcttccgccgtacgtctcttcgacgcgcactgccacctgcaagacccccgcatcgcggccgtcgcccctgcccttatacgagccgccggcgcatccggcgtcgcacgcttcgctgtcaacggcacctccgagaaggactggcacctggtgaagcagatggccgaggatcacccagccgtcgtcccctgcttcggcctgcacccttggtgggtacccgagaggtcgccggattggatgaatttgctccggcggttcttcgccgaaaccccggaggcggctgttggggagattggtctggacaaaggttcacatggaaaaaccatcaacttcggagaacaggttgaagtgttccagcgacagctcgaactagctaaggaattggagagacctgtttctgttcattgtgtgcgggcatttggtgatcttctggaagtattgaagcaaactggacctttcccagcaggcgtgttgttacattcttatatgggatctgcagaaatggtgtctgcccttgcaaatttaggctgttacttttcactatctggcttcttgacaggcatgaaatccactaaagctaagcacatgctgaagtcgattcccctggataggattcttttagagacagatgcacctgatgcattaccaagattggacaatgtttctgtatcaccagtccatgttcacagttcagatgcagatactgaaaagcgtcacatggattcagagtcacaggctgctaatgcatcaaatgagtccttgaaccatccagaaaatatccatattgttttggagtatgtcgcatcactccttgaaatgacagagtcagaattggcggagttgagttacaagaatgctaccaagctgttttcttatcctggctccaaagttcaacatgaacctgaagacatctaaatcgggttcaacactaccttactcactgggtcctcccagacacaatgtttgagaaactgaaatggctgtacatcactgttaatattggtgaaataaaacagataccgaatc

SEQ ID NO: 102189 - DNA, 1393 bp, Zea Mays
tctcctctcccggacaggcggacagcggcaagctggccaccgcgtcaccgcctctacagccccaggctccactgctaaacgccggtaatggcccaggctccggcgcgcgccgcttccgccgtacgtctcttcgacgcgcactgccacctgcaagacccccgcatcgcggccgtcgcccctgcccttatacgagccgccggcgcatccggcgtcgcacgcttcgctgtcaacggcacctccgagaaggactggcacctggtgaagcagatggccgaggatcacccagccgtcgtcccctgcttcggcctgcacccttggtgagagttgaggttcccctgcttgcctctcgcgttgctctgctgattgtgtcctaaggtcccatcactttggtaggtgggtacccgagaggtcgccggattggatgaatttgctccggcggttcttcgccgaaaccccggaggcggctgttggggagattggtctggacaaaggttcacatggaaaaaccatcaacttcggagaacaggttgaagtgttccagcgacagctcgaactagctaaggaattggagagacctgtttctgttcattgtgtgcgggcatttggtgatcttctggaagtattgaagcaaactggacctttcccagcaggcgtgttgttacattcttatatgggatctgcagaaatggtgtctgcccttgcaaatttaggctgttacttttcactatctggcttcttgacaggcatgaaatccactaaagctaagcacatgctgaagtcgattcccctggataggattcttttagagacagatgcacctgatgcattaccaagattggacaatgtttctgtatcaccagtccatgttcacagttcagatgcagatactgaaaagcgtcacatggattcagagtcacaggctgctaatgcatcaaatgagtccttgaaccatccagaaaatatccatattgttttggagtatgtcgcatcactccttgaaatgacagagtcagaattggcggagttgagttacaagaatgctaccaagctgttttcttatcctggctccaaagttcaacatgaacctgaagacatctaaatcgggttcaacactaccttactcactgagttgacttgcatccctacaggctacggtctacagggatgggctggttctggttgtaacgaaacagagcgagaggagggacatagggcctgtttgttcagcttttttgtgaccagcttttccaagaatctagctgtagggagaatctggctgtgtagagaatctgagtatcattaggattacgtgcggaggaagataaagttgtccatgaggctcagatgtataaagcgacggattactactattgcgatgattcaactgattata

SEQ ID NO: 102190 - DNA, 1297 bp, Zea Mays
cggacagcggcaagctggccaccgcgtcaccgcctctacagccccaggctccactgctaaacgccggtaatggcccaggctccggcgcgcgccgcttccgccgtacgtctcttcgacgcgcactgccacctgcaagacccccgcatcgcggccgtcgcccctgcccttatacgagccgccggcgcatccggcgtcgcacgcttcgctgtcaacggcacctccgagaaggactggcacctggtgaagcagatggccgaggatcacccagccgtcgtcccctgcttcggcctgcacccttggtgggtacccgagaggtcgccggattggatgaatttgctccggcggttcttcgccgaaaccccggaggcggctgttggggagattggtctggacaaaggttcacatggaaaaaccatcaacttcggagaacaggttgaagtgttccagcgacagctcgaactagctaaggaattggagagacctgtttctgttcattgtgtgcgggcatttggtgatcttctggaagtattgaagcaaactggacctttcccagcaggcgtgttgttacattcttatatgggatctgcagaaatggtgtctgcccttgcaaatttaggctgttacttttcactatctggcttcttgacaggcatgaaatccactaaagctaagcacatgctgaagtcgattcccctggataggattcttttagagacagatgcacctgatgcattaccaagattggacaatgtttctgtatcaccagtccatgttcacagttcagatgcagatactgaaaagcgtcacatggattcagagtcacaggctgctaatgcatcaaatgagtccttgaaccatccagaaaatatccatattgttttggagtatgtcgcatcactccttgaaatgacagagtcagaattggcggagttgagttacaagaatgctaccaagctgttttcttatcctggctccaaagttcaacatgaacctgaagacatctaaatcgggttcaacactaccttactcactggtcagcaaatctgaaacctgttctttttagttttgactcctggtttttctcctcttcttaatgctgtttgtgtaccggattgtagggtcctcccagacacaatgtttgagaaactgaaatggctgtacatcactgttaatattggtgaaataaaacagataccgaatcaaagtagtgcaactggtttccttaaaaaaaaagtctctgattttttgtttgacgagaagtacagcactagttagcaacaagacatccaaatcagtg

SEQ ID NO: 102191 - DNA, 553 bp, Zea Mays
aaaaaagcagtacgggcaggcagcagcaagctaagctgacgcgtacacgccagcatcgggcggtggcgcggcctggcggccgcacgggccggagccgaggagggagagccaggccaggacgggcgtgccgaggaggacgagccccgcgggcaccatccagagccgcgcgttcgccgggtggaacgccagcgcccaccacaccagcagcgccgcgccaccgagccccaccgcgacgagccccgcggccgcggcggacagccacgacgaccacggcgcagaccgccgcgggcagccggccccctccttggctgcggctgcggggtggtggtccggcttcgcaggccccgcggcctccatggtggagctgcagcggctgctagtggagagccgacacgcggccggccgggtccaggctgtgtattgcgtgcatatatagccggccccgcgcgttacaccggcggcgggcatgccgctggtcgtcgagtcgtcctgcatatatacgtgcactgcttttgcagttttgctcacttctgtttcaattttgtttggcccg

SEQ ID NO: 102192 - DNA, 836 bp, Zea Mays
ctaccgaattgaatctgacaggcggcagtgccggccgtgggccgacgggagatcaggagctccagcagcacgatgccgaagctgtacacgtcgccttccctcgtggcctgcccggccgcggccgcgtcgggggcgacgtacccgagcgagcccacgggtgtcgcagctgatgtcgacgcggcggcggctgccgcggcggcacccgcggtcaccaccatcggctccaggccgaagtccgacaggtgcggctcgaagtcggcgtcgaagaggatgttctgcggcttcacgtcgccgtgcacgacgccggactgatgcaggaacgcaaggccgcgcgagacgcccagcgcgatgaggtgcctcattggccagttgaggatgtgcccgtcctggtgcgacgcttcctgcagcaacgtggcgaggttgccgttgggcatgtagtcgtagaccagcagccggacatccggcggaggaccggcgtagtagccacggagcacagtcaggttcctgtgcttcaccttcccgagagactcggcctctttcctgaacgacccttcatcaatcaccacggcaccatccgcagacgtggacgggagccgcagaatcgccagcacggtgccgtcactgtaacaagccttgaacacgaggccatggcggcctcggctgagcacgttctcctcgtcaaactggcgggttgcctcaacagtgtcggcataagtgatccttgagttgaacataatcagcttcggctggctgacaccgttctccgtgcttgtgccactcgacccactgccgcgtcccgggctgcgtctcctcttcttcacaccatcacggctctc

SEQ ID NO: 102193 - DNA, 990 bp, Zea Mays
ggaagacgcttttattttttttattctaggatttcagaaacctgactacaaaagccagaggtaaaaccattgttaaactaaaacactctgatagatagaacttgctaagcacataacacaccgcctgagacactttgggcacacacttagtttgtacagtacctaactgacaccaaccacaatcagagcttagacctaaagcaacccatctcatgcggaggccttccgtgccttcttggaggcaggggacttcacggtcttcggcttggccttggccttggcggcgggggacttcttcggcttcgccacgaccttcttctcgggcactttgcgcttggtcccagcagcagcggccttctttggcttggcagccgctgccttctttgacttggcggcggcggccttggccggcttgggggcggtggtcttggcagcggcggcctttgccggcttagccttggtcttgggggatgccttcttggcggcgtccgagagcttgtacgaagccttgaccttcacgagcttgcccttggctgcggacccacggagctggatggaaagcatcttcttgaagttggccggcagagacgcgccgtgcttgtcccccacatacttggcgatcgcttgcgagctggagccggtcctctccttgagcgccgtgatagcctccttgatcatctgaacgacgaaacatgagattccatcaacaccaattccgacggaaaccaatatcaatcaataaaaaccgaacgcaggtcgacaaggctcacctcgaagtaaggcgggtgggaggcaccagcggtggccgccttcggcttggcggcggcaggcttcggcttcggagccgcggcgggcttggcggtgcgggaggcgggcttggcgagggcaggcattgtgactagtgggatcacgagtggcagagagggctctagaaactgcagcggtgtacgctaccttgatttcggagagggagatgcgactggatagatt

SEQ ID NO: 102194 - DNA, 1265 bp, Zea Mays
aaccctgcttctcgagaacaggtcgttttcactctgcgtctccgcatcaaaacccttagctgcctcgcaattttttttcccgttcaccggagaaagaatggcgctgccgacagctaacccgggcttccgtctcggctgccaggagtctcccgcgatgggattgaggtcggcgccgcggttggcactgcgtcgtcccggcgcggtctccgggcacaggacattaactggtgatatcacaagtctcagactaatcactgcagtgaaaacaccttatttgccagatggaagattcgatcttgaagcatatgattctttgataaacatgcagatagagggtggttctgaaggcgtaattgttggtggaacaacaggagagggtcacctaatgagctgggatgaacacattatgcttattgggcataccgttaactgctttggcactagaattaaagtgataggcaacacaggaagtaattctaccagagaggctgttcacgcaacagagcagggatttgctgttggcatgcatgcagctctccacatcaacccctactatgggaaggtatcaactgaaggattgatctctcattttgaggctgttctgccgatgggtccaaccatcatttacaatgtgccatccaggagtggccaggatattcctcctcaagttatcgagacactctcaggttatccaaacatggcaggagtgaaagaatgtgtcggacatgagagggtcaagtgctacaccgacaaaggtataacagtatggagcggtaatgatgatgagtgccatgattctaggtggaaatatggcgccactggagttatttctgtagcaagcaaccttgttcctggcctcatgcgtagtctcatgtatgaaggggagaatgcgttgctaaatgagaagctgttgcctctgacgaaatggttgttctgtctgccgaatcccatcgcactcaacactgctctggctcagcttggggtggcaaggcctgttttcaggttgccgtatgttcctcttcctcttgagaagaggattgagtttgtccggatagttgaagctattggacggggaaactttgtaggacagcaagaggcacgtgttctcgacgatgatgattttgttttgatcagtaggtattagtaagcgagcttgtttactttggtgaataaaatataatagcatcatgttatgaggatttttcagtcttttgtaaagaaataaaacagctaatcctgattttgcttacagtttcctgtagatc

SEQ ID NO: 102195 - DNA, 1352 bp, Zea Mays
aaccctgcttctcgagaacaggtcgttttcactctgcgtctccgcatcaaaacccttagctgcctcgcaattttttttcccgttcaccggagaaagaatggcgctgccgacagctaacccgggcttccgtctcggctgccaggagtctcccgcgatgggattgaggtcggcgccgcggttggcactgcgtcgtcccggcgcggtctccgggcacaggagtaggactggcagagggaagtttccagtagcatccacaagtctagatgactatcttccaatgcgaagcactgaagtgaaaaatcggacattaactggtgatatcacaagtctcagactaatcactgcagtgaaaacaccttatttgccagatggaagattcgatcttgaagcatatgattctttgataaacatgcagatagagggtggttctgaaggcgtaattgttggtggaacaacaggagagggtcacctaatgagctgggatgaacacattatgcttattgggcataccgttaactgctttggcactagaattaaagtgataggcaacacaggaagtaattctaccagagaggctgttcacgcaacagagcagggatttgctgttggcatgcatgcagctctccacatcaacccctactatgggaaggtatcaactgaaggattgatctctcattttgaggctgttctgccgatgggtccaaccatcatttacaatgtgccatccaggagtggccaggatattcctcctcaagttatcgagacactctcaggttatccaaacatggcaggagtgaaagaatgtgtcggacatgagagggtcaagtgctacaccgacaaaggtataacagtatggagcggtaatgatgatgagtgccatgattctaggtggaaatatggcgccactggagttatttctgtagcaagcaaccttgttcctggcctcatgcgtagtctcatgtatgaaggggagaatgcgttgctaaatgagaagctgttgcctctgacgaaatggttgttctgtctgccgaatcccatcgcactcaacactgctctggctcagcttggggtggcaaggcctgttttcaggttgccgtatgttcctcttcctcttgagaagaggattgagtttgtccggatagttgaagctattggacggggaaactttgtaggacagcaagaggcacgtgttctcgacgatgatgattttgttttgatcagtaggtattagtaagcgagcttgtttactttggtgaataaaatataatagcatcatgttatgaggatttttcagtcttttgtaaagaaataaaacagctaatcctgattttgcttacagtttcctgtagatc

SEQ ID NO: 102196 - DNA, 2066 bp, Zea Mays
tcctcgtgctccactccatgccatcccagcacgcgcgtcaccccaaccccacccccaccacaccgccacagaaaatcatcacagcaatcgaagcaccagcacttgcagtgacccacagggccacactacactactgtcacccgcgcttcaaccccggaacctaacccatggtcaaaaactaacccggcaacccccaacggcccaacccaacgtttgaagataccactacgccagaacccacgcgtccacggccacggtcacgcataaacaccgcttaaacccctcgtcggttccccgtactcattccccacgctcgccttccttcctctcgcgtgtgcgccgtgttcccctccttaccccagaccccagcagcgggccgcggcactgcccgccaccacagcgccatggccgcctcccaccgcctaatcctgctagtcctctgcctcaccgccaccgcggcgtccgcccacaacatcacggccatcctggacgggcgctccgagtacacgctgtacaacagctacctctcggagaccaaggtgtgcgacgagatcaatagccggagctcggtcaccgtcctcgtcctcaccaacggcgccatgtcctccctcgtcgccaacctctccctcgccgacatcaagaacgcactccgcctcctcaccctcctcgactacttcgacgagaagaagctgcactccatcggctccagctctcagctcaccacctcgctctaccagaccaccggccaggccgcgggcgacatgggccacgtcaacatcaccgacctacgcggaggcaaggtcgccttcgcgtccgccgcgcccggcgccaagttccagtccacctacaccaagcgcgtcgccgacttcccgtccaacctctccgtcctcgaggtatccgaccccatcaccttccccggcctcttcggcgccccgtcggcgtcgtccgccaacatcacggacctcctcgagaaggccgggtgcaagcagttcgcgcgcctcatcgtgtcgtccggggtggtcaagacgtaccaggccgccatggacaaggcgctcaccctgttcgcgcccaacgacgacgcgttcaaggccaaggacctgcccgatctgagcaagctcaccagcgccgacctcgtcgcgctgttgcagtaccacgcgctgccgcagtacgcgcccaaggcgtcgctcaaggtcgccagcggccgcatcccgaccctcgcctccaccgccgcggggaagtacgacctcgccgtcgcctccagcggcgacgaagtgacgctggacaccggcgtggacaagtcccgcatcgcgtccaccgtgctcgacgacccccccacggtcatcctcacggtcgacagcgtgctgctcccgcacgtgctctttggcggcgcgccgtccccggcgccggcgcccggaccggccgccgacgtgcccgcgtcggccccggctcccgaaggctccgcaccggcgcccgcccccaaggccgccggcaagaggaagaagaagaaggccaggtccccttcgcactccccgcccgcgcccccggcggactcgcccgacatggcccccgccgacgcgccaacggaggacgccgcggacaaggtcgaatctaaaaagaacggcggcgccgcagcggccgtgagcttcgcggcctcggtggcctctgtcgcccttgccgtcgcgtaccttttgtgagcgagagcggcaggcggtcgacgccgagcccccgtagctctctcctagactctgcgcgtgcggcgtgcatgtcgtgacgcgatgaaatctgttgttgttactcgtaagttctcgtgggctccgttgatgatttgattatggtcacctgatgtttgttcttcctcgtggttggttagttggtttgttggggggaattctaggatttggtcctccagtcctcctcaggtggagacggtgattgtgacggactgttttagtagtgttagagctcgaaggtgtcattcgatgttgatttgttcttgctcttacagagttgtgcttttcctccagcttcattttacctaccatccgtgactgcatttcacatggatc

SEQ ID NO: 102197 - DNA, 4021 bp, Zea Mays
agcccattcgtgacgctaaaaaggcctagcccacccggctatcagccgcgtattcgcatctccccgtatcgctcgttcctctccggcaggactcgtgtttcagccaccggcggcggcggcaccctccacacctccggttatcatcaatctctgcgccgactaaggcactggcagcctgcggcttgcgtggcggcacctccagcatcccagggttgatgcaaatccagcatcatccttcaagatcgccccccactttgtccggtctttagatccgccattgagtcaagctgcggcgatcgcgtgcgagactgggacggcgatgctcctctgcatctccacctgccctgtcgaccgctagccgccgcctgtttcctccaattgctaagggcttaaaaagtcgaacacccaattgccaagggcttctgccccccagcggtgaaggggagtgagaagcaccgggaagatgacgagcgtgtacatcccggtgcaggggacagaggaggaggtgcaggtggcgctggaccagcttccgcacgacgcatccgatatcctcgacatcctcaaagccgaacaggcccctcttcacctctggctcatcatcgccagagaatacttcaagcaaggaaagatagagcagttccgtcagattctggaggaaggatctggccctgaaattgacgagtattatgctgatgtgaagtatgaacggatagcaatccttactgctttgggtgctttccatactttcttgggaaaggttgatagagcaccacagaaggaatcacattttaaagatgcaactcaatactataatagggcatcaaggatagatgaaactgaaccttctacatggattggaagaggtcaactctgtattgccaagggtgagttgcaaatggcgtctgactcgttcaagattgtgttggatgaagatgagaacaattttccagctctacttggtcaggcctctgtttactttttgatgggcgaagcagagcagcaacacaaaaaatcattggagcattacaggaactcattagatctctacaagaaagctcttcgggtctattgcaattgtcctgctgctgtaaggcttggtatagccttttgccgatacaaacttggacaagtggaaaaagctcgtcaagcttttcagcgagttttagagttggaccctcagaatgttgatgctctagtagcactggcaatcatggacttgcaaacaaatgaagctggtgggattcggcggggaatggagaaaatgaaaaaagcatttgaaatctatccttattatacattggcactcaaccaccttgcgaatcattatttctttaccggccaacattttgttgttgaacaattgactgagacggctctttcttcaagcaaccatggactactgaaatcacatgcttactacaacttagccagatcataccacagtaagggggacattgagactgctggacgatattacatggcatctgttaatgaaatcagtaaaccacaagactttgtgttaccatatattggacttggtcaaattcagttaaaatttggagacttcaaaagttcattaggtagctttgagaaagttttggaggtgcaccctgaaaattgtgaaagtttgaaggctattggtcacatacatgcaaaatctggggaaactgaaaaagctatagaaaccttcaagaaagttacccgtattgacccaaaagatcatcaggcatttgtggagcttggtgaattgttggtagaatctgactgggctgctgctatggaatacttgaagacagctcgaaatctcctcaagaaggctggggaggctgtccctgttgagttgctcaatggaattggacttcttcattttgagaagggagagtttgagatggcagaacagagttttaaggaagcactaggtgatggtctttgggtttcaattatggacgggaaagtaggcagttctatgatcaactggagtgtccagaacaaggatcagagcttctttcaccaacttgaaggtgtacctcttgaattacattcaaataaagtaaccacactgtttaattatgcaagattactggaagaactccatgattctgtcagagcaagcatcttttaccgttttataattttcaagtaccctgactacatagatgcctatctgaggttagcggctattgcaaaacaaagaaacaatgttcaactgagcattgaactgataggtgatgctttaaagatagacgagaagaacccaaatgcactgtctatgcttgggagtcttgaactccagagcgatgaagcctggcttaccgcaaaggagcatttccgtaatgcaaaagaggccaccaagggagatacctactctttgcttcaattggggaactggaattactttgctgccaatcgtcctgagaaaaaagccccgaagattgaggctactcatagggagaaagccatggaactctatcagactcaagtactaaagcagcaccgcagtaatatgtttgctgcaaatggtattggaatcttatacgctgagaaggccaaatgggatgtcgctaaggagttgttcacacaggtgcatgaagctgcatcaggaagtatatttgtacacatgcctgatgtatggataaatctggctcatacatattttgctcaaggtcattttcaacaagcagttaaattgtatcaaaattgtttgcggaagttcttccacaatacagatgcaaccatcctattataccttgctcggacacactatgaggctgagcgatggcaagactgcaggaaaactttgcttagagctatacatttggctccatcaaattacttgttacggtttaatgtaggagtgtcaatgcagaaattctcagcttcaaccctgcaaaagacaaaacaaacagttgatgaggttcgcgccacagtcactgaacttcagaatgccattagagttttcagtctgttatctgttgcatcaacgtaccactcccatggttttgatgagaggaaaatagaaactcatgttgagtactgtaaacatttacttgatgctgctaaggttcatcgtgatgcagctgagcaagctgaacagcagaataagcaaaaaatggaagttgctcgtcagattgctttggcagaggaagctcgccgaagggcagaagagcagagaaaatttcagttagaaaggaggagggaagaggatgaactcaagcaagtaaaacaacaggaggaacacttccagcgtgtgaaggaacaatggaaaacatccagcaacacccctggcaagagaaaagatagatctaagactgaagatgaagaggtgggaaataaaaagcggaggaggaagggaattaggaggaaggatcaaaaaacaaagatgcagtatggggaagaggaagatgagtacaaagatgaaccagaagcagatgatgactatgcagacctggcgaggtataatggcgctgacaattcagagagagccccagatcaccttcttgcggctgctggccttgacgattctgatgccgaagatgacatgggtcatcctcaatctgcaatagaacggaagagacgagcttggtcagaatctgaagacgatgagccagtgaagaagccagcagcacaacctagcccgggcgctgatggtttgagtgaatgaaagaaaccgagatgatgttcttgcagtgaagattaacatgcatgggtctttgctttaggttagcatggtgttgaattggggagattcagaacttcactatacatagctgatagtcaaggactatgtatataccttgttgccaatcttgtttatcgcattagattatggagttgtttaatctgctggtttctgcaatataacatggaatccagtcctattagatggtgacttgtaggtgttttagttgggatgcaaagttttgcacgtcaagtttcagcagttagatttcccaatggacgtatcatgaattaatgatatcacattggccgatatatgtagagaaatgttgaacatgctagt

SEQ ID NO: 102198 - DNA, 3093 bp, Zea Mays
tttttttaattttctggacaacataataaatataccattatttattgataatttttatttgtaaaattctaatttaattttcaaatttgctgtcacaggcctctgtttactttttgatgggcgaagcagagcagcaacacaaaaaatcattggagcattacaggaactcattagatctctacaagaaagctcttcgggtctattgcaattgtcctgctgctgtaaggcttggtatagccttttgccgatacaaacttggacaagtggaaaaagctcgtcaagcttttcagcgagttttagagttggaccctcagaatgttgatgctctagtagcactggcaatcatggacttgcaaacaaatgaagctggtgggattcggcggggaatggagaaaatgaaaaaagcatttgaaatctatccttattatacattggcactcaaccaccttgcgaatcattatttctttaccggccaacattttgttgttgaacaattgactgagacggctctttcttcaagcaaccatggactactgaaatcacatgcttactacaacttagccagatcataccacagtaagggggacattgagactgctggacgatattacatggcatctgttaatgaaatcagtaaaccacaagactttgtgttaccatatattggacttggtcaaattcagttaaaatttggagacttcaaaagttcattaggtagctttgagaaagttttggaggtgcaccctgaaaattgtgaaagtttgaaggctattggtcacatacatgcaaaatctggggaaactgaaaaagctatagaaaccttcaagaaagttacccgtattgacccaaaagatcatcaggcatttgtggagcttggtgaattgttggtagaatctgactgggctgctgctatggaatacttgaagacagctcgaaatctcctcaagaaggctggggaggctgtccctgttgagttgctcaatggaattggacttcttcattttgagaagggagagtttgagatggcagaacagagttttaaggaagcactaggtgatggtctttgggtttcaattatggacgggaaagtaggcagttctatgatcaactggagtgtccagaacaaggatcagagcttctttcaccaacttgaaggtgtacctcttgaattacattcaaataaagtaaccacactgtttaattatgcaagattactggaagaactccatgattctgtcagagcaagcatcttttaccgttttataattttcaagtaccctgactacatagatgcctatctgaggttagcggctattgcaaaacaaagaaacaatgttcaactgagcattgaactgataggtgatgctttaaagatagacgagaagaacccaaatgcactgtctatgcttgggagtcttgaactccagagcgatgaagcctggcttaccgcaaaggagcatttccgtaatgcaaaagaggccaccaagggagatacctactctttgcttcaattggggaactggaattactttgctgccaatcgtcctgagaaaaaagccccgaagattgaggctactcatagggagaaagccatggaactctatcagactcaagtactaaagcagcaccgcagtaatatgtttgctgcaaatggtattggaatcttatacgctgagaaggccaaatgggatgtcgctaaggagttgttcacacaggtgcatgaagctgcatcaggaagtatatttgtacacatgcctgatgtatggataaatctggctcatacatattttgctcaaggtcattttcaacaagcagttaaattgtatcaaaattgtttgcggaagttcttccacaatacagatgcaaccatcctattataccttgctcggacacactatgaggctgagcgatggcaagactgcaggaaaactttgcttagagctatacatttggctccatcaaattacttgttacggtttaatgtaggagtgtcaatgcagaaattctcagcttcaaccctgcaaaagacaaaacaaacagttgatgaggttcgcgccacagtcactgaacttcagaatgccattagagttttcagtctgttatctgttgcatcaacgtaccactcccatggttttgatgagaggaaaatagaaactcatgttgagtactgtaaacatttacttgatgctgctaaggttcatcgtgatgcagctgagcaagctgaacagcagaataagcaaaaaatggaagttgctcgtcagattgctttggcagaggaagctcgccgaagggcagaagagcagagaaaatttcagttagaaaggaggagggaagaggatgaactcaagcaagtaaaacaacaggaggaacacttccagcgtgtgaaggaacaatggaaaacatccagcaacacccctggcaagagaaaagatagatctaagactgaagatgaagaggtgggaaataaaaagcggaggaggaagggaattaggaggaaggatcaaaaaacaaagatgcagtatggggaagaggaagatgagtacaaagatgaaccagaagcagatgatgactatgcagacctggcgaggtataatggcgctgacaattcagagagagccccagatcaccttcttgcggctgctggccttgacgattctgatgccgaagatgacatgggtcatcctcaatctgcaatagaacggaagagacgagcttggtcagaatctgaagacgatgagccagtgaagaagccagcagcacaacctagcccgggcgctgatggtttgagtgaatgaaagaaaccgagatgatgttcttgcagtgaagattaacatgcatgggtctttgctttaggttagcatggtgttgaattggggagattcagaacttcactatacatagctgatagtcaaggactatgtatataccttgttgccaatcttgtttatcgcattagattatggagttgtttaatctgctggtttctgcaatataacatggaatccagtcctattagatggtgacttgtaggtgttttagttgggatgcaaagttttgcacgtcaagtttcagcagttagatttcccaatggac

SEQ ID NO: 102199 - DNA, 243 bp, Zea Mays
atgggcattggactattgtgctgggtgaagatcatgctggcgctgaaggcaacagtgccccctggccacacactggacctcaaggctgcagctccatgcaggcagtacgagtatttctccttcctttataggctcggtaccaatcctggccgcgtgccctctggatcgaaccttggcgagtttttattcctgtctgaatttcactggagaccaggtttcagtgaaccaactggattcacttga

SEQ ID NO: 102200 - DNA, 2347 bp, Zea Mays
gtgtgtcaaatcgaacgcacatgcggcgcgactccctttcacggcctccccgcgtctcagcctacacgtccgagccgccagccgtgcgctttaagtgagcgcacccacgaaaagcagccaggcagcggagccggagagaagaagcagcagtagcagcagggccgtcaacaccatggcggtgggcgcgaccgccacgaagctcctcccgtcggcggccgcggccgcgcgccgcccatcgatgctccacctcgcggccgtcgccgtcctctgctcgctgtcctacctcctcggcatctggcaccacggcggcttctccgcggggcccgccgccggcgactcctcctcctcggtctctatcgccaccgccgtctcctgcgccacccccgccccgacgaccgcctcctcgtctccccccgcgggaccgctcgacttcgccgcgcaccacacggcggagggggtggaggcggagggcgcgctccgccatcgcaactacgaagcatgccccgccaagtactccgagtacacgccctgcgaggacgtggagcgttccttgcggttcccccgcgaccgcctcgtctaccgggagcgccactgccccgcggccggcgagcgcctccggtgcctcgtcccggcgcccaagggctaccgcaacccgttcccgtggccggccagccgcgacgtcgcctggttcgccaacgtgccgcacaaggagctcagcgtcgagaaggcggtgcagaattggatccgcgtcgacggcgacaagttccgcttccccgggggcggcaccatgttccctcgcggcgccggcgcctacatcgacgacatcggcaagcttatccccctccacgacggatccatccggaccgctcttgacaccggctgcgggcagtatcctatgcacagcaaatcgaacttttccgagaacgtggcgagctggggagcctacttgctgtcacgcaacatccttgccatgtccttcgccccgcgagactcccacgaggcgcaggttcagtttgcactagagcgtggtgtgccggcgatgattggggtccttgcctccaatcaactcacttatccggcacgttcctttgacatggcgcattgctctcgttgcctcatcccatggcagctttacgacgggctgtacttgatagaggttgatcgtatcctgcgtcctggaggttattggattttgtctggaccaccaataaactggaagaaacactggaaggggtgggacaggactaaagaagacctggacgcagagcagaaagccatcgaggcagttgccaggagcctatgttggaagaagatcaaggaggagggcgacattgctatctggcagaaaccaactaaccacattcattgcaaggccatccacaaagttatcaagtcaccgcccttctgttctaacaaaaacccagatgctgcctggtacgacaagatggaggcttgcataactccactaccagaggtcagtgacttaaaggaggttgctggcggctcgttgaagaaatggccggagcggctcactgcagtgccgcccaggattgccagtggcagcatcgagggggtcacggaagagatgtttgtggaagatactgagttatggaagaagagagttgggcactacaagtccgtgattgctcaactcggccagaaaggccggtaccgcaacttactggatatgaatgcaaagtttggcggattcgctgcggcattggtgaatgaccccttgtgggtcatgaacatggtccctactgtggggaactcaacaacccttggggtaatatacgagcgtggcctcattgggagctaccaggactggtgtgagggcatgtccacttatccccggacctacgacctcattcatgcagatacagtgttcacactgtacaatggcagatgtgaggcggagaacattctgctcgaaatggacagaattctgaggccagagggcacggtcatcatcagagatgacgtggacctcttagtgaagataaagagcatggcggacgggatgagatggaatagccagatcgtggatcacgaagatggtccgctcgtccgtgagaagctcctccttgttgtgaagacatactggactctcgatggcagcgaacaatagcaataacgtcaaataaaagagttggaatgattatatggcatgatcggcagatgtgactgcctacccatttgccctgtgaatctggtggagtttgttttctgtttttttggggggtattcattttaggagatagttaacataatggagagataatctccttgttaagatatcaaagagcagcccagcacagattttgacataaaaacaacaaattgtgcg

SEQ ID NO: 102201 - DNA, 911 bp, Zea Mays
tttttatttcttttactgtacacatgaataacatttttacctgtaatgaacagtcctgcataaactttatcactttctatcaacactacagcagtatctccactgccatttatctgatatatcgtggcgccgttttcaacattcccttaaaaatcaggtgagggatatactggatctggagtatgtgcatatatgttatattactgatgcacttgacatatgtttcttatctgatgagtcaaaacaagttgctacgataatcaagagcatgctgcagctggctttggagttacgatcatgctttcagagtggtgacacttgtgatttatcagtaaatcaactcagtaatttgcaataccttataaacttctctcaggtggatgtaattagaacaaagttcgaggataacatcaaagatctctatattttgcattcgaaatcttcaaaatatacggagcttggcctttcccgtttctgggggtatctgaactacaatgagtatcattctacgaaagtcagcaaagatatggacaacttctatttttgataggacattgcaagactgaagtaaggtttgcctttatatttgggcaatagctcactggccaccgggactagcttaccttttgaggtacacactgctgagtggtgagagttcttgtagatatacgctggtttgatcaaattggcccttgtattggtttttggcgaacttaagagaactattgttcagacatgccatatacttggagatgcatgtatgtcctaatggtgtatcccagttttacgatcaaaatgggaaatcatgtgtagttctggaaaggtgggaactttgtatagccaatgttgatattgattgttgacacgttacaattggtaaatggaaggtgaatgattgctctctggcctca

SEQ ID NO: 102202 - DNA, 2478 bp, Zea Mays
tttttaattttattttttttagcgtaaaggaccgtttgatcctctatatttagggtagagaaccctttaggggaccttgttggagccagccttacacataccagctagggctacaggtagaggtaacaaacatcatactagcttagctagaactaacatgctatggttctaaggttactaaactttctaacacggtcatgatgtgcccacgaacaccaaaaaaacaaacgcggcgatcaccaacgccgccactgatgtacagaatcgtcgtccagaagtggccggagtggtctagctaagatccacagatggacagggaaagctccaggctaacaacaccacccggcccgacgacgaagcagcctgagtggccggagcagtcgctggagctcctcctcgccggcgaggccgtgaggatgcagctgctctcgccgcttcgcgaggaggccgctgccgccatgccacgcccgcattttgcgtccagattaccgagggacagcgagagcgagcactgctcagatgcctcgtcctccttcgtcgctgcattgctggactggggccgtccgtcgtttccgtcctctttgctggagtcgtcgccgtcctgctgcttcagcgcagaaccaagacggtgtgcttctggtcggcgtacctgctaaaatccagtgattttacaattatatactgtactttactcacgagtactagtagagcatgaaagcaggacgtgcagttttcagaagaaaaaaaattcagtcggagcaaggcagcaggcaagctaataacatcatcgcgagaactactagctagctacgtgcaatgctaggggcatggatcatctgagcactgcagaagccactgcaaacactgcacagccgcagcaaggtgagaagtaaatggctgagccaatgctatggacgaatgatctctgtttccaagcagcagacagatttcaagaacagaatttgccagtcttcttgcaatgccgaggtacacgtagccagataccgagggccgaggccatacctgtgccggcgatcctacatcaatgctgtgtgtatcttctacaaaacgtgcgccaaagatacagccagccagtcctgcaggaggatctgggatgtgcaggtgcgcatgcattggttgatctgagatgtgtacatgtagcttagtagtgcttgttagattggctggtttggtctaactctaacagtatgttcacggtgagaagttggccccaccggcagacacactttgtgcaaatgttctaccaaaaaatactgaaaacaaaaacaacgccaagatgagtagtaggatgtaaagaagaacagaacgatggtgtgaaagcaagcggttaggacaaggaaaaggttcatcttcttttgataaaccttttggcgatatctcttttttttctactataactttcactttttttagctgatgtaccttaaaggggccagattcttgcaccaaacatcccatggcttggagattggaaggcgtagcagcagccgcatctctcctctgccatctgatgaggccctcctcctttattctccagcccacggccatggcttgcatgtaatcatcgatgcagtacagtccccctcccccagcagtagtcctcgcatcactgactccatggcttccctgcatgctctcgtatcccatccgggccctgttcatgcacccaaagagtagacgaccagagacccccatgaaaaaaagagcaagtgaacagacgccatgcatggaaaaaggcgctttggttttgcgtcaaagattagggcctttgaaaagcttgtcttttttaacttgaacacgtttgaaagagaggagggaaaaggcgtttgcaggccgaaccttttcagaggtggtggtggtgggcagcacaggaactcctccttggggcctcctcgctcatcaccgctgcatgagtacctcctttgcagcagctgggctggcgtccctgatcgatggtgccatgaaagaaaggtgtttggctttccattagcgaaatctatctaaagtgtgcagtgcattacacttagcgttcccaacaaaaaaggctttgccactcatgacacatgagaagggaatctggggtcgctaggagcagttggcaagtgcagtgagcatgtggagatgtgagctaagaggagagtcacacaaaccacaaggcaatgtcatatcttatttttattttaaaaagggaattatatatatataatactttggaatgttcagtttactgtcgcagaacatttcgttgtccctgaatgaatactggatagataattcagctacactgcacagcgttgacatgtgaagtaataaaaaaaacacgagcaatgaaaaaaaatgaatgaaagaactcagcagtggaagaagcgggcaaatgagggctcgtttcatctctcacctcctcctctttctgcgccaaggcttgcagctctgtacatctgttcatcagaaagaaaa

SEQ ID NO: 102203 - DNA, 207 bp, Zea Mays
ccgcctcgggccgccgcgcgatgggggcccgtccatggcggcaagcgcagcaaggccgtgacatcgtggggtgggggtcgggctggagaggagggaggggggatcgtgcattcgtgctcgtgcgtggtgcgtcacgctgtgccgtacagtagcaaccaaaccagtgccacgcgcggcgggcccacggacggcaccatgggcagggcc

SEQ ID NO: 102204 - DNA, 3704 bp, Zea Mays
aggcccgaggcagcccactggacactggccgccctagcctgagcgaaagagccctcacccgactacacccccctacccccgactgcgggctccacaccgtccccgtcatcgggccccgggcccagcagagcaacgggtggccgcgcgccctgtacggctctctcttgatgcattcctgtcatgctagtgcccatcatggtgaggaagaagagaactggccctggcggctctggagaaacttctggagagtcttcaggagcttctggacaaggttcctcacagcggcctgaacggactcaacaacctggggcaggacgtggctgggtgcctcagcagggtggccgtggtggcgggcaacaccagggtcgtggtggacattatcaaggccgtggagggccaggtccacatcaccctggtggactgcctgagtatcaccagcgtgaataccagggacgaggtggtgagtaccagggacagtaccaggggcgtggtggtgcccgctccagaggtggaatttcacagccatactatggtgggcataggggaggtagtgttggacgaaatgttcctccaggtccatccagaacagttcccgagctgcaccaagccccatacgtccagtatcaagccccggtgatttcaccatccccatcgggacctggctcatcctcacagcctatggcagaggtgagctctggacaagtccagcaacagtttgagcaacttgccattcatggtcagagttccatgagtcaagaagttcaagtggcaccagcatcaagcaaatcggttcgattcccattacgccccggcaagggcacttatggggacaggtgcattgtgaaggcgaatcatttttttgctgagcttcctgacaaagaccttcaccaatatgatgtaactataacacctgaagttacttcacgtggcgttaatcgtgctgtcatgggagagcttgtaacactatatagacaatcccatttgggcgggcgtctacctgcgtacgatggaagaaagagcctttataccgctggaccattgccttttacttctatgacatttgaaattaccttgcaagatgaggaagatagtgttggcggtggccagggcggacaaaggcgcgagagagtatttagggtggtgatcaaatttgcggcccgtgctgatctccatcatctggctatgtttctagctggaaggcaagcagacgctcctcaagaagctcttcaagtgcttgacattgtactacgtgaattgcctactgcgaggtattctcctgttggtaggtcattttattctcccaacttagggagacgtcagcaacttggtgagggtttggaaagttggcgcggtttttaccaaagcataaggccgacacagatgggcctttcactgaatattgatatgtcctctactgcatttatcgagcctctccctgtgattgattttgttgctcagcttcttaatagagatatttcagttaggccattgtctgattctgatcgcgtgaagatcaaaaaagccttaagaggtgtgaaggttgaggtcactcacaggggaaacatgcgcagaaagtatcgcatttctggcctcacctcacaagcaacaagagagctatcattccctgttgatgatcgtggtactgtgaagactgtggtccaatacttcatggagacttatggttttagcatccagcacaccactttaccgtgcttgcaagtgggcaatcaacaaagaccaaattatctgcctatggaggtttgcaagatagttgaaggacagcgttactcaaagcgactcaatgagaaacaaatcactgctttactgaaagtgacctgccagcgccctcaagagcgtgagctggacattttacagactgtgcatcacaatgcgtactatgaagacccgtatgcacaggaatttggtataagaattgatgaacgccttgctgcagttgaagctcgtgttctgccaccaccaaggcttaaataccatgatagtggccgagagaaggatgttttgcccagagttggccaatggaacatgatgaataagaaaatggtaaatggtggcagagtcagcaactgggcatgtattaacttctctcggaatgtgcaagatagtgccgctaggggtttctgtcatgaactggcaatcatgtgccaaatatcaggaatggatttttcccttgagcctgtgctgcctccagtgactgcaaggccagaacatgttgaaagagcgttgaaggcacgttatcaagatgcaatgaacatactgaggccacaggggagggaacttgatctgctgattgtaatactgcctgacattaatggttccttatatggggatctcaaaaggatctgtgagactgatctcggattggtctcccagtgttgtctgactaaacatgtttttaagatgagcaagcagtatcttgcaaatgttgcactcaaaataaatgttaaggttggtggaaggaatactgtacttgtagatgctttgacaaggagaatcccccttgtcagtgacagaccgaccataatatttggtgctgatgttacccatccacatcctggagaagattccagtccttccattgcagctgtggttgcttcgcaagactggcctgaggtcaccaaatatgctggactagtgagtgcccaagcccatcgccaggagctgatacaggatcttttcaaagtatggcaagatccacagagaaggacagtaactggtggcatgataaaggaacttctcatttctttcaagagagcaactggacagaagccccagaggatcatattctacagggatggtgtcagtgagggacagttctatcaagtattgttgtatgaacttgatgccatcagaaaggcatgtgcatccttggagcccaactaccagcctccagttacttttgtcgtggtgcagaaacgacatcacactaggctgtttgctaataaccacaacgatcagcgtacagttgatagaagcggaaacatactgcctggcaccgtggttgattcgaagatttgccatcctactgaatttgatttctacctgtgtagccatgctggcattcagggaacaagccgccctgctcattaccatgtcctgtgggacgagaacaagttcacagctgatgagctgcagactctgacaaacaacctatgctacacgtacgctaggtgcacccgctccgtgtcaattgtgcccccggcatactatgctcatctggcagccttccgagctcgcttctacatggagccagatacctctgacagtggctcaatggccagtggtgcccgtggccctccaccaggtgcggcacgcagcatgagaggagcggggagtgttgcggtcaggcccctacctgctctcaaggaaaacgtgaagcgtgtcatgttttactgctgagatgctgagctaccttcaccaagaaaatatcctgacttgttccatgtacccgcactgtttcggtgatactatctgacaccgaatttatgcattaagtcttccagtggtctggagattttaagtaacgcctgtttttattcgtgagttgtaacgctgcagttcgaggagcttcagtgctgtatgatgtgtaaactatttgttgtaagttgtaaccaattgttgtaagttgtaaccagccactatgttataatcctgtttgtttcagctttttacagtttctcgctacc

SEQ ID NO: 102205 - DNA, 1884 bp, Zea Mays
taacatcatcattttgagttcattgaaaaggtcaaaataggtcatctagtactgcacaaattttctattgatggtgcctgtgcaccaccgtagatgaatgtggtgtcgccctgaatccatttacgttttgcttgccttctgtctgcatgctccctttttgttgattgatttaataatctcatgagtcataactttcttgtctattcttctttgtctgtcttctttttctgggtagaaaatggtaaatggtggcagagtcagcaactgggcatgtattaacttctctcggaatgtgcaagatagtgccgctaggggtttctgtcatgaactggcaatcatgtgccaaatatcaggaatggatttttcccttgagcctgtgctgcctccagtgactgcaaggccagaacatgttgaaagagcgttgaaggcacgttatcaagatgcaatgaacatactgaggccacaggggagggaacttgatctgctgattgtaatactgcctgacattaatggttccttatatggggatctcaaaaggatctgtgagactgatctcggattggtctcccagtgttgtctgactaaacatgtttttaagatgagcaagcagtatcttgcaaatgttgcactcaaaataaatgttaaggttggtggaaggaatactgtacttgtagatgctttgacaaggagaatcccccttgtcagtgacagaccgaccataatatttggtgctgatgttacccatccacatcctggagaagattccagtccttccattgcagctgtggttgcttcgcaagactggcctgaggtcaccaaatatgctggactagtgagtgcccaagcccatcgccaggagctgatacaggatcttttcaaagtatggcaagatccacagagaaggacagtaactggtggcatgataaaggaacttctcatttctttcaagagagcaactggacagaagccccagaggatcatattctacagggatggtgtcagtgagggacagttctatcaagtattgttgtatgaacttgatgccatcagaaaggcatgtgcatccttggagcccaactaccagcctccagttacttttgtcgtggtgcagaaacgacatcacactaggctgtttgctaataaccacaacgatcagcgtacagttgatagaagcggaaacatactgcctggcaccgtggttgattcgaagatttgccatcctactgaatttgatttctacctgtgtagccatgctggcattcagggaacaagccgccctgctcattaccatgtcctgtgggacgagaacaagttcacagctgatgagctgcagactctgacaaacaacctatgctacacgtacgctaggtgcacccgctccgtgtcaattgtgcccccggcatactatgctcatctggcagccttccgagctcgcttctacatggagccagatacctctgacagtggctcaatggccagtggtgcccgtggccctccaccaggtgcggcacgcagcatgagaggagcggggagtgttgcggtcaggcccctacctgctctcaaggaaaacgtgaagcgtgtcatgttttactgctgagatgctgagctaccttcaccaagaaaatatcctgacttgttccatgtacccgcactgtttcggtgatactatctgacaccgaatttatgcattaagtcttccagtggtctggagattttaagtaacgcctgtttttattcgtgagttgtaacgctgcagttcgaggagcttcagtgctgtatgatgtgtaaactatttgttgtaagttgtaaccaattgttgtaagttgtaaccagccactatgttataatcctgtttgtttcagctttttacagtttctcgctacc

SEQ ID NO: 102206 - DNA, 189 bp, Zea Mays
aatcagttgaaacttatcagatactaatgtatctacagaagtgcgtaaaacgtttttacacaaatggccagtaaaagcaatttcactagtgttgtacacagactaccggctcacgtgattacatttcttttcctcccactgaatacatttatttcctaccactgacaggtgttttcaacttgatcaaat

SEQ ID NO: 102207 - DNA, 89 bp, Zea Mays
cttgcttttgcgcattcatagatcactgcaggtggactgcaggtttgttccctttttcttgctttgacatctggattatttcattttga

SEQ ID NO: 102208 - DNA, 3659 bp, Zea Mays
tctctctctctgccctgccttgcgttgtcttggtcggtttcgtttcgatcccgctcctgaacagtacgtcggcaacttggagggggcgctgcctgcttcttcttcctcccgtgaagggaaggcggggtagccgatctcggcccgagttgatccggttgcgggggcttttctctcgcgtggtcctccagcgcgccgcgccgcgccgtgaatcgacaaccggccaccatgttcgtcaagaagctcgtggagagggcctccaagaagcaacatatcggcagcatcagctcccttcgccccgagaacgtcagcccgcggctagccttccactacggcgtccctgcggacgccgccctccttgcctacgaccccgttctccacgtgctcgccgtcgccaccaggaatggacagatcaagctgttcggccgcgacaacacgcaggcgttgctccagtccccctcccctctcccttccaggttcttgcagtttgccgagggccaaggggttctgctcaatgtcaatacccagaaccagatcgaggtttgggacattgatgcgaaaaaactctgttatctgcacccggctgaaaaggcgatcactgcattctctgtgctgcagaagagcttctacatatatgttggagatagttctggaagtgtgtccccattgaagcttgatttggctcagagatgtctagctgacctgccgtactggattccttttactgaatcttatggttccactaccagtgccggtaatgatgtggaagtagtatttgtttcaccccagcctttgtctgaatcgaacagggtgctcattatcttcagagatggggttatgagtttgtgggatattaaagctagcaaagcagtatccatatctggtaaaactacgcagcagcaatcacagaaggaggctaaaaatgtaacatcagcatgctgggtttgtgccaagggaagcaaaattgctatcggatacgataatggcgatttatacatttgggccattcctgaggttacaagtacacaaaattcctcatctatgggtggccagaatctacctattcagaggcttaacctaggatacaagctagacaagttgccaatagtctctttgcaatggatccctagcgatggaaaggcaggccgtttgtatatcaatggtttcaatgatcatggacacctatttcaggttctgattctgaatgaagagagtgagtcgcgaattgtaaagatggttttgcctatcgctgaatcttgccaaggaatggaacttgttacagggcttagtgacccaaataagcacagacaaagtgcccttgcactcttgttgaaatctggtcacatctgtttatatgatgattcagaaattgagcgctatctccttcactctcagtctagatcccctccaacacttccaaactgttcatatgtgaagcttccttatggtgattcaggcatcagtgttgcaaagttctatacaagtaaccctgcagcgttagcttctttggacgaggcatgtatatatttggtattttcttgcaaaaactttgaactctttgatcaagccgttccttcttctaatggtgtgcaggattatttttcatcagctaccaaatatccatgtctgttttcaatgaagggtaaaggtcagactttaacaagttttaccaacattcataagacccggaacctctatataactggacatctagatggaaccataagcttttgggatgcatcttgtcctcatttgctgcagatttttatgataaagcagcagaataaagacgatacatcaactggtaaccctatcacatcattacagtttgatatgtcctctagcattctattgtctggagaaaggagtggaatggtccatattatcacattcaaaaaggactccagcgacaacatattctcctttttaaatgcaaagcaaggagacaactatgatgtcagaagtataaagctcaaaggtgctgtaaccacaatgtcttctatctcaaaatcaaagcattttgctgttgggacagaaaaaggaattgtatcagttatcaacgtagaagatgctacaatattatatcaagaacagtttgagtgtcgactgcctggtggaatcgcctctttgcaatttgaaatctatagccataatggatatgacaaggacattttgataatagcgatggaagattcatctatttttgttatcgaggaagaaacggggaaacttttgaaccccaacccagttcagacagacaaaccctctaaagccatccttctgcagatgttggagttatcgcccattgacacaccagcagtttcagataaccaagatacagtatcgaaggaatcattgctgctactttgcactgaaaatgcgatccgtttgttttccttgggccacgcaattcagggcacaaagaagataatcaataagaagaaattgagcagctgttgttgtttcgcctctcttattcatagttcttctaatgacattggacttatactcgtcttctccaatgggaaacttgaaataagatccctgccagacttgtccttgttgaaggatgcctttttacgaggttttgtgtactcaagaaacttgaattcaagtagttccataacatgttcatctgatggagaagccatcttgattaatggagaagagacctattttttctctacgctctgccaggatgagatatacaggcacgtagacagcattagtacagtgtacagaaaagagaactcaaccagggaagactcttcttttgtagtgaaatctcctaaagaaaagaaaaagggtctgtttggaatgattatgaaagataacaaaggaagcaaatcaaaagaaagtgatgcaattggcagcgaacaatgtattgcaacgacttctgaagagctggcttcaatattttcatcaactaactttgctccgccatctgagggaaggaacagttcactacgagatgatgaaaatgccgagctggacatagatgatatcgacattgatgacaacccacagaagccaaaaggtccacatttccctggtctaagcaaagataaaatcagcaagggactccaaacccttaaaggaaagttgaagcccaagactgaagaaaagataagctcgggaaacaaaaaaactgaagatgaaacatcagtgagtcaagtcgatcagataaagatgaagtatggatatgcaaatacaacaaatgatgactcaaccagtgtcacaaaaatgattgggaacaagctgcaggaaaacatgaaaaagttggagggcattaaccttcgagctgccgatatggcgagcggcgcccagtcattctccacaatggcaaaagagctactccggacaacaaagaacgagaaggggacctcataatcacctacaccaatttcccctcctttgtatagttcgtcttttcctttttttttcatccctggatcgtggatctgacgatctggacctccccgttgtcagactctaaatagtgaatggagtgtaagtgactgaagtaccctttacatcttggtatagggtaacagcagggacttcacatagttattttttgccgcggcaatgtcgactctaccgtctacactcgaatgaggattgataccaaatatttgttataaagaaaggtgttttcaaag

SEQ ID NO: 102209 - DNA, 1125 bp, Zea Mays
attatctggttgagatccatgggttcatgattaagctattgccataattaccaatgtataacctaataatttcagaaaggaatttcaattctagatctgaaaacctagatgcagcttcttttagttattttcaagattggcttatgatatctgagtaatatggtccgtatacaggcacgtagacagcattagtacagtgtacagaaaagagaactcaaccagggaagactcttcttttgtagtgaaatctcctaaagaaaagaaaaagggtctgtttggaatgattatgaaagataacaaaggaagcaaatcaaaagaaagtgatgcaattggcagcgaacaatgtattgcaacgacttctgaagagctggcttcaatattttcatcaactaactttgctccgccatctgagggaaggaacagttcactacgagatgatgaaaatgccgagctggacatagatgatatcgacattgatgacaacccacagaagccaaaaggtccacatttccctggtctaagcaaagataaaatcagcaagggactccaaacccttaaaggaaagttgaagcccaagactgaagaaaagataagctcgggaaacaaaaaaactgaagatgaaacatcagtgagtcaagtcgatcagataaagatgaagtatggatatgcaaatacaacaaatgatgactcaaccagtgtcacaaaaatgattgggaacaagctgcaggaaaacatgaaaaagttggagggcattaaccttcgagctgccgatatggcgagcggcgcccagtcattctccacaatggcaaaagagctactccggacaacaaagaacgagaaggggacctcataatcacctacaccaatttcccctcctttgtatagttcgtcttttcctttttttttcatccctggatcgtggatctgacgatctggacctccccgttgtcagactctaaatagtgaatggagtgtaagtgactgaagtaccctttacatcttggtatagggtaacagcagggacttcacatagttattttttgccgcggcaatgtcgactctaccgtctacactcgaatgaggattgataccaaatatttgttataaagaaaggtgttttcaaag

SEQ ID NO: 102210 - DNA, 1264 bp, Zea Mays
atgctcctccacgtcagaagcccgccgtcctctttgtcctctccggctctccccaccgccagaaaggaaacggacccaacgcgatcgaagtccactgccgtcttcactgctgccaggcgccagccacggcccacggccaatgcaattgcagttgcagttgcaattgcacggcacccatttccagagccgtcctcaattagctagtcaaatctcgctatcctttccccaccatccagatcttccctttcatggacgccgccgtctccaccctcaccgctctcgccatcttcgcgagcaccgtcgagcacgccgcctacaggagcgtgcaggggtatagggtggtcgggaggaaaggcggcgggtgggtccgttgggagaggtgggtggagcggcagttcgtcctctccctctccttcccacggtgcgtcgaggttgccctgcccgccgccgcgccgcggatactgccagcggggtggcgcagccggccggtgttccgcgagggacagaccgtcgacacttggcgttgcattgtggcattcgactccgtcgccgccgtcgctccgtcctccccgccgccgcccgtgctctcccccttcgtgaacccacagctgcagtatctgtctaatctgtacaatgacctgctgatggtgtttcggtttcgagaagagaaaacggtcccacaactcgttaattcaaagcaacccatccgttgtggtgaacaggggaaaacttctgatttgggtgatgcatcggagtccgattcggatggggattgtcaatctggcaaagaacttgcaccaccagttcagaagcatacaagagccaaccggaagcatatagatagcattactttagttgatatagctcagtacttccatcttccaatccgagatgcatcaaagacactcaagattggggtcagcatattgaagaggaaatgccgacagtatgggatacctcgttggcctcaccggaagatcaagtcacttgactctctcattcatgaccttgagttcgtgctagcaagagaggatgaggatgaggaggaggagaagcagctgcagaaggacaggctggctgctgcgataaacgccctcacaaaacggaagagcatgctggagagcgagaaggaaaccatacagcagaaaccggccatggacctgatggctgaaaccaagctattcagggaagatgttttcaagaggagatatagggccaaaagttcagtcatggatatggattagcatttctctttagctgataa

SEQ ID NO: 102211 - DNA, 1254 bp, Zea Mays
atgctcctccacgtcagaagcccgccgtcctctttgtcctctccggctctccccaccgccagaaaggaaacggacccaacgcgatcgaagtccactgccgtcttcactgctgccaggcgccagccacggcccacggccaatgcaattgcagttgcagttgcaattgcacggcacccatttccagagccgtcctcaattagctagtcaaatctcgctatcctttccccaccatccagatcttccctttcatggacgccgccgtctccaccctcaccgctctcgccatcttcgcgagcaccgtcgagcacggagcgtgcaggggtatagggtggtcgggaggaaaggcggcgggtgggtccgttgggagaggtgggtggagcggcagttcgtcctctccctctccttcccacggtgcgtcgaggttgccctgcccgccgccgcgccgcggatactgccagcggggtggcgcagccggccggtgttccgcgagggacagaccgtcgacacttggcgttgcattgtggcattcgactccgtcgccgccgtcgctccgtcctccccgccgccgcccgtgctctcccccttcgtgaacccacagctgcagtatctgtctaatctgtacaatgacctgctgatggtgtttcggtttcgagaagagaaaacggtcccacaactcgttaattcaaagcaacccatccgttgtggtgaacaggggaaaacttctgatttgggtgatgcatcggagtccgattcggatggggattgtcaatctggcaaagaacttgcaccaccagttcagaagcatacaagagccaaccggaagcatatagatagcattactttagttgatatagctcagtacttccatcttccaatccgagatgcatcaaagacactcaagattggggtcagcatattgaagaggaaatgccgacagtatgggatacctcgttggcctcaccggaagatcaagtcacttgactctctcattcatgaccttgagttcgtgctagcaagagaggatgaggatgaggaggaggagaagcagctgcagaaggacaggctggctgctgcgataaacgccctcacaaaacggaagagcatgctggagagcgagaaggaaaccatacagcagaaaccggccatggacctgatggctgaaaccaagctattcagggaagatgttttcaagaggagatatagggccaaaagttcagtcatggatatggattagcatttctctttagctgataa

SEQ ID NO: 102212 - DNA, 1351 bp, Zea Mays
atgctcctccacgtcagaagcccgccgtcctctttgtcctctccggctctccccaccgccagaaaggaaacggacccaacgcgatcgaagtccactgccgtcttcactgctgccaggcgccagccacggcccacggccaatgcaattgcagttgcagttgcaattgcacggcacccatttccagagccgtcctcaattagctagtcaaatctcgctatcctttccccaccatccagatcttccctttcatggacgccgccgtctccaccctcaccgctctcgccatcttcgcgagcaccgtcgagcacgccgcctacaggagcgtgcaggggtatagggtggtcgggaggaaaggcggcgggtgggtccgttgggagaggtgggtggagcggcagttcgtcctctccctctccttcccacggtgcgtcgaggttgccctgcccgccgccgcgccgcggatactgccagcggggtggcgcagccggccggtgttccgcgagggacagaccgtcgacacttggcgttgcattgtggcattcgactccgtcgccgccgtcgctccgtcctccccgccgccgcccgtgctctcccccttcgtgtatggacaatcagatcacataagctcgacacggatgctacgttgccttcttaaaatgctttgatggccaaaagatttgccttctaggaacccacagctgcagtatctgtctaatctgtacaatgacctgctgatggtgtttcggtttcgagaagagaaaacggtcccacaactcgttaattcaaagcaacccatccgttgtggtgaacaggggaaaacttctgatttgggtgatgcatcggagtccgattcggatggggattgtcaatctggcaaagaacttgcaccaccagttcagaagcatacaagagccaaccggaagcatatagatagcattactttagttgatatagctcagtacttccatcttccaatccgagatgcatcaaagacactcaagattggggtcagcatattgaagaggaaatgccgacagtatgggatacctcgttggcctcaccggaagatcaagtcacttgactctctcattcatgaccttgagttcgtgctagcaagagaggatgaggatgaggaggaggagaagcagctgcagaaggacaggctggctgctgcgataaacgccctcacaaaacggaagagcatgctggagagcgagaaggaaaccatacagcagaaaccggccatggacctgatggctgaaaccaagctattcagggaagatgttttcaagaggagatatagggccaaaagttcagtcatggatatggattagcatttctctttagctgataa

SEQ ID NO: 102213 - DNA, 950 bp, Zea Mays
cactgccgtcttcactgctgccaggcgccagccacggcccacggccaatgcaattgcagttgcagttgcaattgcacggcacccatttccagagccgtcctcaattagctagtcaaatctcgctatcctttccccaccatccagatcttccctttcatggacgccgccgtctccaccctcaccgctctcgccatcttcgcgagcaccgtcgagcacggtcggtgcaggcctccgccacgctttctaaattgcttccctcccggtcccggggcaccgcacgacatgaacccacagctgcagtatctgtctaatctgtacaatgacctgctgatggtgtttcggtttcgagaagagaaaacggtcccacaactcgttaattcaaagcaacccatccgttgtggtgaacaggggaaaacttctgatttgggtgatgcatcggagtccgattcggatggggattgtcaatctggcaaagaacttgcaccaccagttcagaagcatacaagagccaaccggaagcatatagatagcattactttagttgatatagctcagtacttccatcttccaatccgagatgcatcaaagacactcaagattggggtcagcatattgaagaggaaatgccgacagtatgggatacctcgttggcctcaccggaagatcaagtcacttgactctctcattcatgaccttgagttcgtgctagcaagagaggatgaggatgaggaggaggagaagcagctgcagaaggacaggctggctgctgcgataaacgccctcacaaaacggaagagcatgctggagagcgagaaggaaaccatacagcagaaaccggccatggacctgatggctgaaaccaagctattcagggaagatgttttcaagaggagatatagggccaaaagttcagtcatggatatggattagcatttctctttagctgataa

SEQ ID NO: 102214 - DNA, 2062 bp, Zea Mays
acgcaacgtcgccgcatgcccgcatctaggcattccagcccctagagcctagaggcctagacaaaacccaggcccccttcggcccttcctcgtacactctctcccaatttctcctccaagaacaaacgaaaaacaaaataaaaaactgctcctaaatcttttcaatcattcctctctgttctctctctctctctcttcctacagtagtccagtactccagtccagtcctcctccttcgaatcccaaggtggcggccagagagtagagatagagagagagtgggactatagagacgttaccgttgctgcttgttattattaacgccgccgccgcctcctgcattcgtatggtccgcgtcgtcacggggctcctccgtccgtaaggcaccgccgcagcgtctcggctggatcaacaggccggccgatccgtcttcttcccctcctcctgcgggtcggcgtttggggatcatggcggcgcgggcggctgacgagaacaggagaccggcggcagggaagcccgcgccaggcgtccgagacatggcgagccggcgcgcgctcacggacatcaagaacctcgtcggggctgccccgtacccctacgccgtcgccaagaagcccatgctgcagaagagcaaaagggacgaaaagcagccagcgttggcaagcagccggcccatgacaaggaaattcgccgcctccttggcgagcaagggccaacctgaatgtcagccgatcgtagctgatccagaacccgaagtttgtcaacagaaggaatcagtaggcgatggcaccgttgatattgacgtggaactctacgagctggtcgacggtagtgatagtgacatcgacatgggtgcgacagagaacaaggacattatgaacgaagatgaattgctcatggatattgacagtgcagactcggggaacccgcttgctgcaacagaatatgttaaagagctttacaccttttacagagaaaatgaggctaagagttgtgtaaggccagattacatgtccagccaacaagacataaactcaaagatgagagcaattctgattgactggctgattgaggttcactacaagtttgaactgatggatgagacgctctttcttatggtaaacataatagatagattcttggaaaaggaagtggttccaaggaagaagctacaactggttggagtcacagctatgctgctcgcttgtaaatatgaggaggtatctgttccagttgttgaggaccttgtgctgatatctgaccgtgcctacacaaaagggcaaattttagaaatggaaaagttgattctgaacacgctgcagttcaacatgtctgttccaacaccttatgtcttcatgaagaggtttctgaaagctgcagatgcagataaacagcttgagctagcgtcatttttcatgctggagctctgcttggtagaataccaaatgctgaattatcggccttcgcatctggctgctgctgcggtttatactgcacagtgtgctatcaatcgttgccagcactggacaaaggtctgcgagtctcatagcagatacactagcgaccaactcctggagtgctcgaggatgatggtagattttcaccagaaggctggaaccagtaagctcactggcgtgcacaggaagtacagtacctacaagttcggttgcgtggccaagattttgcctgcgcagttcctgctggagtcgggagggacaccgcctccttcaggtgcaaactagttgaatcgacctattcaactgggtggattttttaaagtttttagaatactccatgaacaagatgcagaaaacatcgtgttgatgttgcccaaaagtgcatcgaatttctttggagagttatgattaacaactttttttttatctatgttgaatgacgagtgacggtcggtcacgttgtgcttgtgcagttatactgcggctaataacaaactgtccagttattctaaaaaacaacgaacgatgttcaggaatgctgttggaaccttgcaaagaaaacaagttctgaatcaaatggatcagtggcctttgtccaaaaaaaa

SEQ ID NO: 102215 - DNA, 1608 bp, Zea Mays
aagccaattggcgtcacgtcgtcgcctctgcggaaaccggcggtccacgggaaaggaaagaggaaacagggaggcgacgccgtcacaattcgttctcgcgatttgcccttctccacctccccgtccatgtcgcgggaaatcacgcgcggcgacgctggattcacttagatccaacagggtaatcggcacggggcagcctctccacccattcccgcagccggttgggcgagtcgtcggttcagataatagactgggcgtgtggatccaagaggtttgatccctttaatttggattgaagtgccagctttcggtcaggaaggtgatgctggatgatgctgacggactttgaaagcataccggttcaaagaagtgttgcctgtcaccatgaggctcaacgttgggctcctagtgcccttgatggcacaatactccgcacccacatgggctactttagttgctgggttcttcatgctgcttgcgctttcgctctccacgtacctgatatttgagcatctctcagcatacaacaatccagaggaacaaaaatttgtactgggtgttattctcatggtcccttgctatgcaattgagtcatgtatttctttgataaatccaagtacaagcgtttactgtggcatcctacgtgatggttatgaagcatttgcaatgtactgctttggaagatatattactgcatgtttaggtggggaagataaaacaatagcctttttaaagagggaaggtggctctggttctgggcagtctctactgcatcacacgtccgagaagggaatcatacaccatcattttcctgtaaattatgtattgaagccctggagactggggacgcggttctacctgattatcaaatttggaatcttccaatatgtgatcataaagaccctcacagccaccttatctcttcttctagaatcttttggtgtttattgtgatggagaattcaatttacgatgtacccttactttgctgctgttctcaactttagtcaatattgggccctgtactgtctagtagcatggtatacagccaccaaggacgaattggctcctataaagcctctggctaagtttctttctttcaaatcgatagtgttcttgacttggtggcaaggtgtggtgattgcaataatgtatgctttgggccttcttagaagccctttagcccagagcttggagttaaaatcaagcattcaagatttcattatttgcatagagatgggcattgcttcagttgttcacctctatgtgttcccagccaagccctatgcactcttaactaatcagtcacacggaaacatttctgtacttggggactatgtatcctctgagcccgtggacccttttgaaataaaggaaagcaaccggcctaccaaaatgaagcttccacagttggaaccagatgagagaagcgtgacaaacataaaagaaagtgttcgggactttgttgtcggcagtggtgaatatgtgagtgctgggaccaaatcttctttctgagtatttgcgacaaatttactctctttatacgttattgtaggttgagttttgaattttttgaaccagtagaataaatcttattaacttgacagtc

SEQ ID NO: 102216 - DNA, 2092 bp, Zea Mays
aagccaattggcgtcacgtcgtcgcctctgcggaaaccggcggtccacgggaaaggaaagaggaaacagggaggcgacgccgtcacaattcgttctcgcgatttgcccttctccacctccccgtccatgtcgcgggaaatcacgcgcggcgacgctggattcacttagatccaacagggtaatcggcacggggcagcctctccacccattcccgcagccggttgggcgagtcgtcggttcagataatagactgggcgtgtggatccaagaggtttgatccctttaatttggattgaagtgccagctttcggtcaggaaggtgatgctggatgatgctgacggactttgaaagcataccggttcaaagaagtgttgcctgtcaccatgaggctcaacgttgggctcctagtgcccttgatggcacaatactccgcacccacatgggctactttagttgctgggttcttcatgctgcttgcgctttcgctctccacgtacctgatatttgagcatctctcagcatacaacaatccagaggaacaaaaatttgtactgggtgttattctcatggtcccttgctatgcaattgagtcatgtatttctttgataaatccaagtacaagcgtttactgtggcatcctacgtgatggttatgaagcatttgcaatgtactgctttggaagatatattactgcatgtttaggtggggaagataaaacaatagcctttttaaagagggaaggtggctctggttctgggcagtctctactgcatcacacgtccgagaagggaatcatacaccatcattttcctgtaaattatgtattgaagccctggagactggggacgcggttctacctgattatcaaatttggaatcttccaatatgtgatcataaagaccctcacagccaccttatctcttcttctagaatcttttggtgtttattgtgatggagaattcaatttacgatgtacccttactttgctgctgttctcaactttagtcaatattgggccctgtactgtctagtagcatggtatacagccaccaaggacgaattggctcctataaagcctctggctaagtttctttctttcaaatcgatagtgttcttgacttggtggcaaggtgtggtgattgcaataatgtatgctttgggccttcttagaagccctttagcccagagcttggagttaaaatcaagcattcaagatttcattatttgcatagaggacagatgggcattgcttcagttgttcacctctatgtgttcccagccaagccctatgcactcttaactaatcagtcacacggaaacatttctgtacttggggactatgtatcctctgagcccgtggacccttttgaaataaaggaaagcaaccggcctaccaaaatgaagcttccacagttggaaccagatgagagaagcgtgacaaacataaaagaaagtgttcgggactttgttgtcggcagtggtgaatatgtgatcaaagattttaagttcactgttaaccaagcagtgcgaccagtggagaagcgcattgataaattgatgaaaaagaatgataagagtaagaaaagccaggacgacaactgggtgagtgcagcaacaccagagaggcctgttcgtgggattgatgatccattattaagcggaagcgcaagtgacagtggtgtcacaaagggcagaaaatatcgcagagttgtgagctcagttactgctgtggacagctggggaggtggtgatcaagcttctgacggatatgagatcaggggtcgccgctgggctgtaaaaagctaacgatttacatagcgagatggtaaattcgaaccatatcgcgtggggggaaaaggacttttaggtttgcaactgtttctgcgatactggccatttaggagccttcgcaagttcagattgtctttgtataggtacttaggtagctgataatgatatgtaacctttttgcgtagattgtttaattttcttttctttttcttggtcgagtcgtactgacatttggtattgcaaaatttgaaagtacaatagtttttttcattctttggaaatggaaacagagttcagcga

SEQ ID NO: 102217 - DNA, 2157 bp, Zea Mays
aagccaattggcgtcacgtcgtcgcctctgcggaaaccggcggtccacgggaaaggaaagaggaaacagggaggcgacgccgtcacaattcgttctcgcgatttgcccttctccacctccccgtccatgtcgcgggaaatcacgcgcggcgacgctggattcacttagatccaacagggtaatcggcacggggcagcctctccacccattcccgcagccggttgggcgagtcgtcggttcagataatagactgggcgtgtggatccaagaggtttgatccctttaatttggattgaagtgccagctttcggtcaggaaggtgatgctggatgatgctgacggactttgaaagcataccggttcaaagaagtgttgcctgtcaccatgaggctcaacgttgggctcctagtgcccttgatggcacaatactccgcacccacatgggctactttagttgctgggttcttcatgctgcttgcgctttcgctctccacgtacctgatatttgagcatctctcagcatacaacaatccagaggaacaaaaatttgtactgggtgttattctcatggtcccttgctatgcaattgagtcatgtatttctttgataaatccaagtacaagcgtttactgtggcatcctacgtgatggttatgaagcatttgcaatgtactgctttggaagatatattactgcatgtttaggtggggaagataaaacaatagcctttttaaagagggaaggtggctctggttctgggcagtctctactgcatcacacgtccgagaagggaatcatacaccatcattttcctgtaaattatgtattgaagccctggagactggggacgcggttctacctgattatcaaatttggaatcttccaatatgtgatcataaagaccctcacagccaccttatctcttcttctagaatcttttggtgtttattgtgatggagaattcaatttacgatgtgggtacccttactttgctgctgttctcaactttagtcaatattgggccctgtactgtctagtagcatggtatacagccaccaaggacgaattggctcctataaagcctctggctaagtttctttctttcaaatcgatagtgttcttgacttggtggcaaggtgtggtgattgcaataatgtatgctttgggccttcttagaagccctttagcccagagcttggagttaaaatcaagcattcaagatttcattatttgcatagagatgggcattgcttcagttgttcacctctatgtgttcccagccaagccctatgcactcttaactaatcagtcacacggaaacatttctgtacttggggactatgtatcctctgagcccgtggacccttttgaaataaaggaaagcaaccggcctaccaaaatgaagcttccacagttggaaccagatgagagaagcgtgacaaacataaaagaaagtgttcgggactttgttgtcggcagtggtgaatatgtgatcaaagattttaagttcactgttaaccaagcagtgcgaccagtggagaagcgcattgataaattgatgaaaaagaatgataagagtaagaaaagccaggacgacaactgggtgagtgcagcaacaccagagaggcctgttcgtgggattgatgatccattattaagcggaagcgcaagtgacagtggtgtcacaaagggcagaaaatatcgcagagttgtgagctcagttactgctgtggacagctggggaggtggtgatcaagcttctgacggatatgagatcaggggtcgccgctgggctgtaaaaagctaacgatttacatagcgagatggtaaattcgaaccatatcgcgtggggggaaaaggacttttaggtttgcaactgtttctgcgatactggccatttaggagccttcgcaagttcagattgtctttgtataggtacttaggtagctgataatgatatgtaacctttttgcgtagattgtttaattttcttttctttttcttggtcgagtcgtactgacatttggtattgcaaaatttgaaagtacaatagtttttttcattctttggaaatggaaacagagttcagcgagtgtgtccatttggacggatttgtatagtttcgttacacgcttacatgcatctttgatctgaaaaa

SEQ ID NO: 102218 - DNA, 2685 bp, Zea Mays
tttttttcgttttgttgctggcccatttcttgttgcactcgaccccctaaaacctcggcgatttctcagtgatacccccccgcctcgcccgccgccccgtgctcttctcgttcacttgcctggctgcctttgctttgtgcttcccattccgagtgccgcccgccacccgccacccgccaccgcctcgagtctctcccgcgggcgcgaggtgcacgctcgagtcaccaccagaagggcgcggaggaggccggctgacaagaggcggctctgtgcgccaagagccccggcgcggggaccagaccagaggcggcggcggcgtacgtgcgcgcgtgtgtacgtggtgcgtatggggtcgaggcggcggagacaccaccaccacggccggtgggttgtgccctccgtggcgccggcggcggcggctttcgcagcggcggggttgctcctcctcgtcgtcgcgttccattgcttcctgtcgctgccgctaagcgacgccagtggcggctcccgtgtcttccggcgccccaacccgccgttcctgttgaacaagccagcggatgtgcgcagaaatgtaatcggtgccgtggatttcgctgttccaagcggtgggagcaagctcggggaggagctctgggagtcgaaggcggcgggcaacttcttcggctgcagcaacgccaccaaacagttcgccgatgccgaggctgtgaccaagtcggaccgttacttgatgatcgcgacgagcggcggactgaatcagcagcgaacagggatcatagatgctgttgttgcagcccgcatactgaatgcaacacttgtcattccaaagctggacgaagaatccttctggaaagatgcgagtgactttgcggagatatttgatgtcgattcattcatatcctcgctttcgaatgatgtaaagatcatacgccaagtacctgacaggaatggcaaaccgccttcgccgtataagatgcgtattcctagaaagtgtacttctaaatgctacgagagccgagtgttgcctgctcttctaaagaagcatgttgttcagttaaccaaatttgactaccgattgtcaaataagctagagactgatcttcaaaagcttaggtgtagagtcaattatcatgcactaaggtttacagacccaatcctccaaatgggtgaaacgcttgtccaaagaatgagggggaaaagtggacgtttcattgctcttcacctaagatttgagcctgacatgcttgctttctctggttgctactacggcggtggagacattgagagaagagaacttggtgagattcgtaagaggtggaagaccctgcatgcaagcaaccctgacagagaacgacggcacggaaagtgccctctaacaccagaggaagtagggctcatgctcagggcattgggatttgggaaggacgtgcacctttatgttgcatcaggagatgtatatggaggcgaggagacactggcacctctgaaggcactcttcccaaactttcactcgaaggaaactctagccaacaaggagttagctccttttttaccatattcatctcgcatggctgctctcgattttatcgtatgtgataggagcgatgtcttcgtgacaaacaacaatggcaacatggccagaatgttggctggtcgaaggagatattttgggcacaggaggaccataaggcccaacactaagaaactttactcattatttctgaatcggaccagcatgagttgggacacatttgcatctaaagtccagacctttcaaaagggattcatgggggagcccaatgagattaaactaggaagaggcgaattccatgagcatcctgtagattgcatttgtgcaaaatcgaagggaaaaagcgtacagagcaggcatcacctagttaaaggcgctggagaagctgtggagaaccattctattgatggggaacttgactggaaggatttggactacggagagcatacacccttgggcaggggggattcatcgaatgaaaccgaatcagacgatgtccgtattggtggatcagacattcctgaattggaggatatgatgtcagactagacacaaatagatagttcattatagttttttcttttatttacaaatggtttggtgataagttattttgaggacagaagatgctacatggtttatttttctcctgtttattcttggagattgcagacacatagaaacaagtttttgccagctcgacaaacaagaaaggcctggaagagctagagcttcctacagaaaagacaggaagcctatagttcggtatgaggtaacaactgtacagtgtatgatggaccctggggaaatggtttctttttcatatagcttgtaccgtagatagaaacaaaagaaacccttcttatgttttactgtgtagcgttataatgagattttgatgggtctatcatcgttcttgattttgtttttttctttctttcataaatgcctgttcccaattttgctggcctcgatttaaatctgtatttataaagaatgtaaaggggtccaagcatacaccccctttcccaaatataggattgtcttacggtttctccttaaaaaaaacactgcaccgtttcccagattagttccatcggcatgatccatttggttgatctgtcaacaattcagtgcaagtattccttcatatcgttctt

SEQ ID NO: 102219 - DNA, 188 bp, Zea Mays
gttgtgcagcaagccaattagcaatttcatcttcctcagaacaagaactattttgtgcttgctctcttgggacatcgacaacaatatctttcttgtaaaaagaattaattgccgttcttttgaataccatgattgtccttcaagataaaaaatatgacaaattagctatctacaactggaatctaccg

SEQ ID NO: 102220 - DNA, 156 bp, Zea Mays
atggcgtttggaggggacggactcagagcgagaattgataaagagttcaggtccgtggcccacacgcgtcaaatgcgcgatcgtcggaggcccgtgaagtgcggagaagagccgaaatcccagcgtcttttaactaaagctttgagtggaaattaa

SEQ ID NO: 102221 - DNA, 2024 bp, Zea Mays
cgagtgggaagaccgcctataaaatctcgcgtccggcagaccgctccggtcgggagtcgggacaaaccaaccaacccaacggcaagtctagacaccgtaccagccccaggcgcgtgcagtgcagactgcagactgcagtaggccggccaccgccatgtcttccagcaaggatgcgatcagcgaggtggagtcggcgcagccgtccccgcggccgccgcccgtgtcgacgccgccgtcgcagatacactccccggcgcccgggcggtcgccgctgcacgccatggcgtcgccgctgcgcgccgtggcgtcgcctctgcgcgccatggcgacgccgctggccagccccgtcaggaaggcggtggcgggcgtcagggaatgcctggaggaggtcggccacatcacgcgcctcgccgacccgcgggacgcctggctgcccatcaccgagtccaggagcggcaacgcctactacgccgcgttccacaacctcagctccggcatcggcttccaggcgctcgtgctccccacggccttcgcatcgctcggatggacgtgggcgatcatctgcctgaccctggcgttcgggtggcagctctacacgctgtggctgctcgtcaggctccacgagcctgtcgcgggcgccacccgctacagccgatacatgcacctcgccaccacagttttcggcgagagatgggccaagatcctggcgctgctcccggtgatgtacctgtcggcggggatctgcacggcgctcatcatcgtcggcggcggcagcatgaagctgctgttcggcatcgcgtgcggcgagccgtgcccggcgcgcccgcccaccaccgtggagtggtacctcgtcttcgtctgcgcggccgtgctgctgtcgcagctccccaacctcaactccatcgccggcgtgtccctggtgggcgcgaccgcggccgtcgcctactgcaccatgatctggaccgtgtccgtggccaagggcagggtgcccgccgtgtcctacgaccccgtcaaggcccccagcgacgtggacggcgcactcgccattctcaatggcctcggaatcattgccttcgccttcaggggccacaatgtcgtgctggagatccagggcacgatgccgtcgacactgaaacacccatctcatgtgcccatgtggaagggggttaaggtagcgtacgccatcatcgcgctctgcttgtaccccgtcgccatcggtggcttctgggcttacggcaaccagatacctcccaatggcatcctgagcgccctgtacaagttccacagccgcgacacgtccaggctagtgctgggggtcaccacgacgctggtgatcgtcaactgcctcaccacgttccagatctacgccatgccggtgtacgacaacatggaggccgggtacgtgcacaagaagaaccgcccgtgcccgtggtggatgcgctcgggcttccgcgccttcttcggcgcggtcaacttcctcatcgccgtcgcgctgccgttcctgtcgcagctcgccggcctcctcggagggatctcgctgccggtcaccctggcctacccgtgcttcatgtgggtggccatcaagaagccgcggaagggcaccgccacgtggaacgtcaactgggcgctgggaatcctcggcatgagcataagccttgtcctcatagtcggaaacctgtggggccttgtggagaaaggcttgcgggtcaagttctttaagcctgccgattcccagtgaaaaaaaggatgcagatttgtcaatcggttagatttgtaatgccatgcttttatatatgttgatttcttcgccaggaacgtataatgtcctcctgcaccttgacaatttgcaagaaagcaaagtccagttaaggtactcgtggtcgttcctcgtgccattgtgccttttgctcattttttttctttatttatgcgctttatatacatttcgttgtcttagggtctgtttggttggactgtggctgtgaaaaaagttgctgtgggctgtgagctgtggaaaaagcagc

SEQ ID NO: 102222 - DNA, 705 bp, Zea Mays
tcctcggtcgcctccgcccgccctctttcccgcaccaggatctcaccacgttgtacctactccggtggcgccagcgctgcccctgattctgggaagctacccgcggcggcgctccgacgggtccttgagatgcctggtgcgcaccaggcgcccgcctgctacgacgcgctgagcgcacgcctcgtcgagcgcgctgagttcagggcctacttcacgagcggtatgtggtcgatccaagagagattgcctagccgccctccatttagggaacttgcagagagcgtttgcctataattgtatttgtgtatgcctgcgatgcattgctgataggaatcatagtctcttgctccgtgagctcctgcaactgcctagaaaaggaggaggatgcatgattcttcagtgaaagtcatacttttttgttcggtattagttttacttccattcgaaatctgcgcctgtggaccggcgtcttgcatgaatttattggtgggggaagtgaatgattttgtggtggtttagggtcttgattggacagtgtattggacttctgttttttggtgatgaggaccgcagccggaaccaacaagattgtttgcttcgtgtgagccttttcatgttttgataaattctcgggcactcgtgttagacaagacattactccgtattatttagaattggatcttttttatgtttttcatatggatc

SEQ ID NO: 102223 - DNA, 1609 bp, Zea Mays
cattacgccattgtcatgcagtaggaaatcctatctttttcccccctcgagatgcatctctacatatagcacacaagacagagagtgagcggagacgaacaacgcccgcgcagaggccggggctagctagctagctcctccgatggccagccgtggcggcgcatccgtggtgctcgttgtcctgtgcagctcgctgctcgggttcgcgccgcggccaggtgcggccgggaagccgctcgtgccggcgatgttcgtgttcggggactccctggtggacgtcggcaacaacaaccacctggccagcgtcaacgacagctgcaaagcgaactaccggccctacggcgtcgactaccaccccgggcagtcaccgaccggccggttcagcaacggctacaacttggcggaccatctagcacgatggctgggctttgccgggagcccgccacctttcctctccctggcgaacgcgagggcgaggcacactcggcggacgacggtgagcacgggcatcaacttcgcgtccggagggtcgggtctcctccctacaaccggcgattctgtgtgtggcggcgcggtggtttccatggccgagcaagtcggcaacttcacgagcctcgttcggacgacgacgtgggaaggcagcaagagacgggagcggacggcgcccggtctcgtctccgagtcgctcgtcttcatcagcgtcggcagcaacgacctgttcgagtacagcgacttcttcgcagaccctaagaaccgcaacgttagccgcaacgacaccgcgtttctgggagggctcgttgctctttacgcgacctacgtgaaggatctgtacgccgccggggcaaccatgttctccgtcgttagcccgtcgctggtcgggtgctgcccgtcgcagaggaagatagcggaggacacgcacgacgtggacggcttcggctgcctcggcacggcgaacaacctctccaggcagctgtaccccatgatcggctccatgctggagagcctcagccaagacgagctgcccggcatgaagtactcactcggagacgccgtcgcgatggcccagtggatattcacccacgctagcacacctcccaacaacttcactacgcccgaccgcgcgtgctgcggctcaggggatttcggctcgggcgcgtgcaacagttcggctccgctgtgccccaaccggagcagcttcttcttctgggacaggttccaccccaccgagacgttggcggcggtcacggcgcagcagctcttcagcgacaacgggaccttcgtccacccgatcaacgtgcagcagctggtggcgccgtcgtcgcggccatgagcagcatctgttttggctctgattgaatgctcatgcatgcttcgatgatacgtatgatatactatcgctgcaactgtaataatgataataataagcatcagtaagtacgtgtgtggcaactattttaagagattggtttaagctaaaggctgtagagattcttgtcggcgtcgagaaggttctcagggcggcgcgttcgtgaccgaagattcctatatgcactgatatatacctgttgcttgtcatgttcttcccaaacaagatgctggtgtgtgtgtc

SEQ ID NO: 102224 - DNA, 2601 bp, Zea Mays
gctcggcgcctctgcctcggccgctccccgttcccgtcaccgcgccgccggccgccaggatcgcccgccccaccatcctggctcatcagtcctcgccgcgagcccgtgcctggaacgccgcttgcgctaccacgccgcggtcccacgcccgctcccgttccagcgacagggggttactgggacgagatcaaccgtaacctgactgactcactgacggccttgcactctcagcaaaaccgtggcacaagtgggcaccggggaatcagctaggatttaagcttgagccttcgctccaaacctccatggaggcggaggccaggaacatccttgaacgcgccgcggagtcttccttcccaccgctgcacgccgtccaccacctcctttccgtcggggtctgtgtgcgttgcatccttcgcctgcttggagcctatagcagtgcctgctcatatgcatgtcttacggcatcagttttgcattcgttccttgaagaacacgatgagtccataaaaggagggtcatgtccatgtctatcgatgaatgatgcatattgctctgtctgcttgggagtattgctcccaaccttccatcgagatgaaggtctggagacacctaatggcatttctcatattgacaacatgtcttcagtaatatctcaagcagtgcacggggagagttaccaagttgatgagttttctctagaaatttcactaccgccggttatagccgccaatgagcgtgcagttagattatatatgaaacaaaaatatggcaatgagaattggttcaaggacaaaatgtttgcacaacaaacaatgtcagtgaaggaagccttgcgacttttgatagcaccatcactcgagaaactaatgaatgctaaacatggtaacaattcatttagaatccgcttaacatatactcatggtgatgcttcacaaaagcttcatagtttattgccaaatgagcacagccgtaaaaggaaaccagattcaagaaaaggaggtgatgcttcgaatgaggcccataaaaggaattcagcagatggcaaccctatacaaacaagtgaatcagattcattcatctacaagagtcttgagggcatccaagatcaagaattctgtaatgcatttcagttgcctcctgaaaaggtgtttaaaccctgccatcttttaatatcgtgcttgagatcacctacatatcttggtggaagatatttgaagctttcaaggaacgtcagtcagtcatgttggataatagatgatgagagaatgggtgaagcttcagttgaggagataattggggagaatgttcgtgccatctgcagaggtgatagctgcaagttccatgctgctgggagagaagacattgatgtacggatgcttggatctggtcgtccatttctagttgaagtactgaatgttcgatccattccatctgaaactgaagttcaacaaattgaagagagaattaacaactctgaaaagaaatatgtcatagttcgaaatctcaagttggtagataatgaaatatggaccatgatgcgtgaaggagaagcagagaaacagaagcagtacactgcccttatatggacttctcgtgatctgacagatgatgatcttcataatatttctattatgaaggaaatggaaattgtacagaagaccccaataagagtacttcatcgtagaagccccttagagcggaagcgcatcatacactggatggagattgagaaaatcacaggcagctcaaactactacttgctccatctatgcacacaggctggaacatacatcaaggaatttgtgcatggtgatcttggacgcacgcatcccagcatcggagccataatagggtgcagagctgagatattgcaactcgatgtcactgatgttaagatggactttctcccgtagccggaccttcagctgtttatagcatggatagcatgcagtcccaactcctgcagatgatgaggtggtgcgggataacgagctcagaagaacctcatggcagattctgcacggtgcacgcctacatttttgctaaccgagccaagctcaactggtttggtggaaggtgtaatcatatatccagtccccgaagtcttctccaactcaaaacttggggggcgtctattttcctctaatactaacattttcgctagatcctggtcacattttcgctacctttttcttcaaagaaagaaacatttttcccaggtagattgaagtgcaactcccatagtaacatttttgtctacattgtggagaagatcatcccaactcatttggatccattgttatgccttaggttgttgtgcaatgaaattttatgtactttctccgttccaaaaaaccagtctttttagttcttagtttttatctttatttaaatggatgaaaataaatctagacacacatataaaacacatatatcaagtattgtattaacttattaattaattaaaacgaattttaaattttagtctataaattgctaaatatagaaattaaagattttagtttctatatttggtaattttagaactaaaatgaaataaaatgtagagactaaaaattaatccttagaaaccaaacacac

SEQ ID NO: 102225 - DNA, 2474 bp, Zea Mays
cgctccccgttcccgtcaccgcgccgccggccgccaggatcgcccgccccaccatcctggctcatcagtcctcgccgcgagcccgtgcctggaacgccgcttgcgctaccacgccgcggtcccacgcccgctcccgttccagcgacagggggttactgggacgagatcaaccgtaacctgactgactcactgacggccttgcactctcagcaaaaccgtggcacaagtgggcaccggggaatcagctaggatttaagcttgagccttcgctccaaacctccatggaggcggaggccaggaacatccttgaacgcgccgcggagtcttccttcccaccgctgcacgccgtccaccacctcctttccgtcggggtctgtgtgcgttgcatccttcgcctgcttggagcctatagcagtgcctgctcatatgcatgtcttacggcatcagttttgcattcgttccttgaagaacacgatgagtccataaaaggagggtcatgtccatgtctatcgatgaatgatgcatattgctctgtctgcttgggagtattgctcccaaccttccatcgagatgaaggtctggagacacctaatggcatttctcatattgacaacatgtcttcagtaatatctcaagcagtgcacggggagagttaccaagttgatgagttttctctagaaatttcactaccgccggttatagccgccaatgagcgtgcagttagattatatatgaaacaaaaatatggcaatgagaattggttcaaggacaaaatgtttgcacaacaaacaatgtcagtgaaggaagccttgcgacttttgatagcaccatcactcgagaaactaatgaatgctaaacatggtaacaattcatttagaatccgcttaacatatactcatggtgatgcttcacaaaagcttcatagtttattgccaaatgagcacagccgtaaaaggaaaccagattcaagaaaaggaggtgatgcttcgaatgaggcccataaaaggaattcagcagatggcaaccctatacaaacaagtgaatcagattcattcatctacaagagtcttgagggcatccaagatcaagaattctgtaatgcatttcagttgcctcctgaaaaggtgtttaaaccctgccatcttttaatatcgtgcttgagatcacctacatatcttggtggaagatatttgaagctttcaaggaacgtcagtcagtcatgttggataatagatgatgagagaatgggtgaagcttcagttgaggagataattggggagaatgttcgtgccatctgcagaggtgatagctgcaagttccatgctgctgggagagaagacattgatgtacggatgcttggatctggtcgtccatttctagttgaagtactgaatgttcgatccattccatctgaaactgaagttcaacaaattgaagagagaattaacaactctgaaaagaaatatgtcatagttcgaaatctcaagttggtagataatgaaatatggaccatgatgcgtgaaggagaagcagagaaacagaagcagtacactgcccttatatggacttctcgtgatctgacagatgatgatcttcataatatttctattatgaaggaaatggaaattgtacagaagaccccaataagagtacttcatcgtagaagccccttagagcggaagcgcatcatacactggtgatccccaatttatataatcctttattcaaaatattgtatcatgatatcacctgagaagtatttttgtccatcaggatggagattgagaaaatcacaggcagctcaaactactacttgctccatctatgcacacaggctggaacatacatcaaggaatttgtgcatggtgatcttggacgcacgcatcccagcatcggagccataatagggtgcagagctgagatattgcaactcgatgtcactgatgttaagatggactttctcccgtagccggaccttcagctgtttatagcatggatagcatgcagtcccaactcctgcagatgatgaggtggtgcgggataacgagctcagaagaacctcatggcagattctgcacggtgcacgcctacatttttgctaaccgagccaagctcaactggtttggtggaaggtgtaatcatatatccagtccccgaagtcttctccaactcaaaacttggggggcgtctattttcctctaatactaacattttcgctagatcctggtcacattttcgctacctttttcttcaaagaaagaaacatttttcccaggtagattgaagtgcaactcccatagtaacatttttgtctacattgtggagaagatcatcccaactcatttggatccattgttatgccttaggttgttgtgcaatgaaattttatgtactttctccgttccaaaaaaccagtctttttagttcttagtttttatctttatttaaatggatgaaaataaatctagacacac

SEQ ID NO: 102226 - DNA, 810 bp, Zea Mays
atgtctttgtattggtgcagcgttagacctggcttttcttccttcagcttagggagctctgcctcttcaaatgccttaaaggtcgacttgaggcgacgctcaggatgcttgtcagcgggcagggacgcctgcggatccacgaccgacatccgcgcgatagcctcctcaaccgacctggcctcgatgagggaatcatccctgttagtgttttcgacgaggactacgcgctcgtactcctcctcctcggcgacccgcgcggcgcgcttcttggcggcctctgcctcccgctcgaggcggagccgctcctcctcgcggaggcgcacgagctcggcctcggtaaccttggggggcggagcggcaacgcgggacgccttgcgcgcggcggccttggacggcgccgatgcggaagcggcgacggcggcggcctctgcctcggcgaggcggcggttctcggccttgcgagccgcggcctcggcgcgcttctcggcgtcctcctcacggcggcgcgcagcgcgggacttggggccctcagcctcggcccagtactgctcctccttggcgcgctcctggcggtcgcggcggtcggcctccgcggcggagcggcggtcgcgggccgcctccgccttggagttcacgcccatcttcttcggcatcacgggccccctcgtgcggcgactggcgcggcggcgtgtggctgatgtgacggccggatgggccgaagcaactgcaatccggactccgctttgcggttcggggggaatggaggtcggcgaggtgtccttctgtagaaattggccagcggtggggtag

SEQ ID NO: 102227 - DNA, 201 bp, Zea Mays
atgcgacctcaatgttctttgcttatgtcttgtgaaacgaacatttattggtgtgaatgcattataaccttttcttggcaaatggagtttgtgctgattgtacccatgtgcctcagaaaaatcatggttggtgatttgttgaatagacttcagttttttaatgcgacctcagtttttttatctattgaaacaggaaaatga

SEQ ID NO: 102228 - DNA, 348 bp, Zea Mays
ctctctactaatatttttataccaaatcatgaactcgttgttcattacataaattttggaccatgatctcattaatcattacgatacttattgattataaaaagaataagtatattggagataaaacccgcgggtaacccgtgggtacccgctaacccgatgggtacgggtttgggcaaaatttcaaacccgtcacgggtacgggttttttaatgggtgtaaatattttttacgggtacgggtttgggatagcaaaacccggcgggtttgtacccattgccatctctagatgttggtcaactgataaagctctcgtaagaaaccatcacagaataacacggttaaagg

SEQ ID NO: 102229 - DNA, 453 bp, Zea Mays
ttacaaccacatctgtcagaaatggaagatattataccaatcagtatagattgcaggagtaaggatcctatctccaatggcagtgagggggttggccgcctcaacaacctcgatgacgatgttggtggtgccaggcagctcgagcggccacgcgtcgagcatgatcttgacggcgtcgaagatgtcgagatcgtgcagtcgcactgtagagacactggcggcgcggagcagctcggcaacctccgcctcgatgagatcgtcctacgtcctggtgtttcctttgatgatcacgtcgtggacgcggatgcccacaggtccaatgacagccgccgttgcacagactacatccgctctcgctctgccgctgacagaaatgttttcactgctgctgcaattaacagatattcttggggaaatgttggtgacacatacaaatatctagaaacaagttag

SEQ ID NO: 102230 - DNA, 2356 bp, Zea Mays
aaacagttgactctgaactcgcattgcaagccccttcctgacgaaaatggcagcacttgttcctctgctgctcgcccacctactcctctgcgtccatggcgccaccgttacctcggtcgccacgcctccgcctctcccggtcctgcccgtcccgtcctacgcgcagctccggtggcagctctccgagatggcgctcttccttcacttcgggcccaataccttcacggactccgagtggggcaccggccacgctgacccctccgtgttcgctccctccgcactcgacgcgggccagtgggcgcgcatcgcggcgcagggcgggttcggccgcgtcgtgctcacggccaagcaccacgatggtttctgcctgtggccgtcggcactgaccgagtactcggtggccgcctcgccgtggcagggcggggctggggacgtcgtcgcagagctcgccgcagctgcgcgcgcggaggggcttgggctgggcctgtacctctcgccgtgggaccgccacgagccggtgtacggggacaccatcgcgtacaacgagcattacttgggacagatgacagaattgcttaccaggtatggagatgtagaggaagtttggctagatggtgcaaaaggcgacgccaagaagatggattatatgtttgatgcctggttttcacttatacatcagctacaagaaagggtagttatcttctcagatgctggaccagatactagatgggtgggagatgaggcaggagtcgcaggctatacttgctggtctcccttcaacaagagctctgtgacaattgggcataccactgctgaatactcatccagtggggatccttttggtcaagactgggttcctgcagaatgtgatgtttccatcagaccaggttggttctggcatgcctcagagaaaccaaaaaacgtgacaactctgcttgacatatactacaaatcagttggtagaaactgtctcctcattttgaatgtccctcccaattcatctggcctcattgccgatgaagacatacaagtcctccaggaattcactgagattcggcgtgcaattttctctcagaactttgctgccaatgccactgttacagcaaacagtgtgcgtggtgagcaagataatctgcagtttgcaccatccaaagtgcttgaagacgggatatactcctactgggctccgcaggaaggccaaacctgctgggaaatgctcttcgatcttgggcaatctacttccttcaacttgctccagctccaggagcctatacaactggggcagcgtgttattgagttccatgtggctatccttgtagatgaactgtggcaaacaattgttgaaggcacgacaatcgggtacaagaggctgctactgtttccagtcactgaatctcggtacctgaagcttaccatcgacagtgcgcgtgcagatccacttatctcgttctttggtgtcttcatggatcccttctcgtccatacatagtttgcagaatcatgtcaaaccaccccggacaaatagtaacgaagttacaatgttgaggatggcccatgcttctgtcaacaagagtattgacgcaatgtagttgttgagtgtacatctgtcagtattacttctagtctgccctggtcatttcaacatgccagaatcacttgcacgttgatttgttctttggactggagaagggccactcgatggtgggcaatgtgtgtatatcttcagatttgcttgccaaagctactaatacgagaactactctttctgcaatcatgcatggatatgttgttcccaagatcagctgttgaaacttcatgtagtctgtactagtgtctgttgaattatgtgccagcaggaagtctggggtttgaatgaagtgaacgtgcactctctcctctgagactccgtggatgtttgagtcaatgagttgtgatggcttaggggctgttcgtgagtagtgatgccttagggttgtttggttgcctggctaccatcgtgggcaggctgcaataatgcaacagagtttgtttgttacataaaccttagcctagccaggctgaagtagtgtacaaagaagtgctagcctggctaaattagcacatcagacttaagcatttctagatggccaggttacgtttaccaaaatcgaaataccttttcaactagctctttttcttatatctcagaactaaaatgtcttattattaaaccaatttcataattatgactcgactagtcttactatataaattttgaaatacaaaatagactagaccgaaatagataaccaaaaaactctaaccagccaaatagactttagatcatctccaacaagatgctttaaataaaatgcctt

SEQ ID NO: 102231 - DNA, 2887 bp, Zea Mays
atgcttcggcagccccgtctaaatctcctattcatcgcgcaggtgccgccggcgtcgccgtcgccgccgccccagcccctagctgccggcgaacatgtctgagcaggcaccaccttacgctcccttctccctggtctcttcccttgccccagagcctagctctaccccgtcaccgaaccccacccttgtcctccccagtcctgccttccccaacaagcgcaagcgcaccggattccgccgcaaagtaccctccggggcccctgccgctcccgccccctccctcgtggccccctcccagccccctctccccgcctccgctgccgacgatatcatagtgattaaccgggagccgaccgcggaggccgtcaccgcgctcaccgccggcttcccggcggattcgctcactgacgaggagatcgaggcgggcgttgtatccgacgtgggtggcatcgagcaggtcaattacatcctcatccgcaaccacctcctctgccggtggcgcgagacctacaattcctggctcgccaaggagcccttcgcaatgctcatccctccccactgcgagcacctcctcaccgccgcctactccttcctcgtctcaaatagctacgtcaatttcggcgtcgccccagccatcaaggagcgaatccccaaggagcccacgagaccctccaccgttgtcgttgtaggtgctggccttgctgggctagctgcggcacggcagctggtggcgttcgggttcaaagtgatcgtcctggaaggtcgcaaaaggtgcggtgggcgtgtgtacacgaagaagatggaaggcggtgggcgcttggctgctgctgacctcggcggcagcgtgctcacagggacatttggaaacccgctaggaattgtggcgaagcaactcggcttgccaatgcacaaaattagagacaagtgtccactctacaggccggatggctcaccagttgatccagaggtggataagaaagtggagattacatttaaccggcttcttgacaagtcaagcaacctgcgagcatccatggggaaggtggctgcggatgtttcacttggggcggccctagagacattgcgccaggttgatgggggcatctctacagaggaggatatgaacttgttcaattggcatctcgcaaatcttgagtatgccaatgcaggattgctgtctagactaagccttgcgttctgggatcaggatgatccatatgacatgggtggggatcactgcttcttgcctggtggcaatggcaaacttgtgcaggccctggcagagaatgtaccgattgtttatgagaggacggtgcacaccataaggtatggaggggatggggtgcaggtagttgtcaatggagggcaggtgtatgagggcgacatggcattgtgcacggttccacttggggttctgaaaaatggaggcatcaagtttgtacctgagttaccacaaaggaagcttgattgtatcaagaggcttggatttggtttgttgaacaaggtatcgatgctgtttccacatgttttctggagtactgaccttgatacctttgggcatctggttgaagatccgaggcggcgcggggagttctttttgttctatagctatgcaacagtggctggtggtccattgttgatggccttggttgctggtgaagctgcccacaattttgaaacaatgccaccaactgatgctgtcagctcagttctccagatactaagaggtatctatgaaccacaagggattgaggtgccggaccctctacagagtgtttgtactagatggggcactgactcgttcagtctaggctcatactctcatgttgctgtgggggcctctggagatgactatgacgcattagccgaaagtgttggtgatggccgtcttttctttgctggtgaggctaccacgaggcgttatccagcgacaatgcatggtgcttttatcagtggtttgcgggaggctgctaacatcacgctgcatgccaatgcccgggcgacaaagagtaaagtagacagaagtccatcgacaaacacacaggcttgtgctgctacattaacggacttgtttaggcaacctgatttggagtttggaagcttctcggttatttttggaggaaaagcttctgatccgaaatccccagctattctgaaggtggaattaggtgcgtcgcgaaagaaaaatacagccgaaggggtaaagacggaacagaaccactcaaacaaattgttgtttcagcagctccagtcacactttaaccaacaacaacagctttatgtttacacattgctatcacgacagcaagctatggagttaagggaggtcagaggaggcgatgacatgaggttgcactacctctgtgaaaaactgggggtgaaattagttggcaggaaaggccttggccctggggcagatgctgtgattgcatccattaaggcagaacgtaacagaagtcgaactagacctggcccctcaaaactgaaaaaatctctgaagcccaatgttgctgcgtcatgaccactgattgctgatttctcttgggacctgactgcctttaactgatgaaggtgttcatttggttggagcatatgttggtgtgtgctggccaatttgcattggacattcgccaattgttttaggacaaagtagatttggatgaaatctcctagatcctgtaatttcctccgtttcttttgggtgccagaagaaggcatttgtaatgtcacatctgaaatctggctatcgtgcatagcttacttgtctgtgatatgatcgccaatttaagaagcatgtaggtggatgctcgttgtaatctcaaatctgaagagcaatatagctggtgtaccgtgtacatatagacatttggatgacagttatgcgctc

SEQ ID NO: 102232 - DNA, 2377 bp, Zea Mays
ccccgcgcaagtaggtgaggaaagccgaggctccagctgcccgtcgggtttggagcggtccgctcgaccaaccaacgacccctgacggcaatttatgggtgggttagttccggtccggtccggcttcagtcgactccacgcagcagcagccactctgctaggggcagccgtcggtcagtggagtgttgtgggtattgattgccgtccgtcgacggcttcaatcgctgcccgttccggtgcgactgcccgactgctatataggcatgcacatagcctcgcgctctatcgcaaccctgcactgcgtgcgctccatgtgactctcacttatttctcctgtcagcgcagcagcagcagcagcagcctactactactactactgcttttaccggccggtggatcggatcaccaaaccggaacgacagcgatggaggccgggacgtgggcggcggcggccgtggcggccgtggcgctgtacgtggcctggttctggcggatgtcgcgcgggctcagcgggccgcgggtgtggccgctgctcggcagcctgccggggctcgtgcagcacgccgaggacatgcacgagtggatcgccgccaacctgcgccgcgcggggggcacgtaccagacctgcatcttcgccgtgcccggggtggcgcgccgtggcggcctggtcaccgtcacgtgcgacccccggaacctggagcacgtcctcaaggcgcgcttcgacaactaccccaagggccccttctggcacgccgtcttcagggacctgctcggggacggcatcttcaactccgacggcgacacctgggtggcgcagcgcaagacggccgcgctcgagttcaccacgcgcacgctccgcaccgccatgtcgcgctgggtctcccgctccatccacgcccgcctgctgcccatcctcgccgacgcgcacgtcgtcgacctgcaggacctcctgctccgcctcaccttcgacaacatctgcggcctcgccttcgggaaggaccccgagacgctcgcccggggcctccccgacaacgccttcgcctccgcgttcgaccgcgccacggaggccaccctcaaccgcttcatcttccccgagtgcgtctggcgctgcaagaagtggctgggcctcggcatggagaccacgctggcgcgcagcgtccgccacgtcgaccgctacctctcggccgtcatcaaggcgcgcaagctcgagctctccgccgccacgaggaaggacctcctctcggccacgccgcacgacgacctcctctcgcgcttcatgcgcaaggggacctactccgacgagtcgctgcagcacgtggcgctcaacttcatcctcgccggccgcgacacctcctcggtggcgctctcctggttcttctggctggtctccacgcaccccgccgtggagcgcaacatcgtgcgcgagctgtgcgccgtcctggccgggtcccgcggcgtcgaggacccggcactgtggctcgccgcgcccttggacttcgaggagctcgaccgcctcgtctacctcaaggcggcgctctccgagacgctccgcctgtacccctccgtgcctgaggactccaagcacgtcgtcgccgacgacgtcctcccggacggcacgttcgtgccagcgggctcctcggtcacctactccatctactcggcggggcgcatgaagacggtgtggggggaggactgcctccagttccgccccgaacgctggctgtcggacgacggcaccaggttccagccccacgactcgtacaggttcgtggcgttcaacgccggcccgcggatatgcctgggcaaggacctcgcctacctgcagatgaagaacatcgccgggagcgtgctcctccgccaccgcctaaccgtcgcgccgggccaccgcgtcgagcagaagatgtcgctcacgctcttcatgaagcacgggctccgcatggaggtgcgcccgcgcgacctcagcgtcgtcatcgacgagctccgcggcgccggggagtacgacgcggcggcaagagccaccgcggcctccgcatagaggttcgtgcagtgcaggtcgggaaggaaaccaacggacagattggaaacgtcaaatgaaaagttatgtagatattgacagtaagtaattaaagagtttggtgaggtatattactcaattgggaacaaaaatgcatgtgtaaaaagtccatatcattttgatttgcatttgaatgggaggacgaagaaaagcgggccggagagcaataataactctctcatgtaacctgacggggaggcgccaaattggtttcggcagcttgtgttaatgggccgccaaaactgttgttgtttgtaaaaacaaaactcaagcgatcattcattcgatcacttttagccttta

SEQ ID NO: 102233 - DNA, 1834 bp, Zea Mays
catggattcattctataactgctgctgctgctactactagctaggggcagccgtcggtcagtggagtgttgtgggtattgattgccgtccgtcgacggcttcaatcgctgcccgttccggtgcgactgcccgactgctatatagcagcagcagcagcagcctactactactactactgcttttaccggccggtggatcggatcaccaaaccggaacgacagcgatggaggccgggacgtgggcggcggcggccgtggcggccgtggcgctgtacgtggcctggttctggcggatgtcgcgcgggctcagcgggccgcgggtgtggccgctgctcggcagcctgccggggctcgtgcagcacgccgaggacatgcacgagtggatcgccgccaacctgcgccgcgcggggggcacgtaccagacctgcatcttcgccgtgcccggggtggcgcgccgtggcggcctggtcaccgtcacgtgcgacccccggaacctggagcacgtcctcaaggcgcgcttcgacaactaccccaagggccccttctggcacgccgtcttcagggacctgctcggggacggcatcttcaactccgacggcgacacctgggtggcgcagcgcaagacggccgcgctcgagttcaccacgcgcacgctccgcaccgccatgtcgcgctgggtctcccgctccatccacgcccgcctgctgcccatcctcgccgacgcgcacgtcgtcgacctgcaggacctcctgctccgcctcaccttcgacaacatctgcggcctcgccttcgggaaggaccccgagacgctcgcccggggcctccccgacaacgccttcgcctccgcgttcgaccgcgccacggaggccaccctcaaccgcttcatcttccccgagtgcgtctggcgctgcaagaagtggctgggcctcggcatggagaccacgctggcgcgcagcgtccgccacgtcgaccgctacctctcggccgtcatcaaggcgcgcaagctcgagctctccgccgccacgaggaaggacctcctctcggccacgccgcacgacgacctcctctcgcgcttcatgcgcaaggggacctactccgacgagtcgctgcagcacgtggcgctcaacttcatcctcgccggccgcgacacctcctcggtggcgctctcctggttcttctggctggtctccacgcaccccgccgtggagcgcaacatcgtgcgcgagctgtgcgccgtcctggccgggtcccgcggcgtcgaggacccggcactgtggctcgccgcgcccttggacttcgaggagctcgaccgcctcgtctacctcaaggcggcgctctccgagacgctccgcctgtacccctccgtgcctgaggactccaagcacgtcgtcgccgacgacgtcctcccggacggcacgttcgtgccagcgggctcctcggtcacctactccatctactcggcggggcgcatgaagacggtgtggggggaggactgcctccagttccgccccgaacgctggctgtcggacgacggcaccaggttccagccccacgactcgtacaggttcgtggcgttcaacgccggcccgcggatatgcctgggcaaggacctcgcctacctgcagatgaagaacatcgccgggagcgtgctcctccgccaccgcctaaccgtcgcgccgggccaccgcgtcgagcagaagatgtcgctcacgctcttcatgaagcacgggctccgcatggaggtgcgcccgcgcgacctcagcgtcgtcatcgacgagctccgcggcgccggggagtacgacgcggcggcaagagccaccgcggcctccgcatag

SEQ ID NO: 102234 - DNA, 2167 bp, Zea Mays
catggattcattctataactgctgctgctgctactactagctaggggcagccgtcggtcagtggagtgttgtgggtattgattgccgtccgtcgacggcttcaatcgctgcccgttccggtgcgactgcccgactgctatatagcgcagcagcagcagcagcagcctactactactactactgcttttaccggccggtggatcggatcaccaaaccggaacgacagcgatggaggccgggacgtgggcggcggcggccgtggcggccgtggcgctgtacgtggcctggttctggcggatgtcgcgcgggctcagcgggccgcgggtgtggccgctgctcggcagcctgccggggctcgtgcagcacgccgaggacatgcacgagtggatcgccgccaacctgcgccgcgcggggggcacgtaccagacctgcatcttcgccgtgcccggggtggcgcgccgtggcggcctggtcaccgtcacgtgcgacccccggaacctggagcacgtcctcaaggcgcgcttcgacaactaccccaagggccccttctggcacgccgtcttcagggacctgctcggggacggcatcttcaactccgacggcgacacctgggtggcgcagcgcaagacggccgcgctcgagttcaccacgcgcacgctccgcaccgccatgtcgcgctgggtctcccgctccatccacgcccgcctgctgcccatcctcgccgacgcgcacgtcgtcgacctgcaggacctcctgctccgcctcaccttcgacaacatctgcggcctcgccttcgggaaggaccccgagacgctcgcccggggcctccccgacaacgccttcgcctccgcgttcgaccgcgccacggaggccaccctcaaccgcttcatcttccccgagtgcgtctggcgctgcaagaagtggctgggcctcggcatggagaccacgctggcgcgcagcgtccgccacgtcgaccgctacctctcggccgtcatcaaggcgcgcaagctcgagctctccgccgccacgaggaaggacctcctctcggccacgccgcacgacgacctcctctcgcgcttcatgcgcaaggggacctactccgacgagtcgctgcagcacgtggcgctcaacttcatcctcgccggccgcgacacctcctcggtggcgctctcctggttcttctggctggtctccacgcaccccgccgtggagcgcaacatcgtgcgcgagctgtgcgccgtcctggccgggtcccgcggcgtcgaggacccggcactgtggctcgccgcgcccttggacttcgaggagctcgaccgcctcgtctacctcaaggcggcgctctccgagacgctccgcctgtacccctccgtgcctgaggactccaagcacgtcgtcgccgacgacgtcctcccggacggcacgttcgtgccagcgggctcctcggtcacctactccatctactcggcggggcgcatgaagacggtgtggggggaggactgcctccagttccgccccgaacgctggctgtcggacgacggcaccaggttccagccccacgactcgtacaggttcgtggcgttcaacgccggcccgcggatatgcctgggcaaggacctcgcctacctgcagatgaagaacatcgccgggagcgtgctcctccgccaccgcctaaccgtcgcgccgggccaccgcgtcgagcagaagatgtcgctcacgctcttcatgaagcacgggctccgcatggaggtgcgcccgcgcgacctcagcgtcgtcatcgacgagctccgcggcgccggggagtacgacgcggcggcaagagccaccgcggcctccgcatagaggttcgtgcagtgcaggtcgggaaggaaaccaacggacagattggaaacgtcaaatgaaaagttatgtagatattgacagtaagtaattaaagagtttggtgaggtatattactcaattgggaacaaaaatgcatgtgtaaaaagtccatatcattttgatttgcatttgaatgggaggacgaagaaaagcgggccggagagcaataataactctctcatgtaacctgacggggaggcgccaaattggtttcggcagcttgtgttaatgggccgccaaaactgttgttgtttgtaaaaacaaaactcaagcgatcattcattcgatc

SEQ ID NO: 102235 - DNA, 202 bp, Zea Mays
gcctgcgattcttctccccgcggtgttcaacgtgcaaggctgcaaacggaatcggcaaggcgaggcgcagtggggaaaatcccatcgattcgctcggccctcgcccctccgctcgctccagaggcaccggcgccgccgactccggactactactccccgcgacgcaggcgctgtctccctcctcgcgcggcggccgccaccg

SEQ ID NO: 102236 - DNA, 2981 bp, Zea Mays
atgccgacatggtggggtaaatcatcgtcaaaagatgttaagaaaaccaccaaggaaaacctgatcgatacatttcatcgcttgataagtccaaatgagcaaaagggaagcacaaaatcaaaacggaattgcaggcgtggcaataatacagctgctgagaaagtttgcaaatcaacaacagtgtcacgtccaacttctccatcgaaagaagtttctcgctgccaaagtttttcggctgataggctgcatgcccagccacttcctattcctggagtacgccctcgagtaactcgtgcagttgctgatgtcaatgtttcaaagcccatattggaaaaacgtggcaaacctccactgcttttgccacttcctaaacccaatccacttcaccggggacctggaagcagtgatattccttcagaaatagtggttgcttctgtctctagcaattgttctgctgatagtgaggatcgtgcagattctcagcttcagagccctgttgggaatgatactaacaatgtaaaaaaggtttcttcaaagaacaagtcaagtaatgtttgcaaggatcactctggtgctattactaccaagaccacgaaagaaatattgaagccagctgctaatgcattcctcagtaaccatacacagtccgcgccaccaagaggtatctcagctgacaataatcaactaaatttacaaaatccccagccagtagtttttgagagtgctcccaatagtttgatgtcaagtccttcgagaagtccaagaccaatatgtcctgatcatattctgacttcagcattttgggcagtgaagcctcatgctgatgtaactttccttggatctggtcagtgctccagtccaggttcaggacaaacatctggacataattcagtgggtggtgatatgctatcccagctttttttgcagcccaccagaggtagtccagagtgttcaccagttcctagcccaagaatgacaagtcctggtcctagttctcgtgtgcacagtggaagtgtttccccattgcatccaaggtctggaggactggcacctgaatctcctacaagtcggcatgatggtggaaagaagaagcaaacccataaattgccccttccaccattgagcatcgctcacagtccattttttccgaataactcgacaccaagtagtcctatttcagtaccccgtagccctggcagaacagagaatccatcaagtcctgcatcgcgatggaagaagggcaagctgattggtcgtgggacatctggtcatgtatatgttggcttcaacagtgatagtggtgaaatgtgcgcaatgaaagaggttaccctattcttggatgatcctaaatcaaaggagagtgcaaagcaattggggcaggaaatatcactcttgagtcgcttacgacatccaaatattgtacaatactatggatcagaaatggttgaagataaactttacatatatttggaatatgtttctggtggatccatacataaacttctacaagaatatggacagcttggtgaaccagcaatacgcagctacacccttcagatactttcaggcttagcttatttgcatgccaagaatacggtccacagggacatcaaaggtgccaacatactagtaaatccaagtggccgtgttaagcttgcagactttggaatggcaaaacatatcaatgggcagcactgtcctttttcatttaagggtagtccatactggatggctccagaggttataaaaaattctaatggatgcaaccttgtggttgacatatggagtttaggttgcactgtcctggaaatggctacctcaaagccaccatggagccagtatgaagggattgctgcagtgtttaagattgggaatagcaaggaacttccaccaataccggattatctttcggagcactgcagggacttcattaggaagtgtctgcaacgtgacccgtctcaacgtccaacggcagttgagcttttgcaacacccgttcatacaaaatggaatttcacttgagaaatctgttactcctaatcatttggagcatttggctgccatatcatgcagaacaaaacccaaggtggccgtgcagacaagaaatgcctccttaggttttgagggtcagacgatttaccaaagaaggggtgtaaaactatcttcaaaacacagtgatattcacatacgaagcaatacatcctgtccagtttctccatgtcggagccccctgctaaaggcgaggtccccccaacacacaagtggcaaaatgtcaccctctcctatttcgagccccagaactacatcaggcacttccacacccctatctggtggtaatggtgcaattccttttaaccacctaaggtatgcaacttacagcagcgagggatttgggaccacatcaagaggcctagatgatcacttctccaactgtcataaagatctgaaccttgggcattttgctgaggcgcatcaagtctcacagggacctagggaaagggtagtatctgaagctgatattctgagccctcaatttagaaagaaacttggaaatgtatttgacttgcgggaaaggttgtccccttctgaacattttactcgtcgtgccttggtggatcatgtggagctaaatccttcaaaccctggactaaagcgtggtaaataactagagtataaaaggcagggttgcatttttttttgaagtttgttgaagtaactggtggtttttggctactatgaccattcaatggctgcaagtgtatcatagtatcagaaagattgataatttctttagaagctaatggttgccaatggatgggatctctgttgtcatcaacgcaattcaagtcaacaaagattctgcctattcctacatggctgagcaagtttccttagcttactaaactggcgtgctaacaagtgacacgtgtcaattgatgggactgactgaatcacggaatgacccaaagcagtaactctcca

SEQ ID NO: 102237 - DNA, 1618 bp, Zea Mays
gctctgcatgagaacaggagacagcgtctctcttgtgcttgccccgtggccggcgctagctccgatccttcgccccggttcggcctctcccggcgcctcgggtcatgcccacgagaccacgagctacgcgccgcagacggcaggtgcgctctcccgtctcctcgtcttcccgagctgcctcaccggccaccgcatccttctcctcgcggcgacctggctgttccctcgcgtgcgcccgcgttgttcaactcgtctatttttgttgttgttgttacaatcacttgatcgtgatgtcgtggttagggttccggagccaatgtatgctgctgaggcggcaggactctagcagctctcctatctcataccctattccaaacaacactctgtaaaaagtgtaatgtgacgcccgacgcgcctggatgccgaatcgcctggatcgagacgagtctgggatgagcacggcggcgcctcctcctggccagcggtgagcgtccgtgctgtgaggaagacgtcggcaacatgatgaaggcatgacgctcaacaggagactcaaagataagtctggtttgtgttggtattatttcatttcctctcctcttctgatagtgttttatacgctcctaatctgggcctaagtaccagatctattacaaagctgttaaccctaatctgggccagcccacaatcaccatgtaaaatcgctaagaattcaaaccaatccaagtacacaaatgaaacaaagctcattactactatttcctactgatgcacaccctgatccatgacatgtaatgacaggccaagggcctgcttgaatgcgctgcacctattagcgcctggcgcggtagcaattagttaattactagccacacattgcttccatttgctcctccgtggctgctgattgcagaagcacacttttgcagttccatgcggactgtccttgttgtcatatcatatcccaattgacgatctaatattacatagaacgccgttatgaaccctagagaacttcagcttttgtgtagcgggactgcaaacaacatatgttttgccaccgctaccaattccttatgctttacattcgatccctaactctgcgcatgcaactttgtaacttacagtcacacgatggcaaaacagcatcatctgcatccatgcatgggtcgttcgtcgtcgtcactgcctctcctgctggttccactcgagtattgccgaacgaagggccctgttcggcacgagaaggctgcgctcgaggtcgagattcgtcatgggtgatgtgctatgcccgctgtcaagccagcccctaatagcttcaccctcataagtgaatccatccgctgcaacgtaagggtctctcatgatctcctggccaccatcaaattacagccatgagtttacccatttcaatgtatttaggtgttgtttggttcacatatttgtaacgtgaacgtaactcatgacgtttaaccatgtttaagtccaaccgtaatcagataccacactaggaactaataccggcctattcaaacttgataccactaatactctactgtgaatcattaccgctgtcatttatgttacatttgatgaaccaaacaacaccttagtgtcgtta

SEQ ID NO: 102238 - DNA, 2058 bp, Zea Mays
tgagaacaggagacagcgtctctcttgtgcttgccccgtggccggcgctagctccgatccttcgccccggttcggcctctcccggcgcctcgggtcatgcccacgagaccacgagctacgcgccgcagacggcagggttccggagccaatgtatgctgctgaggcggcaggactctagcagctctcctatctcataccctattccaaacaacactctgtaaaaagtgtaatgtgacgcccgacgcgcctggatgccgaatcgcctggatcgagacgagtctgggatgagcacggcggcgcctcctcctggccagcggtgagcgtccgtgctgtgaggaagacgtcggcaacatgatgaaggcatgacgctcaacaggagactcaaagataagtctggtttgtgttggtattatttcatttcctctcctcttctgatagtgttttatacgctcctaatctgggcctaagtaccagatctattacaaagctgttaaccctaatctgggccagcccacaatcaccatgtaaaatcgctaagaattcaaaccaatccaagtacacaaatgaaacaaagctcattactactatttcctactgatgcacaccctgatccatgacatgtaatgacaggccaagggcctgcttgaatgcgctgcacctattagcgcctggcgcggtagcaattagttaattactagccacacattgcttccatttgctcctccgtggctgctgattgcagaagcacacttttgcagttccatgcggactgtccttgttgtcatatcatatcccaattgacgatctaatattacatagaacgccgttatgaaccctagagaacttcagcttttgtgtagcgggactgcaaacaacatatgttttgccaccgctaccaattccttatgctttacattcgatccctaactctgcgcatgcaactttgtaacttacagtcacacgatggcaaaacagcatcatctgcatccatgcatgggtcgttcgtcgtcgtcactgcctctcctgctggttccactcgagtattgccgaacgaagggccctgttcggcacgagaaggctgcgctcgaggtcgagattcgtcatgggtgatgtgctatgcccgctgtcaagccagcccctaatagcttcaccctcataagtgaatccatccgctgcaacgtgtgcctattgtttacctgcaaaattggacatatgaagtacgatgggatgcaagtctcatctgatggagctgtgcatgaaagtggtcgtgctgtcattgaagctgccttcattagtggctcaaccactttccacacatccactgttagatctggccttcgtctcctacttaactcagcacatctcaaggcaatatgcgcaagttggttggcctgtatgaaaggccaacttccagcagtgctatcgatgatggaatgcaaattttctttctcaatggcatcttccactatttcggcaatcctttgaggttgtttccctgtcagtagtcgcaggatgataatgccaaaggagtacacatcagaccgtggtgtgagttcaccagtggtcagaaattcaggatccatataagagaaggttcctcttgggtttgttgttcggtaaagatttgtgctgcaggtgtttgtctgtatcaacaatcgagaaattccaaaatctcctaatttgctagaataattggcatcaagaagaatgtggtctggctttagatcaccgtgtaccacagggtgaggtttgtttgaatgaagaaaaatgagagcagaacacatctctccaattattcgagtgcgggtctgccatgttagtggtcgcgtgttgttcttgcatcccaagcaatcttcaaggcttccatttggaaagaactcgtatactagaccaaaagcttctgggcatgtaccaatcagcgtgacaaggtttggatgccttactgtgctgagaacagaagcctgcattaagattatcataccaatgcaactcacacttccttgtaacagaaaatgtagttttcatacaaaaagagtgattacttacctcttgatggaa

SEQ ID NO: 102239 - DNA, 1852 bp, Zea Mays
tgagaacaggagacagcgtctctcttgtgcttgccccgtggccggcgctagctccgatccttcgccccggttcggcctctcccggcgcctcgggtcatgcccacgagaccacgagctacgcgccgcagacggcagggttccggagccaatgtatgctgctgaggcggcaggactctagcagctctcctatctcataccctattccaaacaacactctgtaaaaagtgtaatgtgacgcccgacgcgcctggatgccgaatcgcctggatcgagacgagtctgggatgagcacggcggcgcctcctcctggccagcggtgagcgtccgtgctgtgaggaagacgtcggcaacatgatgaaggcatgacgctcaacaggagactcaaagataagtctggtttgtgttggtattatttcatttcctctcctcttctgatagtgttttatacgctcctaatctgggcctaagtaccagatctattacaaagctgttaaccctaatctgggccagcccacaatcaccatgtaaaatcgctaagaattcaaaccaatccaagtacacaaatgaaacaaagctcattactactatttcctactgatgcacaccctgatccatgacatgtaatgacaggccaagggcctgcttgaatgcgctgcacctattagcgcctggcgcggtagcaattagttaattactagccacacattgcttccatttgctcctccgtggctgctgattgcagaagcacacttttgcagttccatgcggactgtccttgttgtcatatcatatcccaattgacgatctaatattacatagaacgccgttatgaaccctagagaacttcagcttttgtgtagcgggactgcaaacaacatatgttttgccaccgctaccaattccttatgctttacattcgatccctaactctgcgcatgcaactttgtaacttacagtcacacgatggcaaaacagcatcatctgcatccatgcatgggtcgttcgtcgtcgtcactgcctctcctgctggttccactcgagtattgccgaacgaagggccctgttcggcacgagaaggctgcgctcgaggtcgagattcgtcatgggtgatgtgctatgcccgctgtcaagccagcccctaatagcttcaccctcataagtgaatccatccgctgcaacagatactggctgccccatcatttggtggacaactggaatcagagttctgcgtctgcgatctgcctgagtcaacagtgaagtcctctaaactccgtagtctccttggcttgcctttgaaagtggactcaacatcttcaaatgattgaagcagtgtatcaccagcattttcatatagagagcaaggaacgtggacatgagcaatggcaatccgggagctggaggcgtccctggccaagttgtgcagcgcccacagcaagttgctcttgccgtgcttgagttcttcggggacagcaacgaaaatcttgtcgtcgacagccaaaggcgggctctccgcggcctccctggtgttgctcaccgccgttcttaaggaaagaacgaaagattgcagtcacgcggcgcgcagcatggattgtaatgctgccctccaggacccggaattaaaatgcgaaagacccgaacgttacaaacgaaggcgaggttgtagcatcatttaaaaaaacccgctgtcggaagaaatcactttggtatcttcgtgaatcgggaccggatattcatggcatttggtagacttttctggctgcgaggtgaaattactggagacctgcatagacgaagtaccgtctgttgctcgttactgctctgccagtcgtcgtctaacacgattgtttcgatg

SEQ ID NO: 102240 - DNA, 3516 bp, Zea Mays
tgagaacaggagacagcgtctctcttgtgcttgccccgtggccggcgctagctccgatccttcgccccggttcggcctctcccggcgcctcgggtcatgcccacgagaccacgagctacgcgccgcagacggcagggttccggagccaatgtatgctgctgaggcggcaggactctagcagctctcctatctcataccctattccaaacaacactctgtaaaaagtgtaatgtgacgcccgacgcgcctggatgccgaatcgcctggatcgagacgagtctgggatgagcacggcggcgcctcctcctggccagcggtgagcgtccgtgctgtgaggaagacgtcggcaacatgatgaaggcatgacgctcaacaggagactcaaagataagtctggtttgtgttggtattatttcatttcctctcctcttctgatagtgttttatacgctcctaatctgggcctaagtaccagatctattacaaagctgttaaccctaatctgggccagcccacaatcaccatgtaaaatcgctaagaattcaaaccaatccaagtacacaaatgaaacaaagctcattactactatttcctactgatgcacaccctgatccatgacatgtaatgacaggccaagggcctgcttgaatgcgctgcacctattagcgcctggcgcggtagcaattagttaattactagccacacattgcttccatttgctcctccgtggctgctgattgcagaagcacacttttgcagttccatgcggactgtccttgttgtcatatcatatcccaattgacgatctaatattacatagaacgccgttatgaaccctagagaacttcagcttttgtgtagcgggactgcaaacaacatatgttttgccaccgctaccaattccttatgctttacattcgatccctaactctgcgcatgcaactttgtaacttacagtcacacgatggcaaaacagcatcatctgcatccatgcatgggtcgttcgtcgtcgtcactgcctctcctgctggttccactcgagtattgccgaacgaagggccctgttcggcacgagaaggctgcgctcgaggtcgagattcgtcatgggtgatgtgctatgcccgctgtcaagccagcccctaatagcttcaccctcataagtgaatccatccgctgcaacgaacgtggacatgagcaatggcaatccgggagctggaggcgtccctggccaagttgtgcagcgcccacagcaagttgctcttgccgtgcttgagttcttcggggacagcaacgaaaatcttgtcgtcgacagccaaaggcgggctctccgcggcctccctggtgttgctcaccgccgttcttaaggtgtgctggaaagaacgaaagattgcagtcacgcggcgcgcagcatggattgtaatgctgccctccaggacccggaattaaaatgcgaaagacccgaacgttacaaacgaaggcgaggttgtagcatcatttaaaaaaacccgctgtcggaagaaatcactttggtatcttcgtgaatcgggaccggatattcatggcatttggtagacttttctggctgcgaggtgaaattactggagacctgcatagacgaagtaccgtctgttgctcgttactgctctgccagtcgtcgtctaacacgattgtttcgatgcatcgatgtgaaaatgctcagcaaacagcatattctgaggctgcatttgctcgctgccgcttcctctgcagaaaccttttgacttcttaacaatcacgagattcttcgccgtgtgtgtcttttgttatcacggtctgcctgaaattcatcaaaaaacaagtggcatcaaaattgccctatgccacatttctcttgctagcccggccccgatcagaactgaagcccatgatggatgagggcccagtcccctgcatggaccacttcctcggcgtcgggactcgggactgcgacccggcaacagaagcacggaagcaggagacgaccaataggcaatagcaacgcgccggcggctcggcggcgtcgaacgattcgggcaatcgacaagcagccccaccaaaccaggaaactgcaaacctacccccggtcgccgactcgccgacctcgactctccgcccagactacaaatggagctctgcacctgcgcggcccgcagttctgcgcccccctcttctagctgccgcgcggcgccattcccgcgagttctctcccatcgcatttggagccgatcgggatactgcactgtctgctttaccccgtcaagccctgttgctaggagtcgattctctactctaatgacgactgcacacaacacagggaccccagatctagttgacttcaattgggatgatcttgggtttcaactgatcccaacggacttcatgtatttaatgagctgttcttcagatggggtgtttatgaatggtaaattagtgccatatgggtcaattgagctgaatccagcagccgccgtgctgaattatggtcagggattgcttgaaggtctacgatcacatagaaaagaggatggatcaatccttctttttcgtccacatgaaaatgcacggcggatggaaattggtgcagaccggttatgcatgcctgcaccaagtgtagagcaattcctagaagctgtgaaactaactgttctggcaaacaagcattgggtgcctccttttggtaaaggttctttgtatatcagaccgcagctaattggaagtggggctatgcttggtgtggcacctgccccacagtacacattcattgtgtttgtttgcccagttgggcattatttcaagggtggtctagctccaatcagcttgttaactgaggaagaataccaccgtgctgcacctggtggaactggtgatataaaaactattgggaactatgcttcggttgtcagtgctcagagaagatccaaggaaaaaggccattctgatgttttatacttagatccactccataataagtttgttgaggaagtttcttcttgtaatatattcatggtgaaggacaatattatttctactccactgttaacggggacaattcttcctggaatcacaaggagaagtgtgattgaaatttctcagaatcttggatttcaggttgaggagcgtcttatcacaatagatgaactgcttggggctgatgaagtcttttgtacaggaacagctgttgtattgtcacctgttgggagcatcacttaccgtggaagaagagtggagtatgggaagaaccaggaggccggagtcgtgtcccaacaactctatgccgcactcacagctatccagaaaggtctcacggaggacagcatgggatggacgttgcagctaacttagcagcttttttcacatgatcgagctctacaactcttatttccgttttctcgataagtctcacttctatcaacttgttcttctgttgaaacagagtactttaaaagggatccccaataatgactttccctgtgtattgctgatatgttggcactagata

SEQ ID NO: 102241 - DNA, 2040 bp, Zea Mays
aacagaagcacggaagcaggagacgaccaataggcaatagcaacgcgccggcggctcggcggcgtcgaacgattcgggcaatcgacaagcagccccaccaaaccaggaaactgcaaacctacccccggtcgccgactcgccgacctcgactctccgcccagactacaaatggagctctgcacctgcgcggcccgcagttctgcgcccccctcttctagctgccgcgcggcgccattcccgcgagttctctcccatcgcatttggagccgatcgggatactgcactgtctgctttaccccgtcaagccctgttgctaggagtcgattctctactctaatgacgactgcacacaagtatgatgcgacaagtctgtataactgaccctctgttttgctttgggaattgggacgatgcaccgccgctaagattaactagcaaaaaggcacagggaccccagatctagttgacttcaattgggatgatcttgggtttcaactgatcccaacggacttcatgtatttaatgagctgttcttcagatggggtgtttatgaatggtaaattagtgccatatgggtcaattgagctgaatccagcagccgccgtgctgaattatggtcagggattgcttgaaggtctacgatcacatagaaaagaggatggatcaatccttctttttcgtccacatgaaaatgcacggcggatggaaattggtgcagaccggttatgcatgcctgcaccaagtgtagagcaattcctagaagctgtgaaactaactgttctggcaaacaagcattgggtgagggcgttgcacacctcttgttgaatatgtgatgcatctctcatgtctcacccaccatgttctgcattacaggtgcctccttttggtaaaggttctttgtatatcagaccgcagctaattggaagtggggctatgcttggtgtggcacctgccccacagtacacattcattgtgtttgtttgcccagttgggcattatttcaagggtggtctagctccaatcagcttgttaactgaggaagaataccaccgtgctgcacctggtggaactggtgatataaaaactattgggaactatgcttcggttgtcagtgctcagagaagatccaaggaaaaaggccattctgatgttttatacttagatccactccataataagtttgttgaggaagtttcttcttgtaatatattcatggtgaaggacaatattatttctactccactgttaacggggacaattcttcctggaatcacaaggagaagtgtgattgaaatttctcagaatcttggatttcaggttgaggagcgtcttatcacaatagatgaactgcttggggctgatgaagtcttttgtacaggaacagctgttgtattgtcacctgttgggagcatcacttaccgtggaagaaggtaagtacttcagccaaactacttgttttccagtagttgtgctatttgagtgcatgaggaaatgctgacgctccacttaagtactagtctgagttataaatgactacaagcagcatttgacgagacataggaacatattggaccttcagtttcactaaatagttggtaaagacatatgtgttccaattatctgaccactgtgattattgttgatttattttcacataataactcggttgctagcccaccttcgacactaaagaaaaagaaatgtgctcctcaactcgatcaataattgttgcgctttcacgaaactagtaaatgttggctgtctatcgacttcttgtccactgcagagtggagtatgggaagaaccaggaggccggagtcgtgtcccaacaactctatgccgcactcacagctatccagaaaggtctcacggaggacagcatgggatggacgttgcagctaacttagcagcttttttcacatgatcgagctctacaactcttatttccgttttctcgataagtctcacttctatcaacttgttcttctgttgaaacagagtactttaaaagggatccccaataatgactttccctgtgta

SEQ ID NO: 102242 - DNA, 1750 bp, Zea Mays
aacagaagcacggaagcaggagacgaccaataggcaatagcaacgcgccggcggctcggcggcgtcgaacgattcgggcaatcgacaagcagccccaccaaaccaggaaactgcaaacctacccccggtcgccgactcgccgacctcgactctccgcccagactacaaatggagctctgcacctgcgcggcccgcagttctgcgcccccctcttctagctgccgcgcggcgccattcccgcgagttctctcccatcgcatttggagccgatcgggatactgcactgtctgctttaccccgtcaagccctgttgctaggagtcgattctctactctaatgacgactgcacacaagtatgatgcgacaagtctgtataactgaccctctgttttgctttgggaattgggacgatgcaccgccgctaagattaactagcaaaaaggcacagggaccccagatctagttgacttcaattgggatgatcttgggtttcaactgatcccaacggacttcatgtatttaatgagctgttcttcagatggggtgtttatgaatggtaaattagtgccatatgggtcaattgagctgaatccagcagccgccgtgctgaattatggtcagggattgcttgaaggtctacgatcacatagaaaagaggatggatcaatccttctttttcgtccacatgaaaatgcacggcggatggaaattggtgcagaccggttatgcatgcctgcaccaagtgtagagcaattcctagaagctgtgaaactaactgttctggcaaacaagcattgggtgagggcgttgcacacctcttgttgaatatgtgatgcatctctcatgtctcacccaccatgttctgcattacaggtgcctccttttggtaaaggttctttgtatatcagaccgcagctaattggaagtggggctatgcttggtgtggcacctgccccacagtacacattcattgtgtttgtttgcccagttgggcattatttcaagggtggtctagctccaatcagcttgttaactgaggaagaataccaccgtgctgcacctggtggaactggtgatataaaaactattgggaactatgcttcggttgtcagtgctcagagaagatccaaggaaaaaggccattctgatgttttatacttagatccactccataataagtttgttgaggaagtttcttcttgtaatatattcatggtgaaggacaatattatttctactccactgttaacggggacaattcttcctggaatcacaaggagaagtgtgattgaaatttctcagaatcttggatttcaggttgaggagcgtcttatcacaatagatgaactgcttggggctgatgaagtcttttgtacaggaacagctgttgtattgtcacctgttgggagcatcacttaccgtggaagaagagtggagtatgggaagaaccaggaggccggagtcgtgtcccaacaactctatgccgcactcacagctatccagaaaggtctcacggaggacagcatgggatggacgttgcagctaacttagcagcttttttcacatgatcgagctctacaactcttatttccgttttctcgataagtctcacttctatcaacttgttcttctgttgaaacagagtactttaaaagggatccccaataatgactttccctgtgtattgctgatatgttggcactagatatttttggaaactctatttaaagcacagtgttttgcaccacaa

SEQ ID NO: 102243 - DNA, 2977 bp, Zea Mays
atggcgttttggaggccgaaaattcgatcttggcgctggtctcagtgtttcgaggcctcgaggggttgctgtgaagaaccagaggaagataaaaaggtggttttctcgccggttttccttggttttggggtactgaattctgagattgttctgaggcaggggtctgtcttgctggagaatgaagatgtggaggtagaacgtactttgagtacaaatgcttctggcatgatcaaaagagataaaaaaggtcttgacgatatccatggaaacatatctgctaataatggaaaggaccacagggttgaattgatttatgttggtaggtcaagtattagaactttgatggaagaagagatggccagcagcacacagcccttgaagcaagcacaaagcaatgtcgctgggatatgctctgaagatattgatctaaacttggctggaagtctcatggaaatctacagatctcatactgaaggccaagaaaccaggaggtcgattgagtcaggtcgcagttccatttcgactgacgaagagaagaatactgaccctcctgctcatcactatcagatcccatctagtatccagagagctctagaagatgttgctgaagcagttataagacatcaatctgcaaacaaaaaatacataaacagcggtgatgaaactaggtccagagaattcgttgatgccctacagctactgagctcaaacaaggaattgtttgtgatgcttatgcaagatccaagctctaggttgttagaatgtctccaaaacctttacatgtcactaggaagtaccaggttagactctgaagaatatgacgaaggaactgagttgcaaggtacgacagatagtctagagcagtcagcgacttctccaagtaaggtgaaaagaaggcataattctttcttgaaggaggatgggttggtcacgaggaagccaccaaagttaaatgatggttctcgtggccttagcagaatagtaatcttgaagcccagtcctgcaagaggtcatagcagtcttatctcaggtagcgcaacttcatcaccactatcaaatcatattgattggcaagttcaggaaggcagtgataaacatgattgccatttctcgcttagagagcttaaaaggaggctaagaattgccattagcaataatcagaaggatcaccagttaaactccacgagtagtgatattcatgaagctgaggctgattctggcaaactgcttccagtcacaagtatgtcggagacggagagtctggcaagtacagattcttctgacagggctaaggaaccatctattgttgacgagaaaatagtcccggaagatagtgaaagtgggatgagaaatgatgttgctcatggtgtcggagtcagctctttctcatatgaaaaagctaagatgtatataattgagagactaaatgatcaaggcgaagaaagttgtcaaattgtacagaaatctgaatcttttgagagattgatttcactgcccgagaatggtacattttctccaattgatttccctcaagaggagaaaattagcatagcgcatgaagctacaaaaccattgaacttgcatactgttgagcaagaggatggttcagcaagcccttactcaacaatgcagtacgaggagacagaatcagccgacactagcaacttaggtacagaaacgttgattgagcccacgatagatcatggtagttattcacaaaatgagggcgctatctcacaggagttggtccgtgaaggggttaagatcatgctagatataatggagaactcatcgctctgtgctgagactggaacttcgcaggaaggagtgggagtgaaaaatccagatgaatgttcattggaggaaccacaatccatgaatttgttgccagaaccggcactgtattctccagatgacttcgttaatgaacaagagaaccatagtccgtcagaaattgttgaattagtcaaaccatctgtattgacatttccttactcgccggaaaatactaatgacaaagaggagaaattgagtccacaatccgttcttgatcccattgcagaagttaccagtcctagacacaaaactccaaagcaagatgaattctccatgcctacttccagagtgctattcaaagaggttgacgccccttcagcatccccaactttgtggaatgggccacaggtagccattttggatgacagagccacaagggtgtccttcatcaaggccgtgctagaagcttcaggattgctgtctgaggaaaattcgcaaatttggtacacagaagagccactgcttgatgtatctgtattggctgaagtaggaaactcgtactgcctgacagacgatgcagtgctcttgtttgactacgtggaagaggttcttctcgagataagggacaagttctttggtagcgacccttgggttaattctctgaaacacaatgtacggccagctccagtaggaagacggctggttcgagaggtggctaagggaatcgattctcttgtaggtaaagaatttccacacactttagaacaggtaatgatgaaagacttggacagtgggtcgtggctggatcttggaggcgatactggaagtgttgtagttgagttgtgggatggtttacttgatgacttgctggaggaactggtttttgatttgtggctttgatactgtagtgctttgtagtaatacatgcagaggcatattcgactagtactgacatggggttaatagatacagaaaccttttgcgaaaggatagggaaaagtgagttcggcagactgccagatgttgtagagctaggcatttcatcaatatagttgatttccattttcttttgaatttgatttctttaagctccctttgttctctgtagaggcatggaaacataaaaaataagtgctcctgtatataaagtaccccagtatttatggtaaattttcattgtgaacataatattgtttccgtt

SEQ ID NO: 102244 - DNA, 834 bp, Zea Mays
cagccagctacacacacacatcacttgccaggccagttgcgcttgcgccgcgcgcgctctctctatctgcttgtcgtgcagagaaagtgaggcgctgcgctgcgctccgccgcgcagatgtgggcgccgggctcgcctgggaggctgccggcgatggtggagtgcgacgaggacgggcacggggacgcgtaccacgggacgatggcctcctgctggggccgcttcggcgccgccgcgctgtggcgcaggctacggcggcgtgtcagcctggtgcggcgcaggcggcggcgcggccgctccctcctcggcgggctaaactacgacccgctcagctacgcgcagaacttcgacgacgggtgcctggaggagcgcgagccggacttcagcgccaggttcgcgcccgcgcgccacgccgccgccggctccccgcggcccacggcctgacggcgtactagatttttttttattacgacgtactacccccgctcggtgctctgctcgcagtcgcagcgcgccattggaagagtcaagagtggcaggtaattgctcctccgcacgtcctttagttgataaatgtatatacatggtacaccgtacacgccgtcgactcgcatggatggattggatggatgtaattaaatacagtagcaggtatcgttagtcgatctcgatcggaacgaaaaataagttcttgccgattggctggcttccttcatccggcagcgttcgttcttgcggctgcaggattcttgaggttttgacgtgttcatgtacgcctgtgcctgtgtttcgggcttcggcacagcgatcgcctaaatcgttctaggtcttgtg

SEQ ID NO: 102245 - DNA, 125 bp, Zea Mays
ttatttttttggattggttaactaacagttctcgacgattatttgctgcagacactgttgttttcttttcctttttcttttcttttatttactcgattcaaggactgctagtggccaaagggcac

SEQ ID NO: 102246 - DNA, 2094 bp, Zea Mays
taccgatctagaatcgagttgttgtactctctctgtcccttttgtgcagctataactagctaggttccttcgcatagagcctctctacagagtacagactagctagcagtgtcaggcacgaaatggaaatggctacttccaaattgcacgagctggaattatatactcttctgatcttcttcaccgtctctttatagcgtgatatgcgtttctggcttcttgcttgcgtgaaggattagtaaggcgcgtgatggcgctctcagcttgcccggctcaggaagaactgctgcagcctgctgggaggccgttgaggaagcagcttgctgcagccgcgaggagcatcaactggagctattccctcttctggtccatttcaagcactcaacgaccacgggtgctgacgtggacggacgggttctacaatggcgaggtgaagacgcgtaagatctcccactccgtggagctgacagccgaccagctgctcatgcagaggagcgagcagctccgggagctctacgaggccctccagtccggcgagtgcgaccgccgcgcggcgcggccggtgggctcgctgtcgccggaggacctcggggacaccgagtggtactacgtgatctgcatgacctacgccttcctgcctggccaaggcttgcccggcaggagttccgcgagcaacgagcatgtctggctgtgcaacgcgcacctcgccggcagcaaggacttcccccgcgcgctcctggccaaggtgccggaggacccggacttgatcaaccgagcaaccgcagcctttcgggagccgcaatgtccgatatactcggaacagccgagctccaacccgtcagcagacgaaaccggcgaggccgcagacatagctgtgttcgagggcctcgatcacaatgccatggacatggagaccgcaggcatagctgtgttcgagggcctcgatcacaatgccatggacatggagacggtgactgccgccgccgggagacacggaaccggacaggagctaggagaagccgacagcccgtcaaatgcaagcctggagcacatcaccaaggggatcgacgagttctacaacctctgcgaggaaatggacgtgcagccgctagaggatgcctggataatggacgggtctaatttcgaagtcccctcgtcagcgctcccggtggatggctcaagcgcacccgctgatggctctcgcgcgaccagtttcgtggcttggacgaggtcatcgcagtcctgctccggtgaagcggcggctgtgccggtcatcgaagagccgcagaaattgctgaagaaagcggtggccggcggcggtgcttgggcgaacacgaactgcggtggcgggggcacgacggtaacagcccaggaaaacggcgccaagaaccacgtcatgttagagcgaaagcgccgggagaagctcaacgagatgttcctcgttctcaagtcgttggttccctccattcacaaggtggacaaagcatccatcctcgccgaaactatagcctacctaaaggagcttcaacgaagggtacaagaactggaatccaggaggcaaggtggcagtgggtgtgtcagcaagaaagtctgtgtgggctccaactccaagaggaagagcccagagttcgccggtggcgcgaaggagcacccctgggtcctccccatggacggtaccagcaacgtcaccgtcaccgtctctgacagggacgtgctcctggaggtgcaatgcctgtgggagaagctcctgatgacacgggtgttcgacgccatcaagagcctccatttggacgctctctcggttcaggcttcggcactagatggcttcatgaggctcaagataggagctcagtttgcaggctccggcgccgtcgtgcccggaatgatcagccaatctcttcgtaaagctatagggaagcgatgaaagggcgctacatgtgaagcttaattaatggaagcaaacttgtatttcttgtgcaaaagcttactatatatttctgcaaaacctggtgtgccttgttttgattttcagtcgccaattgtgcccttgtttttatcaagtgatgatctacactatatatatggaatatttga

SEQ ID NO: 102247 - DNA, 1556 bp, Zea Mays
tctcgtacacagagtatatacatggagccagccaatcgaggcaccgcatgtccactcagatctgaaatgtcaatggaatccgttgccgttgccgtcgtggcggtgccgttcccggcgcagggccacctcaacggcatgctgcacttgtctctgctactcgcgtcccgagggctttccgtgcactacgcggcgccggggccgcacgtccgccaggcgcgcgcgcgcgtgcacggctggggcgacgacgcccaccgccgcatcgagttccacgagctcgaggtccccgcgtacgccaccccgccgccggacccggtcgcgccctcgccgttcccgacccacctcatccccatgagcgaggccttcctcgcgggcgcgcgcgccccagtcgccagcctcatcgggagggtctccgcgcgccaccgccgcgtggtggtcctgtacgatcgcctcagctccttcgccgcccccgaggcggcgcggatccccaacggcgaagcgttctgcctgcagtgcgtggccgcgtgcttcgacgccgcgtggacggacgccgggcagcggctcctgcgcaagcacggcctcgacgccccgcaccccggcgcctgcatgccgagggagttcgtggagtacattgtcaggacgcaggaggacagccggagtccggcgttcgctggggtagtggcgaacacgtgccgcgcgatcgagagcgagttcatcgacgtggtggccggggaccctgagaaccgaggaaagagagtcttcgcagtcgggccgatgaatccgctgcttaacgtgaccgcgccgacagcgggacagagtgcacggcacgagtgcttggactggctcgacaagcaaccgccggcgtcggtgctgtacgtgtcgttcggcacgacgtcgtcgctgcgggcggagcagatcgcggaactcgccgcggcgctgcgcgacagcaaacagcggttcgtctgggttctgcgcgacgctgatcgcggtgtggtacacgaggaggaagccgtggagagtaggcacgccaggttcctatccgagttcaccgaggaaactcaaggcatcgggttggtgatcaccgggtgggcgccgcagctggagatcctggcccacggcgccacggcagcgttcatgagtcactgcggctggaactcgaccatggagagcctgagccacgggaagccgatgctcgcctggcccatgcactccgaccagccgctggtggcggagctcgtgtgcaagtgcctcaaggccgggctcctcgtaaggccatgggagcaacacagtgctgtgacacctgcggaaaccatccgcgaggtgatcgagaaggtgatggcacgcgatgaaggtttggcggtgcgggagagggccaaggagctcatggagtttattcgccgctctgtggccgagggcgggtcttcgcgcaaggaccttgacgacttcgttgcttacatagcaagatgaaatgcgtcctgtatttgactatttctactagtttcaattttgagttctcgtgatgaaaaccatatctatactatacttaaagcatcagtttc

SEQ ID NO: 102248 - DNA, 105 bp, Zea Mays
tcagggtccctttctgtcgcaagagtatctatcatgacactaaaagaagttagcaggttggctaggcaactaatatcgcccacaagaggaaagagaaaaaaaaaa

SEQ ID NO: 102249 - DNA, 1246 bp, Zea Mays
cctcccgttggtactgtacattctcttcctcgactcctcgttctcccctctcctagtctttggcgcgtagtggcgaactggagaggtctgatgggaagtaaagacggcaccggtgacatatcggaagcccaaggctatgctgccgacattgattccatcagggaggcgcaggcccgcattgcgccgtacgttcacaggacgcccgttatgtcgtcgacgtccatcgatgccatggtggggaagaagctcttcttcaagtgcgagtgcttccagaaagcgggcgcattcaagatccgaggtgcttcgaattcgatattcgcacttgacgatgagcaggtatcaaagggcgttgtgacacatagcagtgggaaccatgccgctgctgtggctttggctgcaaagctgcgtggcatacctgcgcacattgtcattccaagaaatgcaccagcgtgtaaggttgaaaatgttaagcgctacggtggtcatattatttggagcgatgccagcattgaatcgagagaatatgtttgtaaaagagtccaggaggagaccggcgctgttcttattcatcccttcaatagtaaatacactatcagtggtcagggtacagtatcccttgaacttttggagcaagtccctgaaattgacacaataattgttcccattagtggtggtggtttaatttctggtgtggcccttgctgcaaaggccataaacccttcgatacgcattctagcagcagaaccaaaaggtgctgatgattctgctcagtctaaggctgctggaaagatcatcacattgccttccacaaacaccattgctgatggactacgagcttttcttggagacctgacatggcctgtggtgcgtgacttggtggacgatgttatcgttgtggatgacactgccattgtggacgccatgaaaatgtgctatgagatcctgaaggtggctgttgagcccagtggcgcaattggcctggccgcagcactgtccgacgagtttaagcaaagctctgcttggcacgagagcagcaagatagggataattgtttctggagggaatgttgaccttggcactctctggcagtctatgtacaaacactgattggagagagtaggaccgatgatattgcccttgaatttcaaacgtgatagttttagacaagtcgtttgtaaacttggaatagttcgttgtaaacatcacttattacctgtttttttatcaatgggttattcagttgcag

SEQ ID NO: 102250 - DNA, 1399 bp, Zea Mays
cctcccgttggtactgtacattctcttcctcgactcctcgttctcccctctcctagtctttggcgcgtagtggcgaactggagaggtgtacaatcgtccggcgatccggacttcgattggttctctgctgttggtctgatgggaagtaaagacggcaccggtgacatatcggaagcccaaggctatgctgccgacattgattccatcagggaggcgcaggcccgcattgcgccgtacgttcacaggacgcccgttatgtcgtcgacgtccatcgatgccatggtggggaagaagctcttcttcaagtgcgagtgcttccagaaagcgtgagggttactgaccgatgtgtttttcggttctgggatgctctataattggtacagtacttattgtttgagtggggaaatgttgagttttgttgtgtaggggcgcattcaagatccgaggtgcttcgaattcgatattcgcacttgacgatgagcaggtatcaaagggcgttgtgacacatagcagtgggaaccatgccgctgctgtggctttggctgcaaagctgcgtggcatacctgcgcacattgtcattccaagaaatgcaccagcgtgtaaggttgaaaatgttaagcgctacggtggtcatattatttggagcgatgccagcattgaatcgagagaatatgtttgtaaaagagtccaggaggagaccggcgctgttcttattcatcccttcaatagtaaatacactatcagtggtcagggtacagtatcccttgaacttttggagcaagtccctgaaattgacacaataattgttcccattagtggtggtggtttaatttctggtgtggcccttgctgcaaaggccataaacccttcgatacgcattctagcagcagaaccaaaaggtgctgatgattctgctcagtctaaggctgctggaaagatcatcacattgccttccacaaacaccattgctgatggactacgagcttttcttggagacctgacatggcctgtggtgcgtgacttggtggacgatgttatcgttgtggatgacactgccattgtggacgccatgaaaatgtgctatgagatcctgaaggtggctgttgagcccagtggcgcaattggcctggccgcagcactgtccgacgagtttaagcaaagctctgcttggcacgagagcagcaagatagggataattgtttctggagggaatgttgaccttggcactctctggcagtctatgtacaaacactgattggagagagtaggaccgatgatattgcccttgaatttcaaacgtgatagttttagacaagtcgtttgtaaacttggaatagttcgttgtaaacatcacttattacctgtttttttatcaatgggttattcagttgcagccaca

SEQ ID NO: 102251 - DNA, 1312 bp, Zea Mays
gttggtactgtacattctcttcctcgactcctcgttctcccctctcctagtctttggcgcgtagtggcgaactggagaggtgtacaatcgtccggcgatccggacttcgattggttctctgctgttgaattgattgtctgtgctaggtctgatgggaagtaaagacggcaccggtgacatatcggaagcccaaggctatgctgccgacattgattccatcagggaggcgcaggcccgcattgcgccgtacgttcacaggacgcccgttatgtcgtcgacgtccatcgatgccatggtggggaagaagctcttcttcaagtgcgagtgcttccagaaagcgggcgcattcaagatccgaggtgcttcgaattcgatattcgcacttgacgatgagcaggtatcaaagggcgttgtgacacatagcagtgggaaccatgccgctgctgtggctttggctgcaaagctgcgtggcatacctgcgcacattgtcattccaagaaatgcaccagcgtgtaaggttgaaaatgttaagcgctacggtggtcatattatttggagcgatgccagcattgaatcgagagaatatgtttgtaaaagagtccaggaggagaccggcgctgttcttattcatcccttcaatagtaaatacactatcagtggtcagggtacagtatcccttgaacttttggagcaagtccctgaaattgacacaataattgttcccattagtggtggtggtttaatttctggtgtggcccttgctgcaaaggccataaacccttcgatacgcattctagcagcagaaccaaaaggtgctgatgattctgctcagtctaaggctgctggaaagatcatcacattgccttccacaaacaccattgctgatggactacgagcttttcttggagacctgacatggcctgtggtgcgtgacttggtggacgatgttatcgttgtggatgacactgccattgtggacgccatgaaaatgtgctatgagatcctgaaggtggctgttgagcccagtggcgcaattggcctggccgcagcactgtccgacgagtttaagcaaagctctgcttggcacgagagcagcaagatagggataattgtttctggagggaatgttgaccttggcactctctggcagtctatgtacaaacactgattggagagagtaggaccgatgatattgcccttgaatttcaaacgtgatagttttagacaagtcgtttgtaaacttggaatagttcgttgtaaacatcacttattacctgtttttttatcaatgggttattcagttgcagccaca

SEQ ID NO: 102252 - DNA, 1293 bp, Zea Mays
gttggtactgtacattctcttcctcgactcctcgttctcccctctcctagtctttggcgcgtagtggcgaactggagaggtgtacaatcgtccggcgatccggacttcgattggttctctgctgttggtctgatgggaagtaaagacggcaccggtgacatatcggaagcccaaggctatgctgccgacattgattccatcagggaggcgcaggcccgcattgcgccgtacgttcacaggacgcccgttatgtcgtcgacgtccatcgatgccatggtggggaagaagctcttcttcaagtgcgagtgcttccagaaagcgggcgcattcaagatccgaggtgcttcgaattcgatattcgcacttgacgatgagcaggtatcaaagggcgttgtgacacatagcagtgggaaccatgccgctgctgtggctttggctgcaaagctgcgtggcatacctgcgcacattgtcattccaagaaatgcaccagcgtgtaaggttgaaaatgttaagcgctacggtggtcatattatttggagcgatgccagcattgaatcgagagaatatgtttgtaaaagagtccaggaggagaccggcgctgttcttattcatcccttcaatagtaaatacactatcagtggtcagggtacagtatcccttgaacttttggagcaagtccctgaaattgacacaataattgttcccattagtggtggtggtttaatttctggtgtggcccttgctgcaaaggccataaacccttcgatacgcattctagcagcagaaccaaaaggtgctgatgattctgctcagtctaaggctgctggaaagatcatcacattgccttccacaaacaccattgctgatggactacgagcttttcttggagacctgacatggcctgtggtgcgtgacttggtggacgatgttatcgttgtggatgacactgccattgtggacgccatgaaaatgtgctatgagatcctgaaggtggctgttgagcccagtggcgcaattggcctggccgcagcactgtccgacgagtttaagcaaagctctgcttggcacgagagcagcaagatagggataattgtttctggagggaatgttgaccttggcactctctggcagtctatgtacaaacactgattggagagagtaggaccgatgatattgcccttgaatttcaaacgtgatagttttagacaagtcgtttgtaaacttggaatagttcgttgtaaacatcacttattacctgtttttttatcaatgggttattcagttgcagccaca

SEQ ID NO: 102253 - DNA, 1303 bp, Zea Mays
agtcttgctccacaggatattttctttgctgcgaccaatcaattcgaaatctttcctactcggccggatactccgatccacccagtttgttgcgtgctggagctctagtaacagtttattttccaataaatttgggggtctgatgggaagtaaagacggcaccggtgacatatcggaagcccaaggctatgctgccgacattgattccatcagggaggcgcaggcccgcattgcgccgtacgttcacaggacgcccgttatgtcgtcgacgtccatcgatgccatggtggggaagaagctcttcttcaagtgcgagtgcttccagaaagcgggcgcattcaagatccgaggtgcttcgaattcgatattcgcacttgacgatgagcaggtatcaaagggcgttgtgacacatagcagtgggaaccatgccgctgctgtggctttggctgcaaagctgcgtggcatacctgcgcacattgtcattccaagaaatgcaccagcgtgtaaggttgaaaatgttaagcgctacggtggtcatattatttggagcgatgccagcattgaatcgagagaatatgtttgtaaaagagtccaggaggagaccggcgctgttcttattcatcccttcaatagtaaatacactatcagtggtcagggtacagtatcccttgaacttttggagcaagtccctgaaattgacacaataattgttcccattagtggtggtggtttaatttctggtgtggcccttgctgcaaaggccataaacccttcgatacgcattctagcagcagaaccaaaaggtgctgatgattctgctcagtctaaggctgctggaaagatcatcacattgccttccacaaacaccattgctgatggactacgagcttttcttggagacctgacatggcctgtggtgcgtgacttggtggacgatgttatcgttgtggatgacactgccattgtggacgccatgaaaatgtgctatgagatcctgaaggtggctgttgagcccagtggcgcaattggcctggccgcagcactgtccgacgagtttaagcaaagctctgcttggcacgagagcagcaagatagggataattgtttctggagggaatgttgaccttggcactctctggcagtctatgtacaaacactgattggagagagtaggaccgatgatattgcccttgaatttcaaacgtgatagttttagacaagtcgtttgtaaacttggaatagttcgttgtaaacatcacttattacctgtttttttatcaatgggttattcagttgcagccaca

SEQ ID NO: 102254 - DNA, 1198 bp, Zea Mays
agtgctcacacacttctccctttccgccgccgccaccgaggaagacaccaggtcaccagccataggcccatagcaaaccaagcgcgaggaggaacaggcgtagctccgtagccatagatggctaacaagcgtcagcgggatgcgcggaagcgcttccgggaggcgaacccagacctattccctccgcaaaccgccccttctgccgacggaaccaagaacaagagcaagaagaagaagaataagagcatgttcaagaaggccaataagggcggcacgggaaggtttaagcacccgctacgggttcccgggatgcggcccggggaacgctgcttcatctgcaagtccaccgaccacgtcgccaaggcttgccccgagaaggccctctgggacaagaaaaagatttgcttgctttgcagggagcggggtcatagtctgaagaactgtcctgacaaaagcgagggaaatttgatgaaattttgctataactgtggtgaatctggacactctctttccaagtgccccaagcccattgagaatgggggtacgaattttgcaagctgttttatctgcaatcagcaagggcatttgagcaagaactgccctgaaaacaaacatggcatctatccaaagggtggttgttgtaaggtatgtggcgaagttacccacttggccagacattgtccgaataaagggagacaagatttgatatcctccagagatgatgatgtcaacatggaagagcacagtcaggaatgtcctgcggttcaccatggtggagatgacctagaagatgatttcgttaatgaagaagaaccaaaacccgccaaatcaaagaaggcaaagcaatcaggttcaagaccagccacagggacgggaaatgacgtgaagagcgccagtgccaagacaaaagcgaaacaagctcctaaagttgtaaaattctttggttaaagaatgggaattttgttgtagcttaagatacgaatgttccatctggacaaccttgtactgtcaagcggttgtgtgtaacgctgatgacgatgagaatacgtctgccaactgcatacgcctctcgttgcccctaggtgctcttctgtcttctcattgtttggctagcattgggttatgcgagaccagtagaacaattacaatatggaattcgctcagttttcgcatccagatcacccatcaagatacgatt

SEQ ID NO: 102255 - DNA, 976 bp, Zea Mays
tctggccttaaaaacctctgctcccccgtctcggcgcgattgccatcgccatcgccatcgccatcgcgcaccgcctccccgtgtcccctccttctcgcccggcaccgtcgagctcggctgtggaaacagaacaaacccatcaaccatggcgaactcggcgtcggggatggccgtgagcgacgagtgcaagctcaagttccaggagctcaagtcgaagcgaagcttccggttcatcacgttcaagatcaacgagcagacgcagcaggtggtggtggacaggctggggcagccgggcgacacctacgacgacttcaccggctccatgcccgagagcgagtgccgctacgccgtcttcgacttcgacttcaccaccgacgagaactgccagaagagcaagatcttgttcatctcctggtccccggacacctcgagggtcaggagcaagatgctgtacgcgagctccaaggaccggttcaagagggagctggagggcatccagctggagctgcaggccaccgaccccagcgagatgagcatggacattgtcagggcgcgagctctctgaagaggaagacgcgcatccgctcgcgcgatcgccatgcatgccccggaacgacagaagctgtttgtcttgcatcgaccggcggcctctgcatgtacccgtgtgccgttttttgcaccgccggtgccagtgttctcttactccatgtaaactactctagacagtgctcggtgagtacagctgctcggtgagtacggtgtcacagtcactccgtgtaggcagtgccatttcgaagacaatattgcaaaatttaactaacttggttttacaatgcgtttggttggaagtattcctccgggtcactaataattcatgctttgtatatacatgacgtggtcgtggtctatggaatatagcttaaaccattactagtataatacgttgtaacaacacatcaatcatatttgatttata

SEQ ID NO: 102256 - DNA, 8574 bp, Zea Mays
atggcggaagacgcgcacgagttgttcgattcctccccgccgcgggaggagggctccgacgagcagctcgcggccgtaccgctcggcgacgaggcgggcgtcgtcgaggaggaggaggcgtcggatccggggatgagtaccagcatgccggccacacccgcgacgccctacgagccgcccccgcggcccaggcggccgcctggagtaccggccgacgcgccactggaggtggtgcgggcggtggaggaggcgatcgcgggcggggcggaccttctccgcgaggtggtctcccaggagcagggcgagctggctcactccgtcgtcgacgtgctgctcggcaccatgggcggtgtggacgaggcaggcgacgccaccggcaccggcgctcctcccaccgtcatgatcagctcgcgtgccgctgtcgccgccgctgagctcctgccttatctccccgaagacgacgagccgtcgccgcgcactcgaacagccttaggtctgcacgccgccctccgcgcctgcactcgcaatagagccatgtgttcttccgcgggcctcctggctgccctcctcgcgtccgcagagaagctgttcgtcgaaatggatcagggtagcagatgggacgggacgccactgcttcaatgcattcagatgttgggtgggcactcgcttagtgtgaaagacctgcattcctggcttgatttggttagaaagtcacttggaacgagctgggccacaccacttatgctagcgcttgagaaggccatgggcagcatggaagcaaaaggtcctgctgtgacatttgagtttgacggggagagctctggtctgcttggcccaggtgacagcaggtggcccttcttaaatggatatgggtttgccacttggatatacatagaatcattctcggatacccttagcacagcaacagctgcggcagccattgctgctgctgcagcggcaacatctggaaaatcatcagcaatgtcagctgctgcggcagccagtgcccttgcaggagaaggaacaacacacatgcctcggcttttcagctttctctcttcagataaccagggtgtggaagcttactttcatggccagttcttggtggtggagagtgtgggtggtaggggtaagaaagcttctttgcacttcacatatgcgttcaagcctcagtgctggtattttgttgggttggagcacacaaacaagcatagtttgctcggaaaggatgacagcgaattgagtctgtatgttgatggaagcctgtatgagagccgtccttttgagtttccacgtatctctaaaccacttgcattttgctgcatcgggacaaatccaccaccaactattgccggcctgcagaggcgccggcggcaatgcccattatttgctgaaatggggcctgtctacatcttcaaagaaccaattgggccagacagaatgagacgtctagcatcccgaggaggagacacactgcccagttttggaaatggcgcaggcttgccatggaaggcaactaatgaccaagttaagagtatggctgaagagagcttttcactcaacaatgggatagggggaagcttgcatcttctttaccatcctagtcttctcactgggcggttttgtccagacgcctcaccttctggttcatcaggcactcatcgaaggcccgcagaggttctcggattggttcatgtctcacctcgtgtgcgaccttcagaatctttatgggccttagcttatgggggtccaatggctttacttccactaaccataggcaatgtacatgtggacagccttgagcctgcacctggggacttgccatcgtctcttgctaccatttccctttctgccccagttttcaggattatttcccaagctattcaacaccctggaaataatgaagaattatgccgtacatttgcaccagagcttttatcacgtgttttacattatgtgttgcaggctcttccaaagttggaaagtggggaagaggttctgactgatgaggagcttgttgctgccattgtatctttgtgccagtctcaaagaaataatcatgaacttaaagtgcagcttttcagcagcttgctgttggacctaaatctatggagttcatgcaattatggtttacagaaggagcttctgtcgtctctcgcagacatggtatttacagagtctgcttgcatgcgagatgccaaggcgatgcaaatgcttcttgatggctgcagaaggtgttactgggtaattcaggaaccggattcaatcgataactttgcatttactggaacaaagcgatctttgggggaagtgaatgctctagtggatgaacttttggttgttattgaactactgctaggagcagcatcttcaacagcagcagcagatgatgtccgctgtttgattggatttattgttgactgcccacagcctaatcaggttgcaagggtgttgcacctcatatataggttgaatgtacaacctaacatttctagggccaacttattttctcaatccttcatcactagtggtggtgtggaagcactacttgttcttttacaacgggaagctaaagtgggtaacaaaaatattttggatcattctagtgcaagtgaaaataatgtgcccaaggatggaagttccaacagaaaagctgatagtgctgacacaagttgtcaggttgatgaaaatcaatcagctgaacgtcatgaaactgtcttccatgaagaagccattgaacatgaagccacaaatgcaaaagatatgctggactcaaatattggaagtaaagtgcctggttctgagaatgggctcttgaagaacctgggtggcattagcttctcaattacttctgataatgtccggaataatgtttacaatgttgacaaaggtgatggaattgttgttggcattattcacattcttggtgctctaattgggtcaggtcacctgaaatttgattctggagctggaagtgcaaatatacctggtggtagtcagaccacacttaatgaagaaggaaatactatgtcagaagatagagtatcattgttactttttgcattgcaaaaggcattccaagcagccccaaggaggcttatgacggcaaatgtctatatggctttgatttctgctgtgattaatgtttcatcagctgatgaaagtcttaatctttatgattctggtcaccgttttgaacatatccaacttttactggttctacttcgctcgcttccatatgcatcgagggcattccaagctcgtgcaatacaggatattctgtttttggcttgtagtcatctagataacagaactacaatgacctcgatttcagagtggccagaatggattttggaggttttgatttcgaaccatgaaatggacacaaagaaaaatgctgatggtgtaagcattggtgagattgaagacctcatacacaattttctgattataatgctggagcattcaatgcgacaaaaagatgggtggaaggatgtggaggcaacaattcattgtgcggagtggctctcaatagttggaggatctagcactggagaccaaaggatcaggcgtgaagaatcattacctatttttaaaaggagattgttgggtgacttgcttgatttttctgccagggagcttcaagttcagcagaccgaagtaattgcagcagctgcagctggtgttgcagctgagggtttgtctcctgaagaagcaaaaattcaagcagagaatgctgctcatctctcagtagcactagcagagaatgcaatagttattctgatgcttgtggaagatcatctgagatcacaagctcaacatttttgcacatcccttacaggtgatagcatcacatcgtccacatcaatgacttcattggctgccagtcggtcaaattctttgagcacagctggtaaagaacccatggctgctggggtctcaagacgggcatctttgtccagtgatgctggtggccttcctctggatttgcttacttctatggctgattcaaatggacaaatctctgctgccgtgatggaacgtcttacagcagcaacagcagctgaaccttatgattctgtcaagcatgcatttgtgtcttatgggagctgcataactgatcttggagaaagttggaagtaccgaagccgtttgtggtatggtgttggcattccacccaaatctgatatatttggtggtggtggaagtggttgggaatcttggagatctattctagagaaggattcaaatgggatttggattgaatttccacttgtgaagaaatcagttgctgtgctgcaggcacttcttttagatgaatctggacttggtggtggtcttggtattggagggggatctggccctggtatgggggttatgactgccctctatcagttgctagatagcgatcaaccatttctttgcatgctcagaatggttcttgtttcgatgagggaggacgacaatggtgaaggcgatgcttttacgaaagatgttagcataaaggatgtggtatcagaaggaatgggccaccaggctggaagtgtgatgccatttgatggcaacagttattcatctccaagaaaacctcgatctgctcttctttggagtgtgcttggccccatccttaatatgccaataacagagtctaagagacagagagtgttggttgcttcctctattctctactcagaggtatggcacgctattggcagggacaggaaacccctaaggaaacaatacattgagctgattttaccaccgtttgtagcaattcttagaagatggcgaccccttttggctggtattcatgagcttacttcttcagatggacaaaatccactaattgctgatgatcgtgctttggcggcagatgcattacctgtcgaggcttctcttttgatgatatcgcctggttgggctgctgcttttgcatcgccaccagttgcaatggcattggccatgatggctgctggtgcctcaggaacagaaacaagaacacctcctaggaataccttgaataggcgtgacaaagcattgcctgagcgcaaggcagcagcaaaactacagactttctcgagtttccagatgcctatggaaacagcatctaacaagcctgggtccaccctgaaggacaaggcagcagcaaaagctgccgcattggcagccgctcgtgaccttgaacgaactgctaagattggttcaagaaggggccttagtgctgtagcaatggcaacatcaggacaaaggaggagttcgggtgacatcgaacgagcaaagaggtggaatacgtcagaagctatgagtgctgcttgggtggagtgtctgcaatcagatgattccaaatcagttgtgggaagggatttttcagccctttcatacaaatatgtcgcagtacttgtttcttgtttggccttagcacgaaacttacaacgagctgagatggagaggcaaacactagttgatgtgttaattcggcatcgcgcctcaactgggcttcgagcatggcggcatcttcttcattgcctaacagagatgggtagactatatggaccttttgaacatctgtgcactcctgatcgtgttttctggaaattagattttactgaaagctcttcaaggatgagaagatttgtgaaaagaaattacaagggatgtgatcatttaggtgcagctgctgattatgaggaccggaagcttcttaatacttctgcacagtcaaatgaacataactctgaggatgctaattcttcattaacaagcactcttccatcatctgcttctgtaattatggctgatgccatgtcgatgaatgacagaaatgtggaaaatgagcagttagaaactgacactactcgcagcagtgttgatgacgatcagcttcaacattcttcagcagctgatcaacaatcggtaaaaggatcgataggttcaagaacttctgacatttgtgctgatcgaaatttggttaggtctacagttcttgcacctagttatgtgcctagcgaagctgatgagagaattattgttgaactgccatcattaatggtgcgaccattgaaggtggttcgaggaacattccaagtaacttcaaagaggattaacttcataattgatgagcgttcaaatgacagtaacattgatgatgctgcatctactagtggccaatgtgatcaacaagataaagatcgaagctggttggtctcatcactttatcagatatatagcagacgatacttgctacgccgaagtgctttggaattattcatggtagataggtcgaatttcttttttgactttgcggatattgatgcccgtaaaaacgcttatcgggccattgttcataccaaacctcctaacttgaatgacatctttttagctacccagagagctgagcagattcttaaaagaactcagttgatggagcgctgggctaattgggagatcaacaattttgagtacttaatggaacttaacacactggctgggcgcagttacaatgacattactcagtaccctgtttttccctgggtagtagcagattacaaatcccgagtgttgaatctggatgaccctttgtcgtatcgagatctttcaaagccaattggagcactaaaccctgaacgtctaaagaagttccaagaacggtactctacattcgaggatccaatcataccaaagtttcattatggttcacattactccagtgctggcacggtcttgtattaccttttcagagtggagccttttacaacactgtctatacaactgcaagacggcaaatttgaccacgctgatcgcatgttttctgatctttctggtacatgggatagtgttcttgaagacatgagtgatgtaaaagagctagtacccgagatgttttacctccctgaggtatttaccaacataaatggcattgactttgggacaactcaacttggagggaagctagattccgtagaattgcctccctgggctgaaaatcatgtggattttgtccataaacatcggaaggctcttgagagtgagcacgtctctgctcatttgcatgagtggattgatctaatttttggatataaacagaggggcaaagaagcgataatggcaaacaatgtattcttctacataacatatgaggggactgttgacattgacaaaattacaaacccagtggatcggcgagctacacaagatcaaatagcttactttggacaaacaccatctcaactgctgactgtacctcacatgaagaggaagccactggcggaggtcttacaactacagacaatattccgaaatccaagtgaacttaaatcatatgtgcttccacattcagatcgttgcaatgttcctgccagtgctatgcttgtatcaaacgactctattgtagttgttgatgtaaatgccccagcagcacatgtggcacttcaccaatggcaggctaatactccagatggtcagggaacacctttccttttccatcatggtagaaattccacaaattcaaccagtggcgcactcatgcgcattttcaaaggatctgctggttctgcggaagattatgggttcccaagggctatagcatttgctgcttctgcaatccgcagttcagcagttgttgctgtgacatgtgacaaagagataattactggtggccacgttgatggttcattgaagttgatatccctagatggagcgaagacaattgaaactgcttctgggcatattgctccagtgacatgccttgcgctgtcacctgatagcaactaccttgtgacagggtctagagataccacagttatactctggaggattcatcagacaggctcctcacataagaaaaatgctcaagaacctccaccgactacaccaacgacaccacgcagtcctctctctggcagcactagcaccatgagcagcctctcagaaacaaagagacgtcgcgttgaaggtccaatgcatgtaatgagaggacatcttggggaagtaacctgctgctcggttagtccagacttaggacttgttgcttcctcatcaaatgcaacaggcattcttctgcattccttacgcacaggcaggctgataaggaggcttgatgtcgatgaggcacatgcaatatgcttatcttctcaaggaatcattttggtttggaatggaacaaagaaaacattatctaccttcactgtcaatggactccctattgctaactcagttctgttgcctttctctggacaagttagttgcatcgagatttctacagatggccattttgctttatttggaacatctttgttcaacaactacaagtgtgataacagtactgaaactggggatcatgagcttggacccaatggcactgatgatgtatcaaaaaattctgaacaatctgttcacgcgccttcaatctgctttgttgacctgcatacactgaaggtttttcatactctgaagctggcaaagggccaggacatcacagcaattgctctaaacaaagagaacacaaatcttttagtttctactgctgataattttttttatagtctttactgatcccgctgtaagcatcctcgatac

SEQ ID NO: 102257 - DNA, 312 bp, Zea Mays
atggctcccatcgccgaaccgcctcggagggccgcgccctggacaggccttgccgcgccgagcgccggccttgccgtgctgagcgcgcccgcgccggggcgcgcctcgcagagcaccagctctgccgtgcagagcgtcgagggggcttccgcgtgcctgcgtccgaaccgtcggccatgccgcgcctctctccactccgctccccccaaacggccgacgtggcggcaaccgccaccggccggacagagggccattaggccctcctattggaggaggaagatagggccaccccatttgggcggtggccagtga

SEQ ID NO: 102258 - DNA, 1095 bp, Zea Mays
atgcttcgctcccggtatgcctcgcagacgtccaaacagaacccgggcactaaccagcagctggagatcgagatgaccgctgagaagtctcgccgcctcatcacatctgattgtggaggcggaggtgccgatgccaagccagaggctccggtctccgaaggagtggtcaatggggacaagtggccacgttttgctgatctcggcgggatggagcaggtgttagatcatcttctggtagaagtggtggtccccctgcgccgtctggagctgccgaattaccttggggttatgcctgttgctgggctactgttgtacggaccgccaggttgcgggaagaccacccttgcacatgccattgccaatgagactggtgtgtcgttctacaagatctcagccccagatatcgtctctagagtatctggaggttctgaagaaaacatcaggggcttatttcagaaggcatataggactgctccctcaattgtattcatagatgagatagatgcaattgcatccaagagggagaatcgagagatggagcgacgaatagttactcagctgatgacatgcatggatgaattccaccaaaatattggtggtgatggttctgatgtcgattcatctaaaaagaaaccagattatgttattgtcattggagctacaaataggcctgatgctgtggatcaagctcttcgaaggccaggaagatttgatcgagatatatatcttggggttccagatgtgaatttaaggaaacagatactgatgatgcttgcttggaagcttcgacttgaagtgcaatttgactttttaaagatagcaagggccacaccaggttttgttggtgctgacttgaaagcattagtcaataatgcatggtatctggcaatgaagagattaattaataaaagaagagctcagtattgttctcaggttgcggtccatatccggccgcttagcagcactaaggtgtcgctgcaggggaagacggggatgatggacttaattgggagattatttgacggactcaaaattcaatcaagaagtttatgtgagcagtttagtatctggatttttagcaaggatgaccattag

SEQ ID NO: 102259 - DNA, 1090 bp, Zea Mays
tgttttcttttccctatccttatctcccacacgtcatttgctccagctcgataactacgcgtcatgctccctcctctccattatcctcaagcggacagccagccattcgcttgagatttttctctgcgtcgttgaaatatctcacacacgttcatcctccagcccagccgttctcctttatctccagcagttcctatccggtgaattcccagccgcttgtgccatctccagcacgcagccttggacatcgcttcgtctcagctgctcgccggcgctcctctgcaggccacgcccagcttctctcctctggtccctgctctcagctcggccctgcctttctctctccctctcggcttctcttctccacgagctcgccctggcccatgttccgggcgaacttgtctctagcgtcggccgtcgtcgcttagtttcagctcggatccggtgttcggcacccagcttctctgctcgccggcgttccttcctttctgcgcaccacgtgttccatctcctttctgctccagctcgccatggttggccgcgggccgctccatgtttttctggcagccgtgcgcgcgaaactgcgctggtcgacgtccttctctgcgcgttcgtcgtcctcgggtcccagcccgacccattcgtgcacttgctcttcgtccatcaggtttcgtgcgtgctcgcgtttaccgtcgagtcgtcgaacccgtcatcctttgttcgacctccacctcaccagctcgctccaaacacgatttcgtcatcgtttcatgcgtcatcaaaaaatcccaaaaatcgagtgaagacgaagctagcagcgcgatattccccaagcgctcgacaaattgcctaaatcggaaaatcgttaccgatctcgcggattcgtgtcagctgtgaaaatggtgcgataattaatcacgtgatgcggaagacgaccccaagtcgaaccccaagcgcgggttattccgcatggtgatactgatggacgaatctgaagatggataattgaacgagtaccaagaccaaggctgctcgtcaagcggacgtcgtctaacaaacactaacgtagtgtttatcccaggcaagcccc

SEQ ID NO: 102260 - DNA, 2964 bp, Zea Mays
caggtggtgagagctgctcacgtgtcacgctcagctcggcagctcaacccagttaggtcagctgaaacaccgtgttcctcgtctcgcgtcttcttctactcctccctcgttcccgttgatgcgagcgaaacagatcaaaaaggagattcgagagagagaaaaaaaacaggaaacaaaaaaaatccaccgctcccgaggcacggcggcgtcgagcgcgcgacacctccggcggctccacagtgccggcgatcgagctccgcccgcccgcggatgctccgggctcggcgcagtaaggcccaggaatccacgctcgtagccagatctcggggtggtgctcggaagtggagttcgttcggtccctgcctccctggtggggatggggtggtccgccgggctgtggtggcttttggcggcggtgtgggtggtggtggcggcggctgcgacggcggagggtgaggtcgcggtcggggcggcgccgaggcggcacgcgtacgcgtcgatgatgtacatgggcacgccacgggactacgagttctacgtggccacgcgcgtcatgatgctgtccctgcgccggctcagccccaacgccgaccgcgtcgtcatcgcgtccctcgacgtcccgccgctctgggttcaggcactgaaaaatgacggggtaaaggtggtctctgtgaagaatttgaaaaatccttacgagaaacaagaaaatttcaacagacgattcaaattgactttaaacaagctgtatgcatggagcttggtttcatatgagcgagttgttatgcttgactctgacaacattttcctccaaaatactgatgagttatttcagtgtggtcagttctgtgctgtcttcatcaatccctgtatcttccatacaggtctttttgtgcttcagccctcaatggatgtttttaagaacatgctacatgagctagcggttggacgtgaaaacccagatggggcagaccaaggcttcctagctagttatttcccggacttgcttgatcagccaatgttccatccaccagctaatggtacaaaactttggggtacttatcgcctccccctaggctaccagatggatgcatcttactattatctgaagcttcgctggagtattccatgtggaccgaacagtgtgattacattcccaagcgctccatggtttaagccatggtactggtggtcttggcctgttttacctttggggctctcttggcatgaacaacgtcgtgaaaacctagggtgagtggtctattttattttccttttgtgatgcttatttctattgcttgctcaaattctgaccttagtgacatcctacagaatcagataaggatgtccacgttattatatcctgacgtggttggtaacatgtcatgaagaaaagcactctatcttctttagaataaagatgcattggggggagcattatgccattatcatgcctgtttgtcttttaggataaagttgcacaaggcaaaaaagttgtcatgctttttaaaatctttgctgatataaagttccacaaagtaggggattctcataactaagggtataataacaactagattattttgtggggaacatatctggtgctcaaaggggtacggtgttcacgtgcacattttaaatctagaacgtccatccaacatctaacagaagcactaattttacaaagaacccctttcaccttcctcccttggtggaaggggttcttaatcaatttaactgcagccgctggatgtgagatatatgtctcagatttaaaatgtgcacttgagacccatacccctttgagcaccagatatgttccctattttgtgtgtgtgtggggggggtggtggtgagggggagaggtcatgctggttaaggatgctaacttttagtttctgaaatgcagaacatttgttttgttataatatgttaatgttattcaaagcaggtattcatcggagataccactagtattaattcaggctgtactgtacattggagtcatagcagtgacccgacttgcgcggcctagcttgtcgaagatgtgctacaacagaagaatggagaaaaacactatgttcttgctctcccttctcagaatagtggcagcttggtccatacttgctgcctacaccatacccttcttcatcatcccaaggaccgtgcatccgctgcttggctggcccctctacttgctcggttctttctcactttcctccattgtgatcaacattttcttcctccacccgatcaccgtcctcacaacatggtttggattcatcggcgcactcgtggtgatggccttcccttggtatctaaatggcgtcgtcagggccttggcagtgtttgcgtatgcgttctgctgcgcgcccttgatctgggcttctctggtcaagacaatgagctccttgcaggtcctgatcgagagggatgcattcaggctcggagaacctaaccagaatgccgagttcacaaagctatactgaggtgggcacggcagatacgtatggttggccacttctgttgctcggtttggacagctatctccattcacgttggcaaattctgatgggcaatttcaattgtacaagtaaatctgcagcctgggagcaagaggagttgtatcttgtggaacccatcaggaaaacctcaagaacccatggttgttgttgtcttgcacatgtaggtgacaatgacatacaggggaaattggtgcgggaactgaagaggaacggtctggggccagttcttagctattttgatttattgttcctcggaaaggccaagccatttttggctttgttttgtactgtaaatgatatgatcggtttcgtcaccaatgaagaagggttggaagttcagacggcatgatgttagaaacagtacttcgtttttaccgtggtataattgtgtggcttctcctgtacgttttatacccctttcgttttataactgctgttcctg

SEQ ID NO: 102261 - DNA, 1812 bp, Zea Mays
gaaacagatcaaaaaggagattcgagagagagaaaaaaaacaggaaacaaaaaaaatccaccgctcccgaggcacggcggcgtcgagcgcgcgacacctccggcggctccacagtgccggcgatcgagctccgcccgcccgcggatgctccgggctcggcgcagtaaggcccaggaatccacgctcgtagccagatctcggggtggtgctcggaagtggagttcgttcggtccctgcctccctggtggggatggggtggtccgccgggctgtggtggcttttggcggcggtgtgggtggtggtggcggcggctgcgacggcggagggtgaggtcgcggtcggggcggcgccgaggcggcacgcgtacgcgtcgatgatgtacatgggcacgccacgggactacgagttctacgtggccacgcgcgtcatgatgctgtccctgcgccggctcagccccaacgccgaccgcgtcgtcatcgcgtccctcgacgtcccgccgctctgggttcaggcactccctcaatggatgtttttaagaacatgctacatgagctagcggttggacgtgaaaacccagatggggcagaccaaggcttcctagctagttatttcccggacttgcttgatcagccaatgttccatccaccagctaatggtacaaaactttggggtacttatcgcctccccctaggctaccagatggatgcatcttactattatctgaagcttcgctggagtattccatgtggaccgaacagtgtgattacattcccaagcgctccatggtttaagccatggtactggtggtcttggcctgttttacctttggggctctcttggcatgaacaacgtcgtgaaaacctagggtattcatcggagataccactagtattaattcaggctgtactgtacattggagtcatagcagtgacccgacttgcgcggcctagcttgtcgaagatgtgctacaacagaagaatggagaaaaacactatgttcttgctctcccttctcagaatagtggcagcttggtccatacttgctgcctacaccatacccttcttcatcatcccaaggaccgtgcatccgctgcttggctggcccctctacttgctcggttctttctcactttcctccattgtgatcaacattttcttcctccacccgatcaccgtcctcacaacatggtttggattcatcggcgcactcgtggtgatggccttcccttggtatctaaatggcgtcgtcagggccttggcagtgtttgcgtatgcgttctgctgcgcgcccttgatctgggcttctctggtcaagacaatgagctccttgcaggtcctgatcgagagggatgcattcaggctcggagaacctaaccagaatgccgagttcacaaagctatactgaggtgggcacggcagatacgtatggttggccacttctgttgctcggtttggacagctatctccattcacgttggcaaattctgatgggcaatttcaattgtacaagtaaatctgcagcctgggagcaagaggagttgtatcttgtggaacccatcaggaaaacctcaagaacccatggttgttgttgtcttgcacatgtaggtgacaatgacatacaggggaaattggtgcgggaactgaagaggaacggtctggggccagttcttagctattttgatttattgttcctcggaaaggccaagccatttttggctttgttttgtactgtaaatgatatgatcggtttcgtcaccaatgaagaagggttggaagttcagacggcatgatgttagaaacagtacttcgtttt

SEQ ID NO: 102262 - DNA, 2077 bp, Zea Mays
cgctcccgaggcacggcggcgtcgagcgcgcgacacctccggcggctccacagtgccggcgatcgagctccgcccgcccgcggatgctccgggctcggcgcagtaaggcccaggaatccacgctcgtagccagatctcggggtggtgctcggaagtggagttcgttcggtccctgcctccctggtggggatggggtggtccgccgggctgtggtggcttttggcggcggtgtgggtggtggtggcggcggctgcgacggcggagggtgaggtcgcggtcggggcggcgccgaggcggcacgcgtacgcgtcgatgatgtacatgggcacgccacgggactacgagttctacgtggccacgcgcgtcatgatgctgtccctgcgccggctcagccccaacgccgaccgcgtcgtcatcgcgtccctcgacgtcccgccgctctgggttcaggcactgaaaaatgacggggtaaaggtggtctctgtgaagaatttgaaaaatccttacgagaaacaagaaaatttcaacagacgattcaaattgactttaaacaagctgtatgcatggagcttggtttcatatgagcgagttgttatgcttgactctgacaacattttcctccaaaatactgatgagttatttcagtgtggtcagttctgtgctgtcttcatcaatccctgtatcttccatacaggtctttttgtgcttcagccctcaatggatgtttttaagaacatgctacatgagctagcggttggacgtgaaaacccagatggggcagaccaaggcttcctagctagttatttcccggacttgcttgatcagccaatgttccatccaccagctaatggtacaaaactttggggtacttatcgcctccccctaggctaccagatggatgcatcttactattatctgaagcttcgctggagtattccatgtggaccgaacagtgtgattacattcccaagcgctccatggtttaagccatggtactggtggtcttggcctgttttacctttggggctctcttggcatgaacaacgtcgtgaaaacctagggtattcatcggagataccactagtattaattcaggctgtactgtacattggagtcatagcagtgacccgacttgcgcggcctagcttgtcgaagatgtgctacaacagaagaatggagaaaaacactatgttcttgctctcccttctcagaatagtggcagcttggtccatacttgctgcctacaccatacccttcttcatcatcccaaggaccgtgcatccgctgcttggctggcccctctacttgctcggttctttctcactttcctccattgtgatcaacattttcttcctccacccgatcaccgtcctcacaacatggtttggattcatcggcgcactcgtggtgatggccttcccttggtatctaaatggcgtcgtcagggccttggcagtgtttgcgtatgcgttctgctgcgcgcccttgatctgggcttctctggtcaagacaatgagctccttgcaggtcctgatcgagagggatgcattcaggctcggagaacctaaccagaatgccgagttcacaaagctatactgaggtgggcacggcagatacgtatggttggccacttctgttgctcggtttggacagctatctccattcacgttggcaaattctgatgggcaatttcaattgtacaagtaaatctgcagcctgggagcaagaggagttgtatcttgtggaacccatcaggaaaacctcaagaacccatggttgttgttgtcttgcacatgtaggtgacaatgacatacaggggaaattggtgcgggaactgaagaggaacggtctggggccagttcttagctattttgatttattgttcctcggaaaggccaagccatttttggctttgttttgtactgtaaatgatatgatcggtttcgtcaccaatgaagaagggttggaagttcagacggcatgatgttagaaacagtacttcgtttttaccgtggtataattgtgtggcttctcctgtacgttttatacccctttcgttttataactgctgttcctg

SEQ ID NO: 102263 - DNA, 1692 bp, Zea Mays
atttccgttggttcttgacctcagctcgctcctctcactcacctctatatatgccccgccctcttgcccgtgttggtggtaccccgcgtcgccctccgtcgtctcagcgtatgttgtgcatgtgaagagagagaggaagagggtgacgagcgagaaaaaagctagtagagtgatagcttgacaagacgcattgaagcgaaggccacgcataccaaagcaacctcaccatcgctcgcaagctactcgatcaaggacattattgtcgcaacgagctagcaagaataatccgcgttagtttcgcgaagcggtggtacatatggctcgcatcctcgtgctggctctgctcaccatcgcgagcctcctcctgccgccggtcgtcgcgagccagcaggcggcggccaagtgcgagtacagaaagcactccggccaccggtacaggcacccggtgggcgtgcggaagatcgtggtggacgcgggcggcgccggcgacttcgtctccatccagcgcgccgtcgactccgtgccggagggcaacaccgtgcgcgtcatcgtgcagatcaacgccggcacgtacatagagaaggtggtagtgccggcgtcgaagccgtacgtcacgttccagggcgccgggcgcgacgtgacggtggtggagtggcacgaccgggccagcgaccgcggccccgacgggcagccgctccgcacctacaacaccgcctcagtaaccatcctagctaactatttcaacgctaagaacatcagcttcaagaacacagctccggcgccgatgcccggcacgcaaggagggcaggcggtggcgttccgcatctccggcgacaaggccttcttcttcggctgcgggttctacggcgcgcaggacacgctgtgcgacgacgccggccggcactacttccgcgactgctacatcgagggctccatcgacttcgtcttcggcaacgcccgctccctctacaaggactgcgagctgcactcgacggcgcagcggttcggctcggtggcggcgcacgggcggcgcgacccgtgcgagcgcaccggcttcgccttcgtcaactgccgggtgaccggcacggggcggctctacgtggggcgggccatggggcagtactcgcgcatcgtctacgcctacacctacttcgacagcgtcatcgcgccaggcggctgggatgactgggaccacaccagcaacaagagcatgacggcgttcttcgggatgtacaggaactggggccccggcgtcgacgccgtgcacggcgtctcctgggcgcgagagctcgactacttcgccgcccgccctttcctcggcaagagcttcgtcaacggataccactggctcacacctgatgtctgaaaaacacacaaacacacgcgcgagagtcaggagacacatcgattacagcaaaccagattaatttattcgtacagcataaagacagaataagacaccatttacaagccactgaatatgtatagtgatccactggcgcagaagtcagattcaagattcatttcgtctataaaaaatagtttccaaaacttcgtcatgtgcagtgtaaactagacagtgagcagtgagtctgttatgtctctgcataggagaccttggatgtgcaattcaagttgttccattatgtttgaatctgcaaaggagcatggacacaaagtttgtgaagcaca

SEQ ID NO: 102264 - DNA, 2180 bp, Zea Mays
atttccgttggttcttgacctcagctcgctcctctcactcacctctatatatgccccgccctcttgcccgtgttggtggtaccccgcgtcgccctccgtcgtctcagcgtatgttgtgcatgtgaagagagagaggaagagggtgacgagcgagaaaaaagctagtagagtgatagcttgacaagacgcattgaagcgaaggccacgcataccaaagcaacctcaccatcgctcgcaagctactcgatcaaggacattattgtcgcaacgagctagcaagaataatccgcgttagtttcgcgaagcggtggtacatatggctcgcatcctcgtgctggctctgctcaccatcgcgagcctcctcctgccgccggtcgtcgcgagccagcaggcggcggccaagtgcgagtacagaaagcactccggccaccggtacaggcacccggtgggcgtgcggaagatcgtggtggacgcgggcggcgccggcgacttcgtctccatccagcgcgccgtcgactccgtgccggagggcaacaccgtgcgcgtcatcgtgcagatcaacgccggcacgtacatagagaaggtggtagtgccggcgtcgaagccgtacgtcacgttccagggcgccgggcgcgacgtgacggtggtggagtggcacgaccgggccagcgaccgcggccccgacgggcagccgctccgcacctacaacaccgcctcagtaaccatcctagctaactatttcaacgctaagaacatcagcttcaaggtgagcagccgtttgcccagcagaccacccagtacgtggccgagagacgatggtgcagcaggggcaggcaaagtgacaaaacctctcagagagtcacaagtctctggacttttgcttctaaacgccgctgtctctgtgtatctcgttccttttcgaaaattttgaatccgatcgatccgcgtgttttcacacactaagctagcaagatcgacgctatcacgctactgcgtgccctgtatctgttgaagttgtgcctgtaggctgcaggttggctgggtgtgtgtggcttcaaaattcggcggcgacaggcatcctggacgagcaaaacgcgcattcgatctggctgattttttcggttggccgtcttggtccaatgcagcaggggcaggctcctaactgacgcaccttttccctttccaatgtctcgtcttgacacgcagaacacagctccggcgccgatgcccggcacgcaaggagggcaggcggtggcgttccgcatctccggcgacaaggccttcttcttcggctgcgggttctacggcgcgcaggacacgctgtgcgacgacgccggccggcactacttccgcgactgctacatcgagggctccatcgacttcgtcttcggcaacgcccgctccctctacaaggactgcgagctgcactcgacggcgcagcggttcggctcggtggcggcgcacgggcggcgcgacccgtgcgagcgcaccggcttcgccttcgtcaactgccgggtgaccggcacggggcggctctacgtggggcgggccatggggcagtactcgcgcatcgtctacgcctacacctacttcgacagcgtcatcgcgccaggcggctgggatgactgggaccacaccagcaacaagagcatgacggcgttcttcgggatgtacaggaactggggccccggcgtcgacgccgtgcacggcgtctcctgggcgcgagagctcgactacttcgccgcccgccctttcctcggcaagagcttcgtcaacggataccactggctcacacctgatgtctgaaaaacacacaaacacacgcgcgagagtcaggagacacatcgattacagcaaaccagattaatttattcgtacagcataaagacagaataagacaccatttacaagccactgaatatgtatagtgatccactggcgcagaagtcagattcaagattcatttcgtctataaaaaatagtttccaaaacttcgtcatgtgcagtgtaaactagacagtgagcagtgagtctgttatgtctctgcataggagaccttggatgtgcaattcaagttgttccattatgtttgaatctgcaaaggagcatggacacaaagtttgtgaagcacagtataatttcaatattttctagaaaataaccaaacatccatatgacat

SEQ ID NO: 102265 - DNA, 1090 bp, Zea Mays
gaatgcccagcccgtgtccttgcaccgtcgttgccgcggtcgtgtcagagatgttcaattcttggtcatggccgccgccggaggaggtagccgcgaggcgacggttgcggcggcgctagctcgggaaccccgacgctttttcgcgggtgcggccgtacgggagagagcgcatccttgccgttggaggccggagaagttttttgaagtggagatgaaggtgcgcgactatgaaattgaccagtatggtgttgtcaacaatgcaatctatgctagctactgccaacatggtcgtcacgagctgcttgagagcgtaggcatcagtgcagatgcagtggcgcgcagtggggaatccctggctctctctgagttgaacctcaagtactttgcccctttgaggagtggcgataagtttgttgttaaggtgaggcttgcaggcatcaaaggtgtacggatgatattcgaccacatcattacaaaactgcctaatcatgagctaattctggaggcaaaggcaacggctgtttgcctgaacaaagactactatcctacccgtattcctcgtgaactattgtccaagatgcagctcttcttacccgtggacagcagagggtcaaatgaagacgttaataatcggaataacagctgcaactaattctggaggcaaagacaagggctgtttgttcgaactgaagactaccatctcatctccaaaactgtttatgtcatccaagctgcagctcctcatcgaagaatatagtagaatccctccgttcttttttatttgtcgtggtttagttcaaaaatgaactagcggacaataaatattcgagaacggatgtagtagaatctagtcttggagactggcggctgcttggtcctgcagtgccaacgaaaaccacctatgtatctccatctcaggagcgctgtcatagaagagcacagtccatcttcattctttgtaactgttcacccgaaacatttgatccgttactgcagtcgtttggtacagaaagctcttcttgctctggaggaataatatgtgctatgtacatctgcttgttgtattaggaacatgaaaggaaattgtcgg

SEQ ID NO: 102266 - DNA, 1229 bp, Zea Mays
ggttgggtgaatggcaggctggctgcctccccagcagctactgcccactaatacattggtcaagctggcaagccgccgcgccacccgcccgcactagcccactccggagtccggccctcgccctgctcgccgcaatgcatcaccggttcgcgggcctcgtgcccaccgcccgccccgctctgccgccgatccacggcggagtcgtcggccggagctatccgcccgtccaccggtccttggcgcttcgcctggcgccgtttgcctccgcgtctgtccgacgcgcgtgccgccccctcgccgtctccgcccaatccaccagcctccggccggagaagttttttgaagtggagatgaaggtgcgcgactatgaaattgaccagtatggtgttgtcaacaatgcaatctatgctagctactgccaacatggtcgtcacgagctgcttgagagcgtaggcatcagtgcagatgcagtggcgcgcagtggggaatccctggctctctctgagttgaacctcaagtactttgcccctttgaggagtggcgataagtttgttgttaaggtgaggcttgcaggcatcaaaggtgtacggatgatattcgaccacatcattacaaaactgcctaatcatgagctaattctggaggcaaaggcaacggctgtttgcctgaacaaagactactatcctacccgtattcctcgtgaactattgtccaagatgcagctcttcttacccgtggacagcagagggtcaaatgaagacgttaataatcggaataacagctgcaactaattctggaggcaaagacaagggctgtttgttcgaactgaagactaccatctcatctccaaaactgtttatgtcatccaagctgcagctcctcatcgaagaatatagtagaatccctccgttcttttttatttgtcgtggtttagttcaaaaatgaactagcggacaataaatattcgagaacggatgtagtagaatctagtcttggagactggcggctgcttggtcctgcagtgccaacgaaaaccacctatgtatctccatctcaggagcgctgtcatagaagagcacagtccatcttcattctttgtaactgttcacccgaaacatttgatccgttactgcagtcgtttggtacagaaagctcttcttgctctggaggaataatatgtgctatgtacatctgcttgttgtattaggaacatgaaaggaaattgtcgg

SEQ ID NO: 102267 - DNA, 723 bp, Zea Mays
atgcagcagcagatggccggcctcgttcatcatcaggccatcgggatggtgagcttcagctccggcgccaatgcccgccaccacgtggcggtgcacgccggccgggcgcgtctcggcagggtcacggcggctgcgcggcccaagtactgcccgctccggggcgcggctgccgtcgccgcccccttggccagcggccgcgagctgctcgaccaacacactcgccctagcaacaccacatcgagccagcagcttactaccaccgtcaggaaggacaagtttttcgagatcgagatggaggtgcgcgacgacgagcttgacgagtacggcgtcgtcaacaacgccatctacgccagctacctccatagcggtcgtgacgtggtgcttgagaagctgggcatcagcgtggactactggacatccacgggcaacgccatggctctttcagagctcaacctcaagtatttcgcgcctttgaggagcggcgacaggttcgtcgtgaaggtgaagcctgtccaaatcaaaggcgtgcggatgattgtggagcacatgatcgaggccctgccggatcgtaagctcgtcatggaaggcagagcgaccgtcgtttgcctcaacaaggacttccgtccaactcgggtattcccggagttagcagcaagagccaaggaagttttctcctgcaaggttgcataaacgacgacgactactactactagaggcgtaata

SEQ ID NO: 102268 - DNA, 1230 bp, Zea Mays
cgcgtaagaaaaacctttcggtctaaacatttcgtcgaacgccagcggcgagtcgagctcgagctcgagccccagtcaccgcagccatgctcctcacgaaaccctacctctccaactcgctccttccagtcccatccccgccgccgtcgggccctactctcagctccaaccatgcaagcccccttgccgcccctacttgccgtcgcagccgcctccgcatctccgccacatccacggctgcgccgtctccttcgtcggctgccgctgccaccgcgtcgctgagtcgagtggacgtgctctcggaggcgctcccttttattcagcgattcaaaggcaagacggtggtggtcaagtacggcggtgcggcgatgaagtccccggagctgcaggcgtccgtgatccgcgatctcgtgctgctctcctgcgtcggcctccgccccgtgcttgttcacggcggcggtccggagattaattcctggctgctgcgcgtcggcgtcgagccgcagttccgcgacggcctccgcgtcacggacgcgctcaccatggaggtcgtcgagatggtgctagtcgggaaggtcaacaaaaaccttgtttccctcatcaacatcgcgggaggcaccgccattggtctgtgcggcaaggacgcgcgccttatcaccgctcgcccgtctccaaatgcagcggcgctgggattcgtcggcgaggtttcgcgcgtggacgccaccgtcctccatcccatcatcgccgcgggccatatcccggttatcgccaccgttgccgccgacgagactgggcaagcctataacatcaatgctgatacggcggctggcgagattgccgctgccgtgggcgccgagaagctgctgttgctcacagatgtgtctggcattttggcggaccgtaatgaccctgggagcctggtgaaggtggtcgacattgctggggtgcggaagatggtggctgacgggaaggtagctggtgggatgatacccaaggtggagtgttgtgttcacgcccttgcacaaggtgtacacaccgcaagtatcattgatgggcgtgttccacactctcttctgcttgagattctcacagacgagggcacaggcaccatgatcactggctgagctgcttcatgccttcagggtattttcctgtgcctcttttctcatattgttgtgttcagggctatgtgactaaactcaagatgcaataagactacctaagttggtg

SEQ ID NO: 102269 - DNA, 627 bp, Zea Mays
atgtctttgtacttgacgattgctgaagcttgccatcagggacatctgcgactggctggcgaggaggatgccccagcggcgaccggatccagctccatcgctgtgatctggtggtcggggaagagggcatctcatcgctgcgatctggaaagccctagatcttctagctggtgtaaacaaaatatcatcaagagagccattttctgcatactggggtgtttcaatcaagagatattccaaagcatgtccattaattcatcttgttctgataatggcagatctaccatgtcaaacctcttgatagaaaggagcttgccgctgaatttcttctccagctccctgacgagtctgacatggatcttcctaaaggccttgcgcaggcggtatgggacgtggatgacaacagccttcctgctcccggtaacatccatctggatagcattgttgatgtacaggtccttgaggtcgctcttgagctcctgggcaacggagtcctcgaactcggagggctcaaggcccttctccttctggatcttcttcctcgcggtgtacatcttgccttcccttcgccgccggacccatagaacgcgagggcagatcgatggaggcgcagccgaagtgagctga

SEQ ID NO: 102270 - DNA, 353 bp, Zea Mays
caggttgagcagcagcaggcgcagtactgcagtgcaatggataggacaagagacttgatatggcaccactttgtcaggttactcgcgaggattggagacagaacatcgacggtggagcccgaagtcccgttgcaggcaacattttttttccctttgctttccacaagaccacagccatggcacagggaactccacctacatccaatggccgaagtgccttccttttggttgtttactgcacttgtggaaaactttctccctgctcatagcacattcgagaaaagctggcagctccggtactccacccattctccggtgaatgctgaatctattcccaatcatgctgtccattt

SEQ ID NO: 102271 - DNA, 1910 bp, Zea Mays
cgagaccggcacaacacaaacagaaacatgtatcaacacaccatggccgccatgcacgccatcgtgcaccaccgcgcaccgccgcctggccgctgctgtcgcggccacgggcgcagcgtcgtcgtccgcgcgtcggccgccaccgtcaccaccagcatccccgggtccgcggcgacagtgccggactcgccgtccgcggcgttctgggactacaacctcctattccggtcgcagcgcgccgagtcccccgaccccgtggtgctccgcgtcacggagggcgcgatcccgccggacttcccggcgggcacctactacctcgccggtcccgggatgttcaccgacgaccacgggtccacggtccacccgctcgacggccacggctacctccgctcgttccgcttcgacgccagcggcgcggcgcactactccgcgcggtacgtggagacggcggcgaagcgggaggagcacgacgcgggcggcgcgtcgtggcggttcacgcaccggggccccttctcggtgctgcagggtgggagccgggtgggcaacgtgaaggtgatgaagaacgtggccaacaccagcgtgctgcgctggggcggccgcgtgctctgcctctgggaaggcggggagccgtacgagctggacccgcggacgctggagaccatcggcccgttcgacatcctcggcagcctctgcggcggtaccgacgaagtggcacgagacgccagcggcgaggctgcgcatcacgggcgccggcagccgtggctgcaggaggcagggatcgacgtggccgcgcgcctgctgcgaccggtcctcagtggtgtctacagcatgccggccaagcggctcctcgcgcactacaagatcgaccccaagaagaaccggctgctgatggtggcctgcaacgccgaggacatgctcctcccgcgctccaacttcactttctacgagttcgacgccaacttcgcgctggtgcagaagcgggagttcgtcttgccggaccacctgatgatccacgactgggccttcacggatagccaatacgtcctcctcggaaacagaatcaggctggacattcccggttcgctgctggcgctcacgggcactcacccaatgatcgcggccctcgccgtggacccgagccggcagtccacacccgtctacctgctgccgcgcaccccggaggccgaggccgaggccagcggccgcgactggagcgtgcccatcgaggcgccgtcgcagatgtggtcgatgcacgtcggcaacgccttcgaggagcgcaacgcccggggcggcatcaacatacagctccacatgtccggctgctcctaccagtggttcaacttccacaggatgtttggttacaactggctgaacaagaagctggacccgtccttcatgaatatagccaagggaagggaatggctacctcgtcttgttcaggtgtccatcgacctcgacaagagagggacgcgccgaggatgcgccgtccggagactgtccgaccagtggaccaggccggcggacttcccggcgatcaacccaggcttcgccaaccggaggagccgcttcgtctacgccggtgccgcctccggctcgcgcagattcttgccgtacttcccctttgacagcgttgtcaaggtagacgtctccgatggatcagcgcggctgtggtctgtcgctgggcgcaagttcgtcggtgagccggtcttcgtccccaccggcagtggcgaggatgacggctatgttctacttgtagagtatgcagtgtacgatcacaggtgccatctggtgctgctggacgcaaggaagatcggggaaaggaacgcagttgtggcaaaacttgaggtgcccaagcacctcaccttcccgatgggattccatgggttctgggcagatgaatgacgccacag

SEQ ID NO: 102272 - DNA, 1088 bp, Zea Mays
atctacgcaacacaaggtaggatcaatcaatcaagtccatcatgctgccaagttctctcctccagaggctggcaagttggtgcccgtggttgctgagagatgagccgaagcagcctgttaaggttctcgtcaccggcgctgcggggcagattgggtacgccatagtcgccatgatcgcgaggggtctgatgcttgggccagaccagccggtggttctccacatgctagacctccctaagtcgacggacgccctgagcggcgtcaggatggagctgatcgatgccgcgttgcctcttctcagaggtgtcgtggcaacgagcgacgaggccgaagcgttccgaggcgtcagcttcgccgtcctgatcggcggatggccgaggaaagaggggatgcagaggaaagacctcatcgccaataacgtccccatataccagtcccaggcctttgcgctgcagcagcacgctgccccaaactgcaaggttcttgtcgtggcaaaccctgcgaacacgaacgcgctcgtgctgaaggagttggcgcccgcggtgcccgccaagaacatcacctgcctcacgcgtctcgaccacaaccgcgccctgggccagatctccgagaagctgggcgtgcacgtcggcgacgtcaggaacgccatagtgtgggggaaccactcctctacgcagttccccgacgccagccacgctatcgccaggacgcagcacggggagaagcccgtcagggagctcatcgccgacgagaaatggtttaaggaggagtttgtcaccgtcgtacagcagcgcggcgaggcggtgatcaaggcgcgcaagcagtccagttcgctgtccgccgccagcgcagcctgtaatcacatgagagactggatccttggcaccccgaagggcacgtgggtgtctatgggtgtgtgctctgacgggagctatggcgttcccaagggcatcttctactcatttccggtgacatgcgagaagggagagtggtctatcgtgcagggtcttgaggttgatgacttcgcacgatccaagatggagctttcggcgaatgaactcgatgaagagaggtccatggcgtattag

SEQ ID NO: 102273 - DNA, 1296 bp, Zea Mays
atctacgcaacacaaggtaggatcaatcaatcaagtccatcatgctgccaagttctctcctccagaggctggcaagttggtgcccgtggttgctgagagatgagccgaagcagcctgttaaggttctcgtcaccggcgctgcggggcagattgggtacgccatagtcgccatgatcgcgaggggtctgatgcttgggccagaccagccggtggttctccacatgctagacctccctaagtcgacggacgccctgagcggcgtcaggatggagctgatcgatgccgcgttgcctcttctcagaggtgtcgtggcaacgagcgacgaggccgaagcgttccgaggcgtcagcttcgccgtcctgatcggcggatggccgaggaaagaggggatgcagaggaaagacctcatcgccaataacgtccccatataccagtcccaggcctttgcgctgcagcagcacgctgccccaaactgcaaggttcttgtcgtggcaaaccctgcgaacacgaacgcgctcgtgctgaaggagttggcgcccgcggtgcccgccaagaacatcacctgcctcacgcgtctcgaccacaaccgcgccctgggccagatctccgagaagctgggcgtgcacgtcggcgacgtcaggaacgccatagtgtgggggaaccactcctctacgcagttccccgacgccagccacgctatcgccaggacgcagcacggggagaagcccgtcagggagctcatcgccgacgagaaatggtttaaggaggagtttgtcaccgtcgtacagcagcgcggcgaggcggtgatcaaggcgcgcaagcagtccagttcgctgtccgccgccagcgcagcctgtaatcacatgagagactggatccttggcaccccgaagggcacgtgggtgtctatgggtgtgtgctctgacgggagctatggcgttcccaagggcatcttctactcatttccggtgacatgcgagaagggagagtggtctatcgtgcagggtgagttcttatcattataccagattggtagcaacagcagcaccaccgttcttgacatgatctgtttattgttcgaggtcttgaggttgatgacttcgcacgatccaagatggagctttcggcgaatgaactcgatgaagagaggtccatggcgtattagttcgtcgccagctctgaaagccatcagtagatcacttgtgtatacatgagtcatatgtaaacgaaaaaaaaatgggtgagcaacagacagttgcttcacaacaaccaataaagcagaaatattgcttgata

SEQ ID NO: 102274 - DNA, 738 bp, Zea Mays
atggaccttgacgcaatagcggctgcagaggaggaggagcgcatgctcgaggactttaatgaggctgaggatgctaggttcttcattggtttcggtgagaatgaaacccatggagatcctattcatatcgatactgtcgctggctctgcagtagggactggcacaggctccacaagcctgccagagttagtccctgatcctgatgctggtggaagcaactcgcactcaaagaaaaggtccaagtgctggaatgactttgatgaattgactaagattgtggatggcaaaaaagtcaggtatgctgctcgttgcaagcactgtaagcaaactcttagtgctcgttctacttctggtactggtcatttgcttcgtcataattgccctgctaagaaagcacatgaacgctgtgggcaagtccaatctgtgcttaagtacaatgctgacggtactttgcaacgttgggagtactctgcttctattgctaggactgaactatgtcgtttgattgctagggatgaccttcctttatggcatggttctactcctgcttttcaatgttatatcaatcgttctcacaatcctagatttgtgcatgtttctagacagaccactgccagggacatggttaaattttataatgaacgtatgagtgtaggtaaacaggaaaatggctgggcaatatggctatccgttattggagccagccttaacagcgtgaaaatggatgctggttcgtga

SEQ ID NO: 102275 - DNA, 249 bp, Zea Mays
atggagagagtacctggggtggaagagcagaagtcagcagaccaagttaaccaagctggtctagctgatgagagtaccacagtaccgtggctgaagttgggtcttgatgcgccaaaaagtgaagaagtcaagcctcaagaggtgaaaccagtgggcactccacataggactttctcctgcaactcctgcatgagaaagtttttcagttcgcaggctctcggtggtcgccggatgcgcacaagaggggag

SEQ ID NO: 102276 - DNA, 594 bp, Zea Mays
ctgggccgccgcggcctggacgtccgcaggggaggtggacgccggccgcggcagctcgtgcgcgcgctccgggaagttgaggtgcgcgcgcgccgccatctcggccgtggggaaggtgcccagccagatgcgcgacttcttgcggggctcccggatctccgacacccacttgccccagctccgccgccgcacgccgcggtacgacgggtgcttgtacccgctccggctctcgacgccgcgccggtggcggtggcggccgccgccgcctcggccttttcgccgacactcgccgacgcctcgttgtcctccgtgctgcagcagctgctgctctcctcgccttgctggccattactgttattggcgctgccgttgttgttggcttctacttcttgggagtccggcgaagacgccctcttccgcttgttcgtgcctttggacttcttgcagggagcctcttgcggcgcctcattgacgagcgaggacgaggatgtacaagacgaagaagagcaagatgtggttggtgcattgcttgtgtctactgccatggctcgttgggctgtagcgtccatggatggctaggagaggggagtgcca

SEQ ID NO: 102277 - DNA, 756 bp, Zea Mays
agtatacaacagccagcccaataatgacatatgggacacgtcactatcgaagagcttgtagttgtaggagcagatcgcggtaagcttaccacctaggcaccggcggacccgccagtccgcccctgcatccagtgatccagtcaatcgcggacgcccgcttggccgcttccatgggttccatgaggcggagttccgtgcggcttctcatagggttcctgctaattcggctcaattggtgctcggcggtgggcgacaagggcgcggagaaagtaggcgtggctttcccggtggtggtgagcacctggccgttccgtgaggcggtcagagcggcgtggaaggtggtttcgaccggtgaaggatggggttcggccgtcgatgctgtcgtcgctggctgctccgcctgcgaggacctccgctgcgatggtacaggtcagtacctgctggcctgttcccttgcacgtgtcgtccttcatatgtcaagagcaaggccgaacttgggtggcaattgccatgctgccctctgaagcacattgttgatgcagcagcattatcacattgattggaaacatgatgcaacatcagggactacaatagaaatgggttgttaagttttatggtttggatctggattacctgttgactgttgtatgccaatattgttgctttcatctgtagtcctgcaccagtaaagtacagtgtcagtatcaattgcaaatgttgttcaatgccttgtgccagacgtgccacgttagaggc

SEQ ID NO: 102278 - DNA, 1767 bp, Zea Mays
agtatacaacagccagcccaataatgacatatgggacacgtcactatcgaagagcttgtagttgtaggagcagatcgcggtaagcttaccacctaggcaccggcggacccgccagtccgcccctgcatccagtgatccagtcaatcgcggacgcccgcttggccgcttccatgggttccatgaggcggagttccgtgcggcttctcatagggttcctgctaattcggctcaattggtgctcggcggtgggcgacaagggcgcggagaaagtaggcgtggctttcccggtggtggtgagcacctggccgttccgtgaggcggtcagagcggcgtggaaggtggtttcgaccggtgaaggatggggttcggccgtcgatgctgtcgtcgctggctgctccgcctgcgaggacctccgctgcgatggtacagattacgtgtgcttctggtatgctgctgttctctgccacgcaccgatcggaggttgtacgtgtggaggatcggtgggcgcggtttgaaggctgaacggcggcgaggagccagcgatcgtgagagaaggaaaacaagttggtccaggtggaagtccagatgagaatggggaaaccactttagatgctcttgtcatgaatggggtaacatctgcattactttctcgtgcagcagttcaggttgatattttattttgttccatcattcagagtggatgcacattgcattattttcgcttaaggaaactgtcaggcaacaatggaaattggagctgtggcggccatgagatatgtgaaggatggaatcaaggcagcaaagttagtcatggagcacagcgagcatactctgctcgttggagagaaagcaacagcatttgcaatttcaatgggtcttccaggaccaactaacctcagttcaccagagtcaattgagaaatgggaaaagtggaaacagaaccactgccaaccaaacttctggaaaaatgttgatcctgtcggtaagtgtggtccataccatcctatcaatttagcctcagttgaagttgagggttctgtaaagaatgaggtagtggggagtcaaggtggtctctgccaggggtattttgaaagtgataatttactggagccaataaagtccaatttgaaggttgttaatcgccacaaccatgacacaatttctatggctgtgattgacaagatgggccacatagcagttgggacatcaaccaatggtgctacatttaaaattccaggaagggtgggcgatggaccaataccaggatcttcttcatatggtgatgatgaagttggggcttgtggagcaactggtgatggtgatattatgatgcgcttccttccatgctaccaagtggtagagagcatgcgacaagggatggatcctcgagatgctgccacagatgctatatcgagaattgcccgcaaatacccagatttcatcggtgccgtatttgcagtcaacaaggaaggggtgcatgccggggcatgccacggatggacattccaatactccgtacggaattccagcatgcaagatgtggaggtcattacagtatatccttagcaatcgcaattcaacgaaaacaaaagtttgctttatcagcatgtttaaaaatgtcacggctgcccccctgttgatgttttaaaaatgttctgtgcggattatttcaatgttttcttaaagtcgattgttttgaaactagtagtactgtatgtaccaatctgaccttagttgttttttccctggaaagtgttgaatgtcttg

SEQ ID NO: 102279 - DNA, 1632 bp, Zea Mays
agtatacaacagccagcccaataatgacatatgggacacgtcactatcgaagagcttgtagttgtaggagcagatcgcggtaagcttaccacctaggcaccggcggacccgccagtccgcccctgcatccagtgatccagtcaatcgcggacgcccgcttggccgcttccatgggttccatgaggcggagttccgtgcggcttctcatagggttcctgctaattcggctcaattggtgctcggcggtgggcgacaagggcgcggagaaagtaggcgtggctttcccggtggtggtgagcacctggccgttccgtgaggcggtcagagcggcgtggaaggtggtttcgaccggtgaaggatggggttcggccgtcgatgctgtcgtcgctggctgctccgcctgcgaggacctccgctgcgatggtacagttggtccaggtggaagtccagatgagaatggggaaaccactttagatgctcttgtcatgaatggggtaacatctgcattactttctcgtgcagcagttcaggttgatattttattttgttccatcattcagagtggatgcacattgcattattttcgcttaaggaaactgtcaggcaacaatggaaattggagctgtggcggccatgagatatgtgaaggatggaatcaaggcagcaaagttagtcatggagcacagcgagcatactctgctcgttggagagaaagcaacagcatttgcaatttcaatgggtcttccaggaccaactaacctcagttcaccagagtcaattgagaaatgggaaaagtggaaacagaaccactgccaaccaaacttctggaaaaatgttgatcctgtcggtaagtgtggtccataccatcctatcaatttagcctcagttgaagttgagggttctgtaaagaatgaggtagtggggagtcaaggtggtctctgccaggggtattttgaaagtgataatttactggagccaataaagtccaatttgaaggttgttaatcgccacaaccatgacacaatttctatggctgtgattgacaagatgggccacatagcagttgggacatcaaccaatggtgctacatttaaaattccaggaagggtgggcgatggaccaataccaggatcttcttcatatggtgatgatgaagttggggcttgtggagcaactggtgatggtgatattatgatgcgcttccttccatgctaccaagtggtagagagcatgcgacaagggatggatcctcgagatgctgccacagatgctatatcgagaattgcccgcaaatacccagatttcatcggtgccgtatttgcagtcaacaaggaaggggtgcatgccggggcatgccacggatggacattccaatactccgtacggaattccagcatgcaagatgtggaggtcattacagtatatccttagcaatcgcaattcaacgaaaacaaaagtttgctttatcagcatgtttaaaaatgtcacggctgcccccctgttgatgttttaaaaatgttctgtgcggattatttcaatgttttcttaaagtcgattgttttgaaactagtagtactgtatgtaccaatctgaccttagttgttttttccctggaaagtgttgaatgtcttg

SEQ ID NO: 102280 - DNA, 1534 bp, Zea Mays
agtatacaacagccagcccaataatgacatatgggacacgtcactatcgaagagcttgtagttgtaggagcagatcgcggtaagcttaccacctaggcaccggcggacccgccagtccgcccctgcatccagtgatccagtcaatcgcggacgcccgcttggccgcttccatgggttccatgaggcggagttccgtgcggcttctcatagggttcctgctaattcggctcaattggtgctcggcggtgggcgacaagggcgcggagaaagtaggcgtggctttcccggtggtggtgagcacctggccgttccgtgaggcggtcagagcggcgtggaaggtggtttcgaccggtgaaggatggggttcggccgtcgatgctgtcgtcgctggctgctccgcctgcgaggacctccgctgcgatggtacagttggtccaggtggaagtccagatgagaatggggaaaccactttagatgctcttgtcatgaatggggaaactgtcaggcaacaatggaaattggagctgtggcggccatgagatatgtgaaggatggaatcaaggcagcaaagttagtcatggagcacagcgagcatactctgctcgttggagagaaagcaacagcatttgcaatttcaatgggtcttccaggaccaactaacctcagttcaccagagtcaattgagaaatgggaaaagtggaaacagaaccactgccaaccaaacttctggaaaaatgttgatcctgtcggtaagtgtggtccataccatcctatcaatttagcctcagttgaagttgagggttctgtaaagaatgaggtagtggggagtcaaggtggtctctgccaggggtattttgaaagtgataatttactggagccaataaagtccaatttgaaggttgttaatcgccacaaccatgacacaatttctatggctgtgattgacaagatgggccacatagcagttgggacatcaaccaatggtgctacatttaaaattccaggaagggtgggcgatggaccaataccaggatcttcttcatatggtgatgatgaagttggggcttgtggagcaactggtgatggtgatattatgatgcgcttccttccatgctaccaagtggtagagagcatgcgacaagggatggatcctcgagatgctgccacagatgctatatcgagaattgcccgcaaatacccagatttcatcggtgccgtatttgcagtcaacaaggaaggggtgcatgccggggcatgccacggatggacattccaatactccgtacggaattccagcatgcaagatgtggaggtcattacagtatatccttagcaatcgcaattcaacgaaaacaaaagtttgctttatcagcatgtttaaaaatgtcacggctgcccccctgttgatgttttaaaaatgttctgtgcggattatttcaatgttttcttaaagtcgattgttttgaaactagtagtactgtatgtaccaatctgaccttagttgttttttccctggaaagtgttgaatgtcttg

SEQ ID NO: 102281 - DNA, 1605 bp, Zea Mays
agtatacaacagccagcccaataatgacatatgggacacgtcactatcgaagagcttgtagttgtaggagcagatcgcggtaagcttaccacctaggcaccggcggacccgccagtccgcccctgcatccagtgatccagtcaatcgcggacgcccgcttggccgcttccatgggttccatgaggcggagttccgtgcggcttctcatagggttcctgctaattcggctcaattggtgctcggcggtgggcgacaagggcgcggagaaagtaggcgtggctttcccggtggtggtgagcacctggccgttccgtgaggcggtcagagcggcgtggaaggtggtttcgaccggtgaaggatggggttcggccgtcgatgctgtcgtcgctggctgctccgcctgcgaggacctccgctgcgatggtacagttggtccaggtggaagtccagatgagaatggggaaaccactttagatgctcttgtcatgaatggggcaacaatggaaattggagctgtggcggccatgagatatgtgaaggatggaatcaaggcagcaaagttagtcatggagcacagcgagcatactctgctcgttggagagaaagcaacagcatttgcaatttcaatgggtcttccaggaccaactaacctcagttcaccagagtcaattgagaaatgggaaaagtggaaacagaaccactgccaaccaaacttctggaaaaatgttgatcctgtcggtaagtgtggtccataccatcctatcaatttagcctcagttgaagttgagggttctgtaaagaatgaggtagtggggagtcaaggtggtctctgccaggggtattttgaaagtgataatttactggagccaataaagtccaatttgaaggttgttaatcgccacaaccatgacacaatttctatggctgtgattgacaagatgggccacatagcagttgggacatcaaccaatggtgctacatttaaaattccaggaagggtgggcgatggaccaataccaggatcttcttcatatggtgatgatgaagttggggcttgtggagcaactggtgatggtgatattatgatgcgcttccttccatgctaccaagtggtagagagcatgcgacaagggatggatcctcgagatgctgccacagatgctatatcgagaattgcccgcaaatacccagatttcatcggtgccgtatttgcagtcaacaaggaaggggtgcatgccggggcatgccacggatggacattccaatactccgtacggaattccagcatgcaagatgtggaggtcattacagtatatccttagcaatcgcaattcaacgaaaacaaaagtttgctttatcagcatgtttaaaaatgtcacggctgcccccctgttgatgttttaaaaatgttctgtgcggattatttcaatgttttcttaaagtcgattgttttgaaactagtagtactgtatgtaccaatctgaccttagttgttttttccctggaaagtgttgaatgtcttggaaagtcgaaaccttggatcttctctgttggagttggagttgattgtacagaagttagacttggatatagtcaacttcgtcg

SEQ ID NO: 102282 - DNA, 114 bp, Zea Mays
gatggatgtttattttttttcggaaattagtatttgctgttgtcaacaatggccattgtcgacgattatagcagtttcaccattccttttcttttcttgtacttatataattca

SEQ ID NO: 102283 - DNA, 848 bp, Zea Mays
aaggatcagataatgaagagctagcttcagtgaagacggccggttatatatcctagcaagcaacgctccggctacaaggcaaagcaacacttgcttgtccagtaagtgaaggaagcggcagctgtccatcatccctcattctcagtttggggtcctgggcctgtggctgtggtggagagaggtcaggagtggagcgaggtcggaggaggtcaccacaccagcagcggcgacgacgatgctgatcctggacctggcgatctggatcatcccggtgacgctcgtcctcgtgccgttccggcggctggtggtcctggtggccaggctgcaggagctggaggagtgcatcatgcggccgcggccgccgctcatggactcgtgggcgtggggccgcgtcggcggcctgcacaccatgagcatcatgatgtgaggtggggaagtcaagcgagggcgctcaaggttcgaattcgaaccatgtataagctgcaatggagctcaaggtttttacctaggatgtaggagcttcttcccggttggtaaacggtaaccgagttcatatctctcggtcagtatggtatgggtatggatatactccgatcctgtcatcttcttttttctttctgaatatgttaattgtgcaatggtggccctgtatgtaagaaaatgtagatatatctgcagtcctgtgtacatgtcattcagaaacggagcacctgctggcgcccgttgtacctgaactctcattcacaacgcatgtccatgattcagggtgctctgtcctctgtagccggggggaaaaaattgtatagccggctgcatgcagataagtttctttacagctttcttccgat

SEQ ID NO: 102284 - DNA, 539 bp, Zea Mays
atggagatgacgacgtatggtggccacgatatcttgcgggggcgagcgacgggcgagggcgagatcggggcgacaatgatcggcaccggcgtgcatgggtcgtggggtgcctgccgaaggcgacaggacgacacgcgtgagggcgggggtgtcgttggtggcgcgggagagacgggcccgcggaggcggagccccggtgcatgggcgagagaatctccaccacaggcagacggattgtcggctcggaacgtacttttctgtcaggagcgagggagggttttagttatttttacatccctccccttacttgggaccctctcctcgttgctacccctagttttactctgtgctcagttttccccttcgcgatcaaactgaggcatcagtgccatccttccgtcaacttccgtgccgtttccgtcaaccgttaaaatgtagaaaaaaaaaaggcaaaaaagaaacacaatggtgggccaaggaatcgaacccagcaccacgtgataacatacagaaccgaacaccatcaaactacaagaaca

SEQ ID NO: 102285 - DNA, 1369 bp, Zea Mays
atggagatgacgacgtatggtggccacgatatcttgcgggggcgagcgacgggcgagggcgagatcggggcgacaatgatcggcaccggcgtgcatgggtcgtggggtgcctgccgaaggcgacaggacgacacgcgtgagggcgggggtgtcgttggtggcgcgggagagacgggcccgcggaggcggagccccggtgcatgggcgagagaatctccaccacaggcagacggattgtcggctcggaacctagcagatgagtttcttctgttggttgcgtcacatggtcacatttgtgtgcatcgacacacattccttcaaattccatctctatctgttgaccttgcattgcaacaacctcgttctgtttctgttgccgctccagagccacatcagtcctacgctccagctcgccgcgctgctccatgcgcggggcctcgccgtgacggtcctccacaccggcttgaacgcccccgacgcctcgcgccacccggagctcaccttcgtcctcatccacgagtcgtcgttccccgacgaggtcacgtcccccggcaccgacatcgtcacgcagctcctggccctgaacgtcgcctgcgaggcgcccttccgggaggccctcgcgtcgtactccgtggtggccaggacgtcgcgtgcgcggtggtcgacgggcagtgctactcggcgctgcgcgcggcacaccggctgggcgtcccggcgctcccgctgcggacagacagcgccgccacgttccgcagcatgctcgacggtagcgacacggacgcgctgtgcggcttcgtcggccacgtcgccgacgccgtgcgggcctcggcgtccggcgtcgtcatcaacacgttcgagaggatggaggcgtcggagctggccaagatccagcgcgagctgtcccgtccggcgttcgcggtggggcctctgcacttgctgtccccggcaccgacggagcagagcctgcacgcgcccgaccgcggctgcctggcttggctggacgaccacccgctgcgctccgtgctgtacgtgagcttaggaagtgtggcctgcgtcgaccgcggcgcgttcgtggagatggcgtgggggctggcccgcagcggggtgtcgttcctctgggttggccggccgggcttggtcggcggcgtggcgagagcagggccgacgcaaactgggcgggcgggcggccggagctcgagcagggcctgctgcggcggtccggggccggcgggcgggtgaccggagctcgagcagggcagacggcggcggtgttgggccgaacgtcgcgcgggcgggcggagctcgagcagggccggcagcggcggtgcggggctgaacgtcgggtgggcgggcagccggagctcgagca

SEQ ID NO: 102286 - DNA, 1250 bp, Zea Mays
atcaccttcatcgtctatcagccagctccattctatctactgctactctcagtactatatatctatccgcagttccatagttcttccagctgctctacacatacacatacacgctagctctagctctcacatcgattgagatcatcagagaggtggaagaagaagaagctaagataccagatcgaggaagagaggcggtgcggtggttggtagatgatggagagggtcgaggacttagggctcagcctcagcctcagctcgtccctcgcgtctcctcgcactcaccatgtcgccaccatgctgctacgcgctccaggtaaatatataatgcaatttgtctatatatatctctgtactaagtagctatgcttggatctatcagagagtaactgtgaatgaccatatcaattaagctgtagctagctctagtgtacatgtgtgagtcttatgtctgtctgactatatgtaagattagtagtcagcaactaaataccgtacgtgtatgagtatggctgtcactcggatgcatcacatataatgtatcagagaagaggttcctggagatgccactgctgctgcccgcgaagcggacgaccgaggtcaccggcgaggatggcctgcgaggcggcagcgatgaggaggacggcggctgcggcatcgacggctccaggaagaagctccggctgtccaaggaccagtccgcggtgctcgaggatagcttccgggagcacccaactctcaaccctcggcagaaggcagccttggcgcagcagctaggcctgcggccccgccaggtggaggtgtggttccagaacaggcgcgccaggacgaagctgaagcagacggaggtggactgcgagtacctgaagcgctgctgcgagacgctgacggaggagaaccggcggctgcagaaggaggtgcaggagctccgcgcgctcaagctcgtgtcgccgcacctctacatgcacatgtccccgcccaccaccctcaccatgtgcccctcctgcgagcgcgtctcctcgtccaacggcaactccgcagctgccacggcggccgcgcgcgcgcgcgccggcgccggcgccggcgccatcgtctgccacccgatcgaccgagccactagtacgtagtagtagtagctgctacactagctagctgttgctgtacacgggccggccgtacgtgtaagccaacaaaacagtctctctgcgcatttattcgaccgtgcaaacgactgttccctcgttaatctt

SEQ ID NO: 102287 - DNA, 1043 bp, Zea Mays
atcaccttcatcgtctatcagccagctccattctatctactgctactctcagtactatatatctatccgcagttccatagttcttccagctgctctacacatacacatacacgctagctctagctctcacatcgattgagatcatcagagaggtggaagaagaagaagctaagataccagatcgaggaagagaggcggtgcggtggttggtagatgatggagagggtcgaggacttagggctcagcctcagcctcagctcgtccctcgcgtctcctcgcactcaccatgtcgccaccatgctgctacgcgctccagagaagaggttcctggagatgccactgctgctgcccgcgaagcggacgaccgaggtcaccggcgaggatggcctgcgaggcggcagcgatgaggaggacggcggctgcggcatcgacggctccaggaagaagctccggctgtccaaggaccagtccgcggtgctcgaggatagcttccgggagcacccaactctcaaccctcggcagaaggcagccttggcgcagcagctaggcctgcggccccgccaggtggaggtgtggttccagaacaggcgcgccaggacgaagctgaagcagacggaggtggactgcgagtacctgaagcgctgctgcgagacgctgacggaggagaaccggcggctgcagaaggaggtgcaggagctccgcgcgctcaagctcgtgtcgccgcacctctacatgcacatgtccccgcccaccaccctcaccatgtgcccctcctgcgagcgcgtctcctcgtccaacggcaactccgcagctgccacggcggccgcgcgcgcgcgcgccggcgccggcgccggcgccatcgtctgccacccgatcgaccgagccactagtacgtagtagtagtagctgctacactagctagctgttgctgtacacgggccggccgtacgtgtaagccaacaaaacagtctctctgcgcatttattcgaccgtgcaaacgactgttccctcgttaatcttagtattattattattgactaata

SEQ ID NO: 102288 - DNA, 944 bp, Zea Mays
cgtctatcagccagctccattctatctactgctactctcagtactatatatctatccgcagttccatagttcttccagctgctctacacatacacatacacgctagctctagctctcacatcgattgagatcatcagagaggtggaagaagaagaagctaagataccagatcgaggaagagaggcggtgcggtggttggtagatgatggagagggtcgaggacttagggctcagcctcagcctcagctcgtccctcgcgtctcctcgcactcaccatgtcgccaccatgctgctacgcgctccagagaagaggttcctggagatgccactgctgctgcccgcgaagcggacgaccgaggtcaccggcgaggatggcctgcgaggcggcagcgatgaggaggacggcggctgcggcatcgacggctccaggaagaagctccggctgtccaaggaccagtccgcggtgctcgaggatagcttccgggagcacccaactctcaaccctcggcagaaggcagccttggcgcagcagctaggcctgcggccccgccaggtggaggtgtggttccagaacaggcgcgccaggtacgtacgtagcgcacatgcgatatgtcgccgcgcgctagctcgtgtgtgctgatgatcagcaagcatgcactgcatggccgggatttctctctcttttctgcccctcgctcgatcgcttcattcggtcgtgcaggacgaagctgaagcagacggaggtggactgcgagtacctgaagcgctgctgcgagacgctgacggaggagaaccggcggctgcagaaggaggtgcaggagctccgcgcgctcaagctcgtgtcgccgcacctctacatgcacatgtccccgcccaccaccctcaccatgtgcccctcctgcgagcgcgtctcctcgtccaacggcaactccgcagctgccacg

SEQ ID NO: 102289 - DNA, 1616 bp, Zea Mays
ctgctgtcacatttaaaatgatagtggctcgctagttctgctcggccgtgatcaaattctttccctccctttcgtcgcatgcttcaccaccaagtcttgtagcttcctctccccgcccgaaagccaaggatccatcgctccaactccaagcctctcaattccaactccatcgcaacagcctatcgagtccccgaacagtcctgcgcgcgtccgcaatggcggagacggccggcgcggctccagcacagcagcccgctagagtagctacgacgacgacgaacagcgatgtctccacgtgggcgtggctgcagcaggtcctcgcgctgctgttcccgtccagcctcgccgcgaaggccgcgctgtttgcgctcgtggtggcgctgctgccgctgctgccgtcggggcaggcgcccaggatctgggagctgccgcacctcctcctgctcggcatcatcatctcctacggcgtcttcggccagaagaacgccgacgccgaggtggccaccgctgcctacgccacgcccgtcgacgtggaggcgtcggtggaggcctacgtctcgcagatgatgcagggctcgcttgtcttcgacgaaaacgacggcaacgatggcgccaacaaggatggcagcgtccaacagcaggcgtggagctctcggtaccttccagacgacccgctcgtggtcgtcgcggacacttcagcgccagggaccaacagcggcaacggcgacaccgacacgggtgggaaagggaaaccactcctgctgccggtgaggaagctcaagccagcggcggcggcaccaacaggggatatgatgagcgacgtcagcggcattgaggacgagggggaggaggaggaagaagaagagttactcctagctcccaaatcgggaacgggatacggcgtcgtgcgcgagcacgccttcccttcgccgtcctctgtcctcgacgccgacctgaccctctcaccgtcctcgccgcctctgctcccgcctcctccaccgccgccgccgtttctcggccgcgggcgaagcggcctcctgaaggccaaggcgaggagcttcaacgagttcgggttcggggtccttagtagcgaccggagcccgaacggaagtttgggttcgcactcgcacagcgcggcgggcagcagcaggaagttccggcccaggtacgcggtgcaagcgacgaggagcagcaccttcggccgctacgatcctgtagtgcccatccacgacgacgaagcaggcgacgagacgttgggtgagatggttgcaacgtcggacagctcgtttagcagtgatctcgacgatgacaccatcaaggaggaaaacagctgcgaagatgatggggtgagtgaggacgacggcgtcaactcgtgcaacgaggagctctttgagctggcgacgagaccgggactggagggggaaacggagacggaggtggagggcgaggtggacaggaaggccgacgagttcatagccaagttcagggagcagattaggatgcagaaggtcgagcaggccaggagatgacgaccgaacgcgtccgaaagtgtttacaggcagcacgctcacaatcagcctccctcgtgtatgatagcgtgtaatttctttctttta

SEQ ID NO: 102290 - DNA, 1581 bp, Zea Mays
tcccaagccccaacggcaagaataacagagggcagagcaaagcagaagttgagcagagcagccccagaccagcacgctcaagcaaaacactctccctctcaaattccaaaccctgccaccacgaaccattgctctttccccattgcacatttaccccaccaagagtaacccgccgatctagagcgcgcccaaggctagaacagagcaatgcgcaaggcgctcgtcaacgccgtcctcttcccggctctcgccgtggtcgtcgctctggccatctgctacttcgtccgccgccgccgcggtcgcggccgcggtcgctcggtactgccctcccacggcggcagcgcgagggcggaccggttccaggcggccggcgcctcgggcggctacgtcgccggcggggaggaggtgctgttgcggttccccggaggcgaggcgctcacggtggccgcgatcctcgaggcgcctggggaggtggtagccaagtcttcgcacagcacgctgtaccgcgccgggctcagcgccggggaggccgtcgcgctgctccggttcgtgcgcccggcctgcgccgcgggcgcagaggaggccgcggcggccgcgcgggtgctcggcgccgtgcgccaccccaacctcgtgccgatccgcgcgctgtacatcggcccgcgcggggagaagctgctcgtgcacccgttctacgccgccggttcgctgcgccggttcctgcaagagggaatcaatgattcacagagatgggagataatttgcaagttgtctatcggcattgtgaaaggactggaccaccttcacacagcatcgcagaaaccaatcattcatggcaatctgaaaacaaataacattatgcttgacgctgatttccagcccaggatatcagacttcggcctctaccttctgctgaaccctgctgctgcgcaggagatgcttgagacatctgcaatgcagggttataaggctccagagctgatcaagattagggatggcaccagggagagtgatatctacagtttgggagtgattatgctcgagatgcttgctcagaaggaggccgcaaatgatgaatcgccaaatgcgcgtgacatccatttgccggtctctttcagagatctggttctcgagaggaagatatctgaagctttcagttccgagcttatcatacagagcaagaattctgggaaggagggcaatctgaatgcctactttgaattggcaacggcttgctgtaatccatcatcgtcattgagaccagatacaaagaaaatactaaaaaggcttgaagacatagcaagataacaatagatgcgcgcggcggtgaggctccagtctgtttagaaagtgtggtgtgttatagcagcggccagcaggatagctttgacgtcccttgtattgtttgttacttcctgcatacagcagagattgtgttgggggcatttggaaaatgatcctaacataagctaggagccccaagcatgtatagaaaagtatattttcctcgtaacaacataggaactcatccgagaacataatgtgtgtgctttcagcgtggaaatttcataaaattttcttaaa

SEQ ID NO: 102291 - DNA, 115 bp, Zea Mays
acatcaagaagatacaatagtactaagattactctcggtctctacacactaaaatgtacacaaccaaacagagatgaaaaaacaataggagaaacaaactcttcccaaaacaaac

SEQ ID NO: 102292 - DNA, 818 bp, Zea Mays
caaactcaccagaaaatgcagattgagtaggaacgtgtcttactgtggaaacttggatgctttctggtagaagacaattaaaaaatgaacctaaacattggggggaaagaaatcagatacctaaactctgaagcatgacaggacaaagacaggttaaactggtgataccaacccactcttgctagcctattcacccacccagggattgatttcttggtcaagctcttacagacatcatctgtaaaatggttgcagttcttcgaaatcaaatgatacgtgttgccgttgtactttcctgcaagattttcaatgaacgagcggaactctgctctagacaagtcagttgtgcccatccacacagatcttctgtagatgaaaccaggacagcttttcggttccacctcgaatactccacttgccggaaactggtgtgctccaaatccgtactccataccatgaactgtttatttgaagtggaaaataccgaggccgaaccagtagaggtagttgttcatgggcgtcaggtcgtacacgttgagcaccacgggcgcccctccgcaggagccgttctgcgcttccatgcccaccccgccgccggtgaagccgattggcgctacagatctcgcgactcgcgcggcattggcttcccggttagtgccctggtcgagctgaatcgaaggtaagcgaggctacggatcgttttgctccgccgctccgattttggtttggtttgaagcgagaagggaaagagctcgactcattaaccagcgaacgaaacaactagcatgataccgaccaccccgacctctcgagatatt

SEQ ID NO: 102293 - DNA, 362 bp, Zea Mays
cttagggcatgtacaacctagatacagctgcacggtactccaagtataagacacagctaaaacacaacataatacagtggtcatgtctaaaacatgtgtcttaccatattcattgtaccaatcagaacattcaataaattaaagtgaccaatcagatagtctcctgtctcgaatatagagctaagacactgtgtcttcgtcaagatacgtgtcttgagattttttacattcacccccctagacacactctaagacacaacttaagacacccactgtacatgcccttatagtagatcaggtattgatgataatgcacacactgcccaatacggcaatacgtttgccaagcaaaaaaaaaaaaa

SEQ ID NO: 102294 - DNA, 1337 bp, Zea Mays
cacttctttcccttccacacaacacacagctcactcaactcccctcccgcttcgtcagctcatcatcataaaccaaacagagagctctctctcggtcgttccattccaggatgctgcttaacccggcgtccatgctggacaccatccggcagcacctcctggaggagccaccagcggcggccgacgagagcttcgggatcctggtggcggaccagtggagcgactcgctcccgttccgcaccgacgacgccgacgacatggtggtgttcggggcgctgcaggacgccttcgcctacggctggctgcccgacggctccttcgcgcacgtgaagcccgagccggtgcggtcccccgactcctactactcctcctcctacgacggctcctgcttcggcggcctcccgtacccggagcagccactgacgcccggcagcgagggcgaggcggccgccacgcccagccccaggagggaggaggccgcggcggccgtggccaggggcaagcactacaggggcgtcaggcagcgcccgtggggcaagttcgcggcggagatcagggacccggccaagaacggcgcgcgcgtctggctcggcacctacgacaccgccgaggacgccgcgctcgcctacgaccgcgccgcctaccgcatgcgcggctcgcgcgcgctcctcaacttcccgctccgcatcggctccgagatcgccgccgcggccgccggggacaagcggccgttggcgttgcccgagcccgccacctcctcggactcgtcctcgtcctccaccggcggctcgcccaagaggcggaagcgaggcgaggccgccgccgccaacatggccatggcgctggtgcccccgccttcccagcttagccggccggcccagccatggttccctgccgcgccggtcgagcaggcggcgatgccgccgcgcgtggagcagctcgtcatctagctagccccgcgcgttaaaccgggctcgcggcgagacaatgaggcgtgcaagtgcaacgacgggtgcgccggtggaaagctgaggaaaacaggacgatgccctgcgctgcacttgcgcgaatgcgacggcgcgcggaatgcgataagctcgggagcaattgggggtccggatgccgctgttgctccgtgcaactcgcgcaagtggaaagaagctgtctgtgtgtagattcatccaagtgtcttgtctgcaaacggattttcggtatatgcgtccttgtcacctgtcagggtggtgtggtgtgagggcttgggcttgtgctgctgataagtttggagatctgtacaaagaaaaaacgtagggagaagatgagatcaagaacagtcgttg

SEQ ID NO: 102295 - DNA, 996 bp, Zea Mays
cgcatgcgtcccacgcggccgcgccagatcccgcctccgcgcgttgccacgccctctataaacacccagctctctccctcgccctcatctatcgcactcgtagtcgtagctcaagcatcagcggcaggagctctgggcagcgtgcgcacgtggggtacctagctcgctctgctagcctaccatggctgatcaccaccggggtgcgacgggaggtggcgggggctacggcgacctccagcgcgggggcggcatgcacggcgaggcgcagcagcagcagaagcagggcgccatgatgacggcgctcaaggccgcgacggccgcgaccttcggcgggtcgatgctggtgctgtccgggctgatcctggccggcaccgtgatcgcgctcacggtggccacccccgtgctggtgatcttcagcccggtgctggtgccggccgccatcgcgctggcgctcatggcggccgggttcgtcacctccggcggcctcggcgtcgctgcgctgtccgtgttctcctggatgtacaagtacctgacgggcaagcacccgccgggcgccgaccagctggaccacgccaaggcgaggctggcgtccaaggcccgcgacatcaaggatgcagcacagcaccgcatcgaccaggcgcaggggtcttgagagaagaaccacactcgagcggaccgcgcgcgcgacctccttgaaccactgccggcgcggcggcatatggcccttaaaggcggtggctgctgctacgtacgctgccgtagagtctcggtcgccgcgatagctctagctagtcgtttatgtgttgtgctttgtgtgtgcatgcttgtgtctgggggcatgcagtgcagtgcagtactatatgctgtatgcgtctctctttgatcggagaggcggatgtacagcatgctcgatatgtctagtttggatgtcatgtttatgatgaggaataaaatgcagtgttcaggtgagagaaaataaaaaaaaatcaaaagcaa

SEQ ID NO: 102296 - DNA, 2068 bp, Zea Mays
gaagcctggagaaacgtttgttgttcttccagaacacgccctcggaatcctatcgcctcccacagcacacgacgcgcctttgctgaactctctctgtcgccatgctgccggcggtcgccgctgcatcccccggcctctcacatctgccgcgctaccaccaccttggccgtcgctttcacctccgccgccaccgccttctacctgctattccggccaggctatcgtgtggggccacccacgcccgccgccttctccttgccggcgcgttcgcaaaaggggagggttcttcaggacaggatgttgatcactctgctggtgccacaaattctgggtctgcataccttggtctcttcgttcgattgcttggcttggataatgacacccgtgatagggagcatgctgtttgcacactctatcaatactcccttggtggaaggaagagcatcgatgagataatgcaattccctggttgtattgttctcatcattagcctcctgaaatcagagtccattcttgcctgcgaagcagccacaggtcttctgcgtaacattacgtcagttcacatatataggaagatggctggtgagagtggagcaatggaagaaatcattaatcttctctgtaaatctacaataacccccaagattctagagcagtgtttgtgtaccatttggaacttttctattgatgaaaaatggaggtacaaggttctgaagagcgatgtcctaatgaagattgttggttacctggatgaagaagacatacaagtcaaagaagccgctggtggtatcatatcaaatttagctttgagttcctctagtcatggagctttggttgaagtaggcgtcatcccaaaattggttcatcttttgcaaaccaaagaagatgactataagattattagaaaggaagctaaaagttcactaatacagctggccactgatgattgttactacagccttataatagaggagggtctagttcgggttcctttggttggctcagctgcatataaagcctttaaacctctccctcattcatggccctcttttcctgatggctctaagattcagcggagttctcatccctcaaagtacggtgctaccgaactgctccttggcttgagtgtcaatgagaacgatacaaaaccagatgaagctaaaattaatgctatgataggacgttctaatcagcaattccttgcacgtgttggagctattgagttggatgatcaaggacaagaggaatctggatctgaaaagaatgacatgtataccattttgccatgggtagatggtgttgcacggttagttttaatccttggacttgaagatgtctctgcaatcaaaaaggctgctagagcaatgggtgatgcatcaataaatgaacatatgcgtacctcattcaaggaagctggggctgttaaacctctacttcagctgctcaagcacaaagatgtacatgttagagaagctggtgcttatgcgttggaaaaattatgtgtaagtgccacagtctgccataatatcaaaacagaaggtggactagaattgcttgtaaatatagtcaaggatcgacatactccagtagaactactagagaagataatttatatactttctcgaatgtttgacatggggatttgcatggttgctgtgccggatactgaaggttataaggatagtgaaaacagtgcaaagacatctgttaaccaagagatgtccagcgagttgatctttgattttgatgctatctcacacttaacggaagttctaaaggaagcatcgccaaggttgcaagcaaaagtctgttgtgtacttgaccatatagcagcttcggagcaacatgccaccgcaatgactgctgcttgcactggttcagtaattgaagctattcttgaaataggggttattcatggtatttttttatccagtcttgcattagatttacaaatgcgtacattacttcttttccctgtatcatttatatatgtcatgaaatagttatgaaatactccctccgtcccaaattaaaattcgttttagttaattaatgggttcatacaata

SEQ ID NO: 102297 - DNA, 2763 bp, Zea Mays
atgctgccggcggtcgccgctgcatcccccggcctctcacatctgccgcgctaccaccaccttggccgtcgctttcacctccgccgccaccgccttctacctgctattccggccaggctatcgtgtggggccacccacgcccgccgccttctccttgccggcgcgttcgcaaaaggggagggttcttcaggacaggatgttgatcactctgctggtgccacaaattctgggtctgcataccttggtctcttcgttcgattgcttggcttggataatgacacccgtgatagggagcatgctgtttgcacactctatcaatactcccttggtggaaggaagagcatcgatgagataatgcaattccctggttgtattgttctcatcattagcctcctgaaatcagagtccattcttgcctgcgaagcagccacaggtcttctgcgtaacattacgtcagttcacatatataggaagatggctggtgagagtggagcaatggaagaaatcattaatcttctctgtaaatctacaataacccccaagattctagagcagtgtttgtgtaccatttggaacttttctattgatgaaaaatggaggtacaaggttctgaagagcgatgtcctaatgaagattgttggttacctggatgaagaagacatacaagtcaaagaagccgctggtggtatcatatcaaatttagctttgagttcctctagtcatggagctttggttgaagtaggcgtcatcccaaaattggttcatcttttgcaaaccaaagaagatgactataagattattagaaaggaagctaaaagttcactaatacagctggccactgatgattgttactacagccttataatagaggagggtctagttcgggttcctttggttggctcagctgcatataaagcctttaaacctctccctcattcatggccctcttttcctgatggctctaagattcagcggagttctcatccctcaaagtacggtgctaccgaactgctccttggcttgagtgtcaatgagaacgatacaaaaccagatgaagctaaaattaatgctatgataggacgttctaatcagcaattccttgcacgtgttggagctattgagttggatgatcaaggacaagaggaatctggatctgaaaagaatgacatgtataccattttgccatgggtagatggtgttgcacggttagttttaatccttggacttgaagatgtctctgcaatcaaaaaggctgctagagcaatgggtgatgcatcaataaatgaacatatgcgtacctcattcaaggaagctggggctgttaaacctctacttcagctgctcaagcacaaagatgtacatgttagagaagctggtgcttatgcgttggaaaaattatgtgtaagtgccacagtctgccataatatcaaaacagaaggtggactagaattgcttgtaaatatagtcaaggatcgacatactccagtagaactactagagaagccggatactgaaggttataaggatagtgaaaacagtgcaaagacatctgttaaccaagagatgtccagcgagttgatctttgattttgatgctatctcacacttaacggaagttctaaaggaagcatcgccaaggttgcaagcaaaagtctgttgtgtacttgaccatatagcagcttcggagcaacatgccaccgcaatgactgctgcttgcactggttcagtaattgaagctattcttgaaataggggttattcatgggaccagaagtgactctgagaactttgaaattcctagtgtagttataaaagaactcagtgaggctgtgtctgcagctgtgaggttactctcaaagttattgaactttgatcttttcatccgcagcataaacggtgaaaaaatcacttctttgctaagaagaacgctcaaatcaaatttcccccttcagtcaaaggattgtcttgcggcatgcctcattaagctagaatccagagctggcttatcaggagatcatggtgttagtagtatagatatggagataactatctatgagactattccaaggctaattgagcaaatgatgatatcactttcgtttgaaaataaaagaagtgctgtaatagagctcaacaagataatatctggtggtgtgctggaatatacaagagcagtggcagattctggaggcatatttccactggtgaaaatgcttgaagaggcggatggagatgcactggaggctatcttatctatcttatataatctgagcatggatccagagaatcacccagcaataattgctgctggagcagtgcctctgttgaagcggattgttcgtacagaagccccacaatggagtagtgcaattcagctgttgagaacattgcctgtatgacattgatgaagaaaatggccattcatcgccaacaaacattataaactgcacttagggcctgtttggtttgatggctaacttgccacactttgcctaacttttgtgcctaaggttagttcttcaattcgaacgactaaccttaggcaaagtgtggcacatttagccacgaaccaaacagccccttagtgcatgcacaggtacattgttaagatttcatcagtgtctacacgatcagtttgttccaaatgcctctgcgattatgattctttgaggttgttaatcactagggatgctagtcaccgtatcacttttacatgtataccttctctcttaacattacaatggtagaggataaccataattgga

SEQ ID NO: 102298 - DNA, 1309 bp, Zea Mays
cattttctggtagttttctatcccagaaaccttgaaatgcttctatcatatatctttatctctaaaatttctttatgttttctctatccaatagggaccagaagtgactctgagaactttgaaattcctagtgtagttataaaagaactcagtgaggctgtgtctgcagctgtgaggttactctcaaagttattgaactttgatcttttcatccgcagcataaacggtgaaaaaatcacttctttgctaagaagaacgctcaaatcaaatttcccccttcagtcaaaggattgtcttgcggcatgcctcattaagctagaatccagagctggcttatcaggagatcatggtgttagtagtatagatatggagataactatctatgagactattccaaggctaattgagcaaatgatgatatcactttcgtttgaaaataaaagaagtgctgtaatagagctcaacaagataatatctggtggtgtgctggaatatacaagagcagtggcagattctggaggcatatttccactggtgaaaatgcttgaagaggcggatggagatgcactggaggctatcttatctatcttatataatctgagcatggatccagagaatcacccagcaataattgctgctggagcagtgcctctgttgaagcggattgttcgtacagaagccccacaatggagtagtgcaattcagctgttgagaacattgcctgtatgacattgatgaagaaaatggccattcatcgccaacaaacattataaactgcacttagggcctgtttggtttgatggctaacttgccacactttgcctaacttttgtgcctaaggttagttcttcaattcgaacgactaaccttaggcaaagtgtggcacatttagccacgaaccaaacagccccttagtgcatgcacagccaatttcttagattgaggttgcggttgaacctagctccagctccctatcatcatcaaaatttgaattttatgatctggaagaaagcatcagcaaggcatttcctccaaagtagcgatatatgctgcccttttggctagttgaaaagcacaccggggcctgatgtgtccttttgctcacatcacatgccacggcaatagctagtaccacgaactattttggataccggcagtttgctggttgtgagaggacccaagaaagttcaaattgtagcttgctaaatcgtcgtgtttcgacactaggtgactttactctttaaaaatgctatcctttttgtgtaacctgaaatcctgaataacctccacggtgccaatatcaaaagaa

SEQ ID NO: 102299 - DNA, 517 bp, Zea Mays
agagcatagggaggcatacttttatcttcgaacaaacctttggtggatatacaagtatttgttgactgaagaatccgatgcagcagaaaatgtctttgaaaaaccaatttcttagattgaggttgcggttgaacctagctccagctccctatcatcatcaaaatttgaattttatgatctggaagaaagcatcagcaaggcatttcctccaaagtagcgatatatgctgcccttttggctagttgaaaagcacaccggggcctgatgtgtccttttgctcacatcacatgccacggcaatagctagtaccacgaactattttggataccggcagtttgctggttgtgagaggacccaagaaagttcaaattgtagcttgctaaatcgtcgtgtttcgacactaggtgactttactctttaaaaatgctatcctttttgtgtaacctgaaatcctgaataacctccacggtgccaatatcaaaagaatctctttttgactccagctggggtaatcgtg

SEQ ID NO: 102300 - DNA, 567 bp, Zea Mays
atggcgggcactactccgcgccgcttgctcctggtcatcgtccccctcgtcgccgtcgtgccggcgtccgcaaaagactacatggtcggcgactcgtccgggtggaagtccggagtggactacgctgcctgggccaagggcaagccgttcgccatcggcgacacgctctcgttccagtacagctcggcgcactcggtgctggaggtgagcgaggcggaccacggcgcgtgctcggcgagcaacccgctgcggtcgcaccagggccagagcaccaccatcccgctcaccaaggccggcacccgctacttcatctgcggcgcccccggccactgcgcctcgggcatgaaggtcgccatcaccgtctccggcggcggcggcggcggcagcagcagcgccgacaacaccgcgactccgtcgggtccctccgtgcgggcgacgaacacgaagccggcgtccggtggcgcgacgacgacggacgagtcggactccagcgcggctggcagcggcgcccgcctcgcgatgggcctgctgttcggggccgcgggcctcgctgcaataatgggctga

SEQ ID NO: 102301 - DNA, 513 bp, Zea Mays
agaacgcgctcggaaatgttagctgattaggtaaccaagcttcaccaagaaccgccgttttcgtatatatccccggcctttttggcaagcatggatgccttggctgcctgcacagtgccgcacagagagcaagcatagcatggccatggcccaagctcgcgtcgttgctctggctctgtgcgccctgctccttgtctccggcgtggcccggagagccgaggctgtctcgtacaacgtcggcaacagcgcggggtgggatctcagcgccgacttgccgtcgtgggccgacggcaaaaccttcaacgtcggcgacgttctaggtaagaaccttggttggtccccgtccttggcaacatcatcccctgctgtgtgtgtgtctcgtagcgtacacaggagccgaagtttgtcgcgcgcggttcaggttttgtttcctttgccaccgttcgaccgggaaccaaaaaggaaacgaagtccctgatcgtgcgcgacgcatgcatgtgtgttgtgttgtgt

SEQ ID NO: 102302 - DNA, 1035 bp, Zea Mays
atgccttggctgcctgcacagtgccgcacagagagcaagcatagcatggccatggcccaagctcgcgtcgttgctctggctctgtgcgccctgctccttgtctccggcgtggcccggagagccgaggctgtctcgtacaacgtcggcaacagcgcggggtgggatctcagcgccgacttgccgtcgtgggccgacggcaaaaccttcaacgtcggcgacgttctagtgttccagtactccagctaccacaccctggacgaagtcgaccaggccgggttcaacaactgcagcgccgccaacgcgctcctgtcgcggagcgacggcaacacgacggtgccgctgacggcgcccggcgaccggtacttcatctgcggcagccagctgcactgcctgggcgggatgaagctgcacgtgctcgtcagccagccggcgggaggagctccggcgaaggccacgccgcagtccacgccgcagacgggctccggggccgcccttgggcccagcaccgacgatgcggggcttgcgggcataccctggctcgttctcggcgggtcccatcgagctacggtgggctccatgctgctgacgtggctgttcgtagccacagctctgctgcttgtatgaggattgcagaagaggtcttttgatttgattttgactaagcacggtttgatttgatctttgtaaaaaaaatattgtgaaccaacgaatcggagcatcgagatcgagacgcactcgcacacgtctataaactagcagctcctgttggggtatgcttcgtagccgaagatcctaaaaagaacactttcgaaaggttttctcagaagcaagcgccgaagctattatctgtacagcttcggcacaaaggcaaatctcaagataaaggaacgaaccgacttaaatatgaattgacttaaaaacccatgatgttttgtgtcattattgtagttgattgtaaaggacataaatgtaattttgcgcaggttgcatcatgtgcctataaatagatgaacagtatcctggtactgttcacgc

SEQ ID NO: 102303 - DNA, 462 bp, Zea Mays
atgggaggcatgacgggggcagcgagaagtggtgtcggagccatcactggagggagcgtggccggggcaagcgccgccggtggcattgctacgggcggggaggcgactggagccggagtcgccggggctggcgcagcgacggcgacggtaggcgatgcgacgggaggtagcgtggctggaggggtagcagagacaggtggcgtagcggccagtggcggggaggaaaccggaggcaacgtggcagccagctgcggagaagcagctgcggtcggtggcgcggcggcgccggtaggaggtgcggtggcagaggcctgcggcgccgcggctgatgtagttggcgccgcagcaaaggcctgtggcggcaaggctgcttttgttggtgccgcggccgaggcctggggcgcggaggctgatgtagttggcggcaaggctgctgttgccggcgccgcggctgagacctga

SEQ ID NO: 102304 - DNA, 1930 bp, Zea Mays
atccagccgtccggcccataccgcgaatgtccacgaccgctgcaaaagtttcttcttcaggttcttaatcagtaatcacgcacggacgataaatccaagtaaggaaatccccgatgatctcctgcgcgtcgcagcgccagccactcgattagtggagtccaccaaccaagcacgcgtccctccccgtcccagatcccatcccgcggcagccggtcagtccgatccatctccagtacccagcccgtcacccgccttccccgttcgctctcgtcggcgcgcgatggagggtctcatcaaggggttggtccacgtggccatcgacgccgtggaggacgccgtgagggagagggaccacggccgcgccgacgacgacgaggtgccgaggaggagggcggcccaaagctccgatccagatgacgacggggaggaggaacgcgacgaacgatcgcggtcgacgtgggccgaggtcgtctccgagcagaagggcagcgatccggacgagcgccgggaccatcgaagctcggggcgggacaatcgccatgagaggagggatgacgagggttggaaaagggccgatggtcggaaccagcagcagcaccacgcaggccggcagaaccagtgcgagggggaggaaaggtgggatggcagtggcagccggcggcgtcagcaacagcagcaggcacaaggatacgggaatcagcatcaggaagaagaaaggataaacgatggaggctggcagaccgtcggtgagaaaaagcgccatggaagaccacagcagtctgaagcatggaatggatacagaaagccaccatcagaacaaaagtactctgaggatgtcggtcatatccaccaaggactcaatttcgagcccaccagggaggagctgaatagcttatcgaaagcgtgtagccgactttgggagctcgatatgaaccgtattgttcctggtaaggactacataatcgactgtggcaaggggaagaaagtttatcagaagggtgatatggcatctgaaagcttgttcagctggctaggcgacgatgtgctaagaaaacccacctactcacgtttctgcgcacttctggataactacaacccccaccaggggtacaaagaagttgttacccagcaggataagcacgaagaaatagctttcgttgaagagatcgctagaacagcgccaattaagtacttgcaccggtacttagtgcagaagggggctgtgcctcaggactacgaggacttcaagagaatgctgacatccctatggtttgatttgtatggaagaggtggcaactctagctgctcttctgcctttgagcatgtgtttgttggtgagatcaaaggacggggacaaggggagagtgaggtatcaggcttccataactggattcagttttacctggaagaagccaagggaaatgtggattaccaaggttatatatttccaaggcgccgtggtgaatcgcctgattcagagatacagctgctgactgttcagtttgagtggcatggcgtgctgaaatcggtatccagcacgttgattggcgtcagtcctgagtttgaggttgcactctacacgttgtgcttttttgttggaggggaagacaaccgcgtcgatattggcccgtatagtgtgaacgtcaagtgctaccgattggggaacaacaaaattggatcagcctttcccattgtagagaactgattatctggtgctatgcttctgcaggtttccaaatattcactttcttcgtttcataatcaattacgtgaagttaacaatgtactattttacttgtgcatgaaaaggtaccatactgttcaatttgttgctgccatctgcaatagtattgctacttgcactgctaaaaagttgacgaccgagactgaagttacttttcatgattttgttgctgtggatgtggaagct

SEQ ID NO: 102305 - DNA, 963 bp, Zea Mays
aaagaaatgcggaagcgaattacataaacttacattttattttgaaagcaagcttgagttatttttattacagaccagcctaaaagtgagtgcatagagtaatattatacaaaccagggaggcacaaactcctcccgagaagacaaaagcaaaagatcctaggtggaggaccgagtcctcccgcacttcagtcttgattttcttcttttggaaccaccttggcacagaagcagcaaaagtctgctacttcctcacctaaaaacaacgaagggataaaccctgagtatggaatactcagcaagtcttacccgactaaagaaaagactctcaagggtatgctggttatatgggagtcaaggtaaggcttttcaatattcaaagactctgtttttgcagaaatgcttactaaagtggatccttaaaaatccagttttatttgtcaggttaagtaaaattacctgcactagagttctttctaccctagttcaatcacttgtcctgcactagccaatttcttaataagagccctttatctttagtggaatgctacgtgtaagtcagtggccaagtctccataaccgcggaggtacggcgatccgaatcgattatactcagctgaggatctccaatcacacgacatatgtagcacttaacccttgcatatgtcaacccgccaccggggttcttaagaccggatcaggttcacgcaaaccgagagcacagatacaccaccgtccagcctcttgccacggagggtacacgctactctcgccaccgctccacgcccatctcgtgttatcttattccggccttagtctgcccgaggcaaggcttacccatgacgaggcatgtgaccagttaaagggtcctcggtcagcaggcctacatcgagacggtccttaattgactcagacggagacactacaccgagactcctttctcgtgcaagtcacccgcccggtc

SEQ ID NO: 102306 - DNA, 2697 bp, Zea Mays
agccacacagctttcgcctccggcgctagggtttcgcctccctccttgttcggtccgcgagtgtaccaggaccaggtgatttcttcccctttgatctgctgtgacgtgggagatgccgccgaagtctaagaggggtggcgctgccgccgcgaggaaggcgccggtgacgaggggccggatggggagggcgcaggctgcggcggaagcggcgccggttgtggaggagatggaggcgcctgctgaggaggtgaaggccgccgaggaggtcccgaaggtggtggaggcaccgaaggtggtggaggactcgaaggtggtggaggagccgaaaccctcgcctctgctgccgcaacagccggtggtggtggtggagaaagactccgatatcgcagccaacggtgccaaccagggtgaagatgacagagctgcaaaagaaatatatgaagaagaggacaaaggtgaacggctggagtttgaggatgaaccagaatatgaagaggaggctgctgtagactatgatgagaaagatttggagcagtatgaagagcaatatgaggatggtgatgaagaggtggagtatactgaagacgtggttgaagtggagacagatatggtggatgaggaacttgatgaaggtggtgatgatgtggagggggagggatacgaaaatgctgacgaagaccatcatgtggatggagatgatgaggagcataatgaaatggttaaagagcaccgtaagcggaaggagtttgaaatttttgttggtggactagataaagatgcaacagaaaatgaccttatgaaggtttttggtgaagttggtgagatcactgaagttcgtctgatgatgaaccctgtcacaaagaagaataaaggctttgccttcctgcgatatgcaactgtagagcaagcaaggcgtgctgtttcagagctaaagaatccactggtgcggggtaaacaatgtggcgttgctccaagtcatgacaatgatacactctttgttggcaatatctgtaaaacatggacaaaagaacatttgaaggataaactgaagagttatggtgtcgaaagttttgacgacttactacttgctgaggacactaacaatcctgggatgaatcgtggctatgccttgcttgagttttctactcgacctgaggcaatggatgctttcaggacattacaaaagagggatgtagtatttggagttgatcgtagcgcaaaggtttcctttgctgattcctaccctcaagtcgatgatgaaataatggcacaggtcagaactgtatttcttgatggccttcctccctcatgggatgaagaccgtgttaagaaatatctcaaaaagtatggagctattgagaaagtcgaacttgcacgaaacatgccagctgccaagagaaaggattttgggtttgttacatttgatacacatgataatgctgttgcatgtactgaagggatgagtaactctgagatcggtgaaggtgaacacaaggcaaaagtaagggctagactgtcgagaccattgcagagaccacctagaatgaaacatggattgagaggaaattttagagttgggcatggtgccccgcgaggtggccgtttaccatattctcgtgctcctccacctcgcaggcctccgccacgtcttattcggcctgctgttagccgcttaccatccatcaggagtcatccgttgaagcggcccatagatattagagataggcgtcctgctatgtcaatgccagatagagctaggcgtttccctccagagagatcttatgacaggaggcccccagctccagtttacctgaagagaagtccaaggagagaatacgggaggcgtgatgaacttcctcctccaaggagcagagctacaactgattacattaccagagttccggttgatagacgtccctctttgagggatgattattcaccccggggatcaggttattcagacctcggtcctcgtagtgctccccgtctttctgataggcgagcttatgctgatgatagttatggggagaagtttgaccggcctttagtggcctatagggagggtcgcggccgtgattatgacaccatttctggatcaaagcgtccgtatgcagatatggatgatgtgcctcggtaccaagaaatcggtgtccgtcagtctaaggcacgtttagactacgacattggtggcagcagtgctcggtatggagatacatatagtgagaggtctggacgaccacatgcgggatatagtagcagccgatctatccctgttcatgattcagcatatggcagcagccgtcatggaatgagttatggaggttctgctagcagtgctgatgctggtggtatgtacccaccgagttacagtggtagctatgggtctcgtggatctgatgttggtgggagttcatattcttcactttactcgggtcgcaatttgggtaccagcagtggtggctactatggaggtagcggttccagttcatattactaaggccctgcattttatggagctcctcgatttaagccacacagatctgtaaaagaagtgccaagcacccaagtgaggcaatgttttccaataagacatttcaacgaagccagaccatcgatttggttcgagcagtagttctgaggacgttctggcttgtttatgtaatgtaaggatttgctttatctggtcaagagttctga

SEQ ID NO: 102307 - DNA, 2910 bp, Zea Mays
agccacacagctttcgcctccggcgctagggtttcgcctccctccttgttcggtccgcgagtgtaccaggaccaggtgatttcttcccctttgatctgctgtgacgtgggagatgccgccgaagtctaagaggggtggcgctgccgccgcgaggaaggcgccggtgacgaggggccggatggggagggcgcaggctgcggcggaagcggcgccggttgtggaggagatggaggcgcctgctgaggaggtgaaggccgccgaggaggtcccgaaggtggtggaggcaccgaaggtggtggaggactcgaaggtggtggaggagccgaaaccctcgcctctgctgccgcaacagccggtggtggtggtggagaaagactccgatatcgcagccaacggtgccaaccagggtgaagatgacagagctgcaaaagaaatatatgaagaagaggacaaaggtgaacggctggagtttgaggatgaaccagaatatgaagaggaggctgctgtagactatgatgagaaagatttggagcagtatgaagagcaatatgaggatggtgatgaagaggtggagtatactgaagacgtggttgaagtggagacagatatggtggatgaggaacttgatgaaggtggtgatgatgtggagggggagggatacgaaaatgctgacgaagaccatcatgtggatggagatgatgaggagcataatgaaatggttaaagagcaccgtaagcggaaggagtttgaaatttttgttggtggactagataaagatgcaacagaaaatgaccttatgaaggtttttggtgaagttggtgagatcactgaagttcgtctgatgatgaaccctgtcacaaagaagaataaaggctttgccttcctgcgatatgcaactgtagagcaagcaaggcgtgctgtttcagagctaaagaatccactggtgcggggtaaacaatgtggcgttgctccaagtcatgacaatgatacactctttgttggcaatatctgtaaaacatggacaaaagaacatttgaaggataaactgaagagttatggtgtcgaaagttttgacgacttactacttgctgaggacactaacaatcctgggatgaatcgtggctatgccttgcttgagttttctactcgacctgaggcaatggatgctttcaggacattacaaaagagggatgtagtatttggagttgatcgtagcgcaaaggtttcctttgctgattcctaccctcaagtcgatgatgaaataatggcacaggtcagaactgtatttcttgatggccttcctccctcatgggatgaagaccgtgttaagaaatatctcaaaaagtatggagctattgagaaagtcgaacttgcacgaaacatgccagctgccaagagaaaggattttgggtttgttacatttgatacacatgataatgctgttgcatgtactgaagggatgagtaactctgagatcggtgaaggtgaacacaaggcaaaagtaagggctagactgtcgagaccattgcagagaccacctagaatgaaacatggattgagaggaaattttagagttgggcatggtgccccgcgaggtggccgtttaccatattctcgtgctcctccacctcgcaggcctccgccacgtcttattcggcctgctgttagccgcttaccatccatcaggagtcatccgttgaagcggcccatagatattagagataggcgtcctgctatgtcaatgccagatagagctaggcgtttccctccagagagatcttatgacaggaggcccccagctccagtttacctgaagagaagtccaaggagagaatacgggaggcgtgatgaacttcctcctccaaggagcagagctacaactgattacattaccagagttccggttgatagacgtccctctttgagggatgattattcaccccggggatcaggttattcagacctcggtcctcgtagtgctccccgtctttctgataggcgagcttatgctgatgatagttatggggagaagtttgaccggcctttagtggcctatagggagggtcgcggccgtgattatgacaccatttctggatcaaagcgtccgtatgcagatatggatgatgtgcctcggtaccaagaaatcggtgtccgtcagtctaaggcacgtttagactacgacattggtggcagcagtgctcggtatggagatacatatagtgagaggtctggacgaccacatgcgggatatagtagcagccgatctatccctgttcatgattcagcatatggcagcagccgtcatggaatgagttatggaggttctgctagcagtgctgatgctggtggtatgtacccaccgagttacagtggtagctatgggtctcgtggatctgatgttggtgggagttcatattcttcactttactcgggtcgcaatttgggtaccagcagtggtggctactatggaggtagcggttccagttcatattactaagaaccataagttactttaagtacacagatttggcatcacctcgtctttgtggaacagatttggcatcataggactttggtgtaggccctgcattttatggagctcctcgatttaagccacacagatctgtaaaagaagtgccaagcacccaagtgaggcaatgttttccaataagacatttcaacgaagccagaccatcgatttggttcgagcagtagttctgaggacgttctggcttgtttatgtaatgtaaggatttgctttatctggtcaagagttctgaacataacaaccagatatggtgttttaagtgtttcgacatgtttacttccagtgtttctataacattattgagacagatatggagtgtactttgaggtagtttctgcaattcaagttatttggggattaca

SEQ ID NO: 102308 - DNA, 2864 bp, Zea Mays
agccacacagctttcgcctccggcgctagggtttcgcctccctccttgttcggtccgcgagtgtaccaggaccaggtgatttcttcccctttgatctgctgtgacgtgggagatgccgccgaagtctaagaggggtggcgctgccgccgcgaggaaggcgccggtgacgaggggccggatggggagggcgcaggctgcggcggaagcggcgccggttgtggaggagatggaggcgcctgctgaggaggtgaaggccgccgaggaggtcccgaaggtggtggaggcaccgaaggtggtggaggactcgaaggtggtggaggagccgaaaccctcgcctctgctgccgcaacagccggtggtggtggtggagaaagactccgatatcgcagccaacggtgccaaccagggtgaagatgacagagctgcaaaagaaatatatgaagaagaggacaaaggtgaacggctggagtttgaggatgaaccagaatatgaagaggaggctgctgtagactatgatgagaaagatttggagcagtatgaagagcaatatgaggatggtgatgaagaggtggagtatactgaagacgtggttgaagtggagacagatatggtggatgaggaacttgatgaaggtggtgatgatgtggagggggagggatacgaaaatgctgacgaagaccatcatgtggatggagatgatgaggagcataatgaaatggttaaagagcaccgtaagcggaaggagtttgaaatttttgttggtggactagataaagatgcaacagaaaatgaccttatgaaggtttttggtgaagttggtgagatcactgaagttcgtctgatgatgaaccctgtcacaaagaagaataaaggctttgccttcctgcgatatgcaactgtagagcaagcaaggcgtgctgtttcagagctaaagaatccactggtgcggggtaaacaatgtggcgttgctccaagtcatgacaatgatacactctttgttggcaatatctgtaaaacatggacaaaagaacatttgaaggataaactgaagagttatggtgtcgaaagttttgacgacttactacttgctgaggacactaacaatcctgggatgaatcgtggctatgccttgcttgagttttctactcgacctgaggcaatggatgctttcaggacattacaaaagagggatgtagtatttggagttgatcgtagcgcaaaggtttcctttgctgattcctaccctcaagtcgatgatgaaataatggcacaggtcagaactgtatttcttgatggccttcctccctcatgggatgaagaccgtgttaagaaatatctcaaaaagtatggagctattgagaaagtcgaacttgcacgaaacatgccagctgccaagagaaaggattttgggtttgttacatttgatacacatgataatgctgttgcatgtactgaagggatgagtaactctgagatcggtgaaggtgaacacaaggcaaaagtaagggctagactgtcgagaccattgcagagaccacctagaatgaaacatggattgagaggaaattttagagttgggcatggtgccccgcgaggtggccgtttaccatattctcgtgctcctccacctcgcaggcctccgccacgtcttattcggcctgctgttagccgcttaccatccatcaggagtcatccgttgaagcggcccatagatattagagataggcgtcctgctatgtcaatgccagatagagctaggcgtttccctccagagagatcttatgacaggaggcccccagctccagtttacctgaagagaagtccaaggagagaatacgggaggcgtgatgaacttcctcctccaaggagcagagctacaactgattacattaccagagttccggttgatagacgtccctctttgagggatgattattcaccccggggatcaggttattcagacctcggtcctcgtagtgctccccgtctttctgataggcgagcttatgctgatgatagttatggggagaagtttgaccggcctttagtggcctatagggagggtcgcggccgtgattatgacaccatttctggatcaaagcgtccgtatgcagatatggatgatgtgcctcggtaccaagaaatcggtgtccgtcagtctaaggcacgtttagactacgacattggtggcagcagtgctcggtatggagatacatatagtgagaggtctggacgaccacatgcgggatatagtagcagccgatctatccctgttcatgattcagcatatggcagcagccgtcatggaatgagttatggaggttctgctagcagtgctgatgctggtggtatgtacccaccgagttacagtggtagctatgggtctcgtggatctgatgttggtgggagttcatattcttcactttactcgggtcgcaatttgggtaccagcagtggtggctactatggaggtagcggttccagttcatattactaagatttggcatcataggactttggtgtaggccctgcattttatggagctcctcgatttaagccacacagatctgtaaaagaagtgccaagcacccaagtgaggcaatgttttccaataagacatttcaacgaagccagaccatcgatttggttcgagcagtagttctgaggacgttctggcttgtttatgtaatgtaaggatttgctttatctggtcaagagttctgaacataacaaccagatatggtgttttaagtgtttcgacatgtttacttccagtgtttctataacattattgagacagatatggagtgtactttgaggtagtttctgcaattcaagttatttggggattacatcttgtgatg

SEQ ID NO: 102309 - DNA, 1788 bp, Zea Mays
atggtgtcgaaagttttgacgacttactacttgctgaggacactaacaatcctgggatgaatcgtggctatgccttgcttgagttttctactcgacctgaggcaatggatgctttcaggacattacaaaagagggatgtagtatttggagttgatcgtagcgcaaaggtttcctttgctgattcctaccctcaagtcgatgatgaaataatggcacaggtcagaactgtatttcttgatggccttcctccctcatgggatgaagaccgtgttaagaaatatctcaaaaagtatggagctattgagaaagtcgaacttgcacgaaacatgccagctgccaagagaaaggattttgggtttgttacatttgatacacatgataatgctgttgcatgtactgaagggatgagtaactctgagatcggtgaaggtgaacacaaggcaaaagtaagggctagactgtcgagaccattgcagagaccacctagaatgaaacatggattgagaggaaattttagagttgggcatggtgccccgcgaggtggccgtttaccatattctcgtgctcctccacctcgcaggcctccgccacgtcttattcggcctgctgttagccgcttaccatccatcaggagtcatccgttgaagcggcccatagatattagagataggcgtcctgctatgtcaatgccagatagagctaggcgtttccctccagagagatcttatgacaggaggcccccagctccagtttacctgaagagaagtccaaggagagaatacgggaggcgtgatgaacttcctcctccaaggagcagagctacaactgattacattaccagagttccggttgatagacgtccctctttgagggatgattattcaccccggggatcaggttattcagacctcggtcctcgtagtgctccccgtctttctgataggcgagcttatgctgatgatagttatggggagaagtttgaccggcctttagtggcctatagggagggtcgcggccgtgattatgacaccatttctggatcaaagcgtccgtatgcagatatggatgatgtgcctcggtaccaagaaatcggtgtccgtcagtctaaggcacgtttagactacgacattggtggcagcagtgctcggtatggagatacatatagtgagaggtctggacgaccacatgcgggatatagtagcagccgatctatccctgttcatgattcagcatatggcagcagccgtcatggaatgagttatggaggttctgctagcagtgctgatgctggtggtatgtacccaccgagttacagtggtagctatgggtctcgtggatctgatgttggtgggagttcatattcttcactttactcgggtcgcaatttgggtaccagcagtggtggctactatggaggtagcggttccagttcatattactaagatttggcatcacctcgtctttgtggaacagatttggcatcataggactttggtgtaggccctgcattttatggagctcctcgatttaagccacacagatctgtaaaagaagtgccaagcacccaagtgaggcaatgttttccaataagacatttcaacgaagccagaccatcgatttggttcgagcagtagttctgaggacgttctggcttgtttatgtaatgtaaggatttgctttatctggtcaagagttctgaacataacaaccagatatggtgttttaagtgtttcgacatgtttacttccagtgtttctataacattattgagacagatatggagtgtac

SEQ ID NO: 102310 - DNA, 553 bp, Zea Mays
ttttatttgggattcctgattttatttgaattttctatttgggaaggttggtgggagttcatattcttcactttactcgggtcgcaatttgggtaccagcagtggtggctactatggaggtagcggttccagttcatattactaagatttggcatcataggactttggtgtaggccctgcattttatggagctcctcgatttaagccacacagatctgtaaaagaagtgccaagcacccaagtgaggcaatgttttccaataagacatttcaacgaagccagaccatcgatttggttcgagcagtagttctgaggacgttctggcttgtttatgtaatgtaaggatttgctttatctggtcaagagttctgaacataacaaccagatatggtgttttaagtgtttcgacatgtttacttccagtgtttctataacattattgagacagatatggagtgtactttgaggtagtttctgcaattcaagttatttggggattacatcttgtgatgtgccggcaaaggccaggcttacaaaagaagttttggaatga

SEQ ID NO: 102311 - DNA, 955 bp, Zea Mays
acctggtggtgcccatttgaaaaaacaagttgaaggggattatttttcttttgcgtggcaacgatgatagatctgaaagcagaaataatttcttgaaaaacagtagccatagaattaagtacaagaatgctctattcaaattctgagttgaaggctgttgaatttttctccccagttgctggagcaaactcaaggatctagcacatttaagtttaactatctagtcaagtattcaacataaagatacttcagaatcacagtaagctgacaaatacatcttgtttcggaactgtaaggctgcaccattagtccatatcaatgtgatcatcattagtgcatgatttccattttttggtcttttattcatatgtttttagtaatgttattatcaaagcagtcgttgatccttaccttttgtatcctccctaacatgatagcgttgctgttttgatgctgttacttggttttcatgctaacatggcttcaatactatcgttgtttttgagcactttgagaattgtagccaccagcatgcctctccaaagacgtgcatggagattcaaaccggtatcttgcttgctgtcaaaagcaaccagatttgtgaactcgtcatgtgtgaattgtgatgttgtattgctctctagtttaccaatttgagcttgtaaagaacactgtagggatgaaaggaaccaaatgtacaaaaacagagtatgctgacgtttgtcacgcgcgtctgaatctgttccccgtttgagcttgtaaagcacactgcaggcgtggaagtgcttatatggaatatcatatggagacgttagtcacgtgcatatgaatatggtagttttagggccggtttgatttcccgtctaaggagccacaacttatctaataccctgcttgaatttggagcatggaattggtaattggaataaacttttctgaattctgttgtttggtt

SEQ ID NO: 102312 - DNA, 1140 bp, Zea Mays
accgcgaaattttacgggtcgcacgtcccgcgccgcgcggcgtgtcggtcaaggtgcccccacgcgccgcggttggcgccgccgccgctgccgcccaccgccgcccgcgtgcgcccaccgccacctgttgccgcctaaggggaacgcctccgttataacccaacgcttcaccatccatgccgtcctccaccaccgcttcaccatcccctccaggcccaccaccaccatggcctctccttccccttcttcccccgcccgcgcctccggccgccgcgtgccgccgccgtgctggacgaccgacgagaccctcgcgctcgcgcgggcctacaccgcgcgccgcctcgccgtcggccgggagcacctgacctccaccgactgggccgccgtagccgcggccgccccgtccaagaccgccaggcagtgccgccacaagatcgagaagctccgccgacgcctccggtccaaccgccgacgcccatgcccgctcctcgacgccatggatctcctcgacggcccttccccgcccttcttttccaagtcccagtcccgatccacgtccctgtcctcgtcgccgccgccaccggcggcggtttccacgccgtctcccccttcccctcccgcatctccgcccaggaagaggcggcgggacgatgcctgggacgaggacggtgtgagcgacgtggtgggtgctctgagggccatcggggagggtttcctgcgggcggaggagaggaggatggaggccgcacgggagacgcagaggatgcggatggagatggcgctccggcacctcgatgcacagaggaggctcatggacgcgcttgtcggccgcatcatcgacgccttggactgaagtggtggcacaaagatgtttcctctcaaggtttcttgcctgtcctcgttgcatgctgccttgcgaggagtttaggagtttcttagtgctgtttatatgtagtagttgtgatggatctgtgatgtagttgaaccggacaagctttagtgttttttcagtcttgcatttgctcaaaaggagagtttcttatggaagttgtcttgcctgttgcacgtctgtcgcctacttgtctccttactttcatgtatcacgcttttaatttgtttgatttttatgttctgatgaaa

SEQ ID NO: 102313 - DNA, 363 bp, Zea Mays
atggaggctgttcttgacaaccttctggccgtactttctccacttgtagccgtcgtccagcacatccacgtcgctccttgtctggaagcagaacctcggttccctcatcttcctcctcaccttcatccgtcctcctttctcccccgctgctgccgccgccgggcccttccaccaattgcaggaacttgggctgttgcatgcggtggcggcggtactagcgatctcgccggtggctttcgccgccgccgagctggtgcccgcctgcgaaaaccaagattacaaggatcaaggagagcatcccaccaggaccaggtggtggtcttctcgcagcaggacgggatggagtcgtcggctcgtcgctag

SEQ ID NO: 102314 - DNA, 1572 bp, Zea Mays
ggatggaatgattccagatttcaggtccatatcctcgaaaagctggatatcggccgcagcaaacaccaccacaaaccccccggcgcgcacaggagcgctcgacacggggtcgccagcgccgggcgacccctctcgtcgccatcacgccccaataattcactgcccacgcccgccatcgccaccactggcgtccgcaccgcagcccgccaataataacgctcccaaagcagaggccgaaacccgcgacgcgcagcgcagggccagtggcgacctccagctccagctccagctccacacgcgggcgccaccaaggagctgagccgagcccggcactgtcggcggccatgtccgcgccgcgtcgccgcatggccactgcctccccgtcgctccgcttcctcggcctgctcaagcaacccgacgacgccagctcccagtcccacggcgtccaggagctggagctcgacgagcgcgacgtcgtctggtcctccggcagcgcgacctcctcgtcctcgacctccgcggcctcctcgccgtccccgaccgcgtccccgaccgccagcctcgggaggccgatttccgcctcgtcccgccacttccccgccggcagcatggggctgtccgcgctcctcgccgacgccgacgaccaccacgcgcccaccgcgcccgtcccggccgccgcgcgcccggagaagcagcacgccccgcgcccgtgccaccagtcggcccccgtcgccgtgccggcctggcccaaggcgatgacggccgcggacaggcgccgccgcgaagcggagctgcaggccgcggacgacgaggacgacgacggcgagcccgtggtgccgccgcacgagatggccgcgcggcgcgctgcggcggcggcgtcggtcatggaaggcgccggacgcacactcaagggacgcgacctccggcgcgtgcgcaacgccgtgtggcgcaccaccggcttcctcgacctgtgaaaaaggacgttccttgcctttggaggtttcgtttcgttcgttcgctggccacgtcactccactccactccacttgagctgcctgcctcggatcggacggaccttggccgctgggcagcttcttcttgcgtagcgtagtgctgtgccagctgctaggcactgaaaaaaggtgggagtttccttactaggtttggagtactactaggggcgttatatattgagctaaatttgctggggaagtagccgcaggtgcttcggtattttcatgtaagagaactgctgtgatcagtctgcaactagtatgttttaagatgtctgcaactctttggcaaagaattttctctggagatgatgcagcatgccactgctaaacctgtggtctagtgtgcagcagaacagatgtgatgtgttcatagcttttgtattccactgtggctaatagagtgccttttttaaactctactactgtactaagtatactagcaaggtcgtcggtgcaattgcaaatagcgcgcggtatttagagttttatcacttcataatgttttcttgtaaatagttttgttagttggtttatttgtttatatattttttctatc

SEQ ID NO: 102315 - DNA, 83 bp, Zea Mays
ctcggactcattattatttctaacgctaacccggcttgtagttgtgattaactttgtaaatttcagtttcgccctattcaccc

SEQ ID NO: 102316 - DNA, 3330 bp, Zea Mays
ccctttggaccctttccagttgtccacgctcccatctttttcaccaccccttctccttctctctctcccccccaccctcgcccttctcccaccgcgcgcttgccctccggccgggcgcccgtcccgtccttccctacttgtaccagcccctcttttccaatttcatcctctccctccaattccaccatccctctctctctctctcgctcgccacccgcaccactctcgctcggtgtgtgggagagagaggaggggagggagctaggctggcatggccggccgcttgagctgcgcatgcctacaattcagtaccagtactagcaaagcaagctaggtaggagtaacacctccccaattgctacttctactgagttagccatcccgtcgtcccggcagtcacttctacaagtacgcacgcagctacccagcagggcggctatactaatccctccctgcctctgccttccttccgaggaccgccgcggcgggccggggtgcgcgcacccgccatgcagcagcagcaccagggtggcggcggcggcggtggcggaggctcacagttcggggccccgccgccggacatgggccccttctcgccgacgccggctgctaccggtcccatgccgctgagcagcaggcctccgtcggcgcagccgcagcagcaaccgaggaccagctacgaagaattggcgcccatggtgcctggggccgccgctgccagtggcttcgacgacgagacgatgggtagtggcggcggcggcggcgggtcgtcgggcgcgtccagcaaccggtggccgcgggaggagacgcaggcgctcatcaggatccggtcggagatggacgcaaccttccgcgacgcgacgctcaaaggccccctatgggaggacgtctccaggaagcttgccgacctgggctacaagaggagcgccaagaagtgcaaggagaagtttgagaacgtgcacaagtactacaagcgcacaaaggaaggccgcgccggcaggcaggacggcaagagctaccgcttcttcgaggagctggaggcgttgcacgcagccgcgccgcagccgccaccacagcacttgccggcagccagcaccgccccgcagttgcacgccctcgccgcgccagtatccccgacgccccagcagcagttgccggcatccagcgccgccccgccgttgcacgccttccccgcgccagtatccgcgccgccgccgttgagttcaatgccactgctgacagggccgatgcagccagcgcccatatcatcggcggccccagccccggcaccggtggatctgctcgtggcccaccagcccctcaacctgcaaggcttcagcttctcttccatgtcggactcggagtccgacgacgagtccgaggacgacgacatgacggcggagacaggcggaaaccaggaccgcctcggcaagcggaagcgcggcgacggcggcggcagcagcagcaacaagatgatgtctttcttcgaggggctcatgcagcaggtcgtcgacaggcaggaggaaatgcagcggcggttcctggagaccatggagaagcgggaggccgagcgcacggctcgggaggaggcgtggcgcaggcaggaggtcgcccgcctcaaccgcgagcaggagcagctcgctcaggagcgcgccgccgcggcctccagggacgccgccatcatcgccttcctccagcgcatcggcgggcagtccgtgcagccccctgctaccgccgttgttgtcccaatgccagcaccggtgtcagtccataccacgccgccgaaacaaccttctcgccagcagcagcaaccgccgccgccgtcgccccaggccggccaggcgacaccgcagtcgaagccaatctcagccgcgccgctccagcagcaaccgccacagcagcaaccgaaggatacgtcgcagcaggacgccggcacgccgcgcagcttgcccccggcgtctagccagtcactcgagctggtgcccgtcgccgccacggagcaccacgtcgattccgggctaggaggaggggatggaggtgcggcgtcgtcatcgcggtggcccaagaccgaggtgcacgcgctcatccagctgcgcatggacctggacatgcgctaccaggagacaggtcccaagggtcctctctgggaggatatttcgtccgggatgcggcggctgggatacaaccggagctccaagcggtgcaaggagaagtgggagaacatcaacaagtactacaagaaggtgaaggagagcaacaagaagcggcccgaggactccaagacctgcccatacttccaccagctcgaggccatctacaacagaaagcacctccgcagcctcacaaccgcggccacatcgtccgccgccgccgctcctcgtcccgcctacccagatcagctgaacccgagcaggcaagagatagaggggaagaacatcaacgatgacaagaggaacaacggtggatcaggtggaggcacgcaggtgccgaccagcaatggcgagacagcgacgacgacgacgacgacgacgctcgtcgcgttcgacgccgacaccggcatgaagaagccagaagacatcgtcagggagttgaacgagcacccgcgtcgggagttcacgacggaggacgagacggacagcgacgacatgggcgacgagtacaccgacgacggcgaggaaggcgaagacgacggcaaaatgcagtacaggatacagttccagaggccgaacccgggcggcaccaacaccgcgccagcaccggcagcagcgacgacggctgcgccagcggtgccgacttcggctccgaccagcaccttcctcgccatggttcaataggggcgcgggcggcacccctctcaaaccgtacgtacgtatatgcgtccaaaccaaaaacctgcgcgcatcaccgtcaccgtcacctcctcctttactttaccagtccaccaagcatgcaccatcagtccatcacactgttctcttgttcatcctgtaatcccccgtgccattccattatttattgatttgtttcgtgtataataagatccccaccgttgcggaggatgcagagtgaggctgtggtggtagagcaaaaaggaagagtccagtccctcagtaataacttatttataggtcatcgtcgatcgcgttaaacgagaactgtacatcgatgtaacagtcagtccatgatgtttttcctccctttttttttagttactcccttcccgggacggcagtatacaagtttgtataagagtatacaagaattacagacagttcaagcaacctggagcttgcggaggtgagaaggtgtttttgccgttgggaatctaca

SEQ ID NO: 102317 - DNA, 3393 bp, Zea Mays
ccctttggaccctttccagttgtccacgctcccatctttttcaccaccccttctccttctctctctcccccccaccctcgcccttctcccaccgcgcgcttgccctccggccgggcgcccgtcccgtccttccctacttgtaccagcccctcttttccaatttcatcctctccctccaattccaccatccctctctctctctctcgctcgccacccgcaccactctcgctcggtgtgtgggagagagaggaggggagggagctaggctggcatggccggccgcttgagctgcgcatgcctacaattcagtaccagtactagcaaagcaagctaggtaggagtaacacctccccaattgctacttctactgagttagccatcccgtcgtcccggcagtcacttctacaagtacgcacgcagctacccagcagggcggctatactaatccctccctgcctctgccttccttccgaggaccgccgcggcgggccggggtgcgcgcacccgccatgcagcagcagcaccagggtggcggcggcggcggtggcggaggctcacagttcggggccccgccgccggacatgggccccttctcgccgacgccggctgctaccggtcccatgccgctgagcagcaggcctccgtcggcgcagccgcagcagcaaccgaggaccagctacgaagaattggcgcccatggtgcctggggccgccgctgccagtggcttcgacgacgagacgatgggtagtggcggcggcggcggcgggtcgtcgggcgcgtccagcaaccggtggccgcgggaggagacgcaggcgctcatcaggatccggtcggagatggacgcaaccttccgcgacgcgacgctcaaaggccccctatgggaggacgtctccaggaagcttgccgacctgggctacaagaggagcgccaagaagtgcaaggagaagtttgagaacgtgcacaagtactacaagcgcacaaaggaaggccgcgccggcaggcaggacggcaagagctaccgcttcttcgaggagctggaggcgttgcacgcagccgcgccgcagccgccaccacagcacttgccggcagccagcaccgccccgcagttgcacgccctcgccgcgccagtatccccgacgccccagcagcagttgccggcatccagcgccgccccgccgttgcacgccttccccgcgccagtatccgcgccgccgccgttgagttcaatgccactgctgacagggccgatgcagccagcgcccatatcatcggcggccccagccccggcaccggtggatctgctcgtggcccaccagcccctcaacctgcaaggcttcagcttctcttccatgtcggactcggagtccgacgacgagtccgaggacgacgacatgacggcggagacaggcggaaaccaggaccgcctcggcaagcggaagcgcggcgacggcggcggcagcagcagcaacaagatgatgtctttcttcgaggggctcatgcagcaggtcgtcgacaggcaggaggaaatgcagcggcggttcctggagaccatggagaagcgggaggccgagcgcacggctcgggaggaggcgtggcgcaggcaggaggtcgcccgcctcaaccgcgagcaggagcagctcgctcaggagcgcgccgccgcggcctccagggacgccgccatcatcgccttcctccagcgcatcggcgggcagtccgtgcagccccctgctaccgccgttgttgtcccaatgccagcaccggtgtcagtccataccacgccgccgaaacaaccttctcgccagcagcagcaaccgccgccgccgtcgccccaggccggccaggcgacaccgcagtcgaagccaatctcagccgcgccgctccagcagcaaccgccacagcagcaaccgaaggatacgtcgcagcaggacgccggcacgccgcgcagcttgcccccggcgtctagccagtcactcgagctggtgcccgtcgccgccacggagcaccacgtcgattccgggctaggaggaggggatggaggtgcggcgtcgtcatcgcggtggcccaagaccgaggtgcacgcgctcatccagctgcgcatggacctggacatgcgctaccaggagacaggtcccaagggtcctctctgggaggatatttcgtccgggatgcggcggctgggatacaaccggagctccaagcggtgcaaggagaagtgggagaacatcaacaagtactacaagaaggtgaaggagagcaacaagaagcggcccgaggactccaagacctgcccatacttccaccagctcgaggccatctacaacagaaagcacctccgcagcctcacaaccgcggccacatcgtccgccgccgccgctcctcgtcccgcctacccagatcagctgaacccgagcaggcaagagatagaggggaagaacatcaacgatgacaagaggaacaacggtggatcaggtggaggcacgcaggtgccgaccagcaatggcgagacagcgacgacgacgacgacgacgacgctcgtcgcgttcgacgccgacaccggcatgaagaagaagacatcgtcagggagttgaacgagcacccgcgtcgggagttcacgacggaggacgagacggacagcgacgacatgggcgacgagtacaccgacgacggcgaggaaggcgaagacgacggcaaaatgcagtacaggatacagttccagaggccgaacccgggcggcaccaacaccgcgccagcaccggcagcagcgacgacggctgcgccagcggtgccgacttcggctccgaccagcaccttcctcgccatggttcaataggggcgcgggcggcacccctctcaaaccgtacgtacgtatatgcgtccaaaccaaaaacctgcgcgcatcaccgtcaccgtcacctcctcctttactttaccagtccaccaagcatgcaccatcagtccatcacactgttctcttgttcatcctgtaatcccccgtgccattccattatttattgatttgtttcgtgtataataagatccccaccgttgcggaggatgcagagtgaggctgtggtggtagagcaaaaaggaagagtccagtccctcagtaataacttatttataggtcatcgtcgatcgcgttaaacgagaactgtacatcgatgtaacagtcagtccatgatgtttttcctccctttttttttagttactcccttcccgggacggcagtatacaagtttgtataagagtatacaagaattacagacagttcaagcaacctggagcttgcggaggtgagaaggtgtttttgccgttgggaatctacattttttttgtcgatcctttttcttttaacagtggatataattaaatcctgttacttgttacagtgta

SEQ ID NO: 102318 - DNA, 1511 bp, Zea Mays
gcccagcatttcgtgattcgccgctcttcttccatctgccgcctcctcctctgtcctgtccaccctgtgcccagcttatccaggaaggcacagccaagaacgcatcgtcagtctcacacaccagctacaaagaagcgaccagaggactttgttctctgcccacctaccactaccagtcgcggacgctcctcccacaactcgcgggtctcgagatgttcaggggttgcggcctgttcgccggcgcccgccgggggcgcggcggcgacctcaggaagcgcggggagcaaggcggcgcgagctcgcgggtggcgccggccgagcccgtgtgcgtggacgaggcggaggacggcggcgccgcgcggcagctggcgtgggcggaggtggagaccgccacgggcggcttctcgtccagggtggtcggccgcggcggcttcagcacggtgtacctcgcctcgctctcctcctcgcggctcggcgccgtcaaggtgcactgcagcagcgagcgcctccgccgcgcgttccgccgggagctcgacgtgctgctctccctccgccacccgcacgtcgtccgcctcctcgcctactgcgacgagcgcgacgagggcgtgctggtgttcgagtacgcgcccaacggcgacctccacgagaggctccacggcggcgcgggcaccctcccctgggcgcgccgcgtggcggtcgcgttccaggtggcctcggcgctggagtacctccacgagggccgcgacccggccgtcgtccacggggacatcaaggcctccaacgtcctcctagacgccggcatggacgccaagctctgcgacttcggcttcgcgcacgtcggcgtctcggccacgatgggcggccgccggccctcggaccgcgccgtcatgggctccccgggctacgtcgacccgcacctcctccgctccggagtggccaccaaggcgagcgacgtgtacagctttggcgtgctgctgctcgagctcttgacgggcaaggaggccgtctgccgcgagacagggcaccggctcacggccgcggtgaggcctaagctcagcgatggtgatcaactgccgggcgttctggaccagaggctgggaggagactacgacgccgctgaggcggccgccgtggccgagctcgccatgcagtgcgtcagtgacagccctgggctccgcccgtccatggccgacgtggtgcgcgtgctccaggagaagacctccgccgctggatcgagagtcgaccgcaagcaagatggtgtcctaagttagatgccgatggagtagagtgtaaatatgtccttgatggtgctataattgtgttgagggtagttagccacaagaattggcgcagtgagatgaggttttagaatcactagatctctgatagaaaattttgtcatgccatcgagtgtcaatttgtcttgttgtgtatgtcgatggagtataccacatattcggcgggttgcaaggaactggtgatttcttgagccactatgactgcagactttt

SEQ ID NO: 102319 - DNA, 549 bp, Zea Mays
atgcatctgtggcacccaccgctcccagctggcccgctcgtctgcgacgtcagtttgcacctgctcccgctccgtccacggcaggctgaaaatatcctcgggactggtttggtggacagagaaacgaaggggatccatggaagcccccaacgatccccttcatttccctgtccacaaaaccaagcctcaagggtccatttctttctttggctcctgtccgagagtaaaactctaactaaatttaacttgagcattagaaagaaactagaagagttggtctattctatgccctcagggaaggagacgtttgctgggaagctgagaaagctgaaatccttggccacagcccacaagaccaataagaatttctggataaaccaagtggagaacaaatgggagaaatacatgttccaacaagcccagaattgggaagacaaagaaattccagaaaaagtgaaggcgaagcttgctgaaagtcttttggaggaacgagacatttcaaagaggcgttggtttagtgtgttaagtctgggagagtcctcagcttag

SEQ ID NO: 102320 - DNA, 442 bp, Zea Mays
ttttaggtcaagaagcttatcaaggataaaaaggatgatgctagaatttctgaatatatcgatataaataaagagcttcaagagatgagttaatttcttattttatcttgtaatgtgatccctcatgctcatgtagctacacattagatacgttggattaatgatactcacaaatggatgtttgatttctcctctggttttggggatgttgctatcgattcctctcttctttgttacaaggagctatgcccagcacaaggtagcatgaaaaaggttgcttgcaacataagatttgtttgggggtttagattttttgtaaccttgaaaggtaagaaggttaattatgacggtggtagggactgtctgaacaaccctattaataataatgaacaatatgtaaatatttagtgtctttaaagttggcctttacttattgtttgga

SEQ ID NO: 102321 - DNA, 660 bp, Zea Mays
atggtcaccttttgtaaagaagtaaagactatagttcatcatggtgaggacacaattggtcgaagcaatgctcgaggcaagaggatggaattccatgaaacagagcaaatgaacgaggagaagtatgaagcaaacgtggcagcactttcacaaatggagaagagagctgtaatggcagaaacaatgctagaagctacaaagcaataccaggctggacagttcatctcgtgcagatgttcatgggaagataaatcaagaaccaaaccaagatacgtcaacaagagaatcaacctgctttctaggggacttggatggcttgacaagaacaaggaaacaggcgagcttgagagctgtagacattcagcaaagataacgccacacaaactctacaaggagccaagactcttcctgggaacctcccaactgggtgtgccaaaatatatgttgatattcaagagtgatgacagagaagattatgagccgaaaacagactgcctcatgtggatgaacggatttttagagtactacaacaagcttctcttggaggagctagacaaactgctcaagatgaatcctgcagtgactattatctatgctgactattatggagctgcaatggaaattttccatttctctgaaccatttggtgctcgttgctga

SEQ ID NO: 102322 - DNA, 1545 bp, Zea Mays
ctgggtggctgggtgtgaaagggccgtgcgggaagctaaccaccgcgaaagcgcctctgggggagtcagacgaacgaagcaatccaaccgaacgaaccgacctaggtcgtcgtcggctcgtcccctccgcaggaccggttcgccgtctcgtcccgatctcgccgcctgcccgccgcgccctattaccgccatggaggcgctgtggaagcaggcctccaggctcaaggaccaggtctctcggcagggtgtgttcaagcagtttggctacgggaattctgataatgcgtttacagatgagtcagaggttaaactgcatcagagattggaaaagctttacttatcgactcgtgctgctaaaggacattgttcggggcgtggagggctatatagtcacaggatctaaacaagtcgaaatagggaataaattgtctgatgacagccagaaatacggtgttggaaacacatgtacaagtggtgatactttgtccaaagctgctacatatttcggaaaggcacgctcacagatggaaaaggagcgtggcaatatgttgaaagcatttggcacacaggtggcagagccactgcgggcgatggttatgggtgcacctttagaggatgccagacatatggcccagagatatgacagaacgaggcaagaagctgaagcacaggctgtcgaagtatcaagacggcagaacagggtgagggaatctactgggaatggcgatatggtatcaaaattggaagctgccgagtacaagcttgaagaactgaagtcaaacatggtgggattagggaaggaagctattgcagcaatgtcggctgttgaggctcagcagcaacggttgaccttacagcgtctcattgcactggttgaggctgagagaacttaccatcagagagttctggagatacttgacaaattggaagaagaaatggtgtctgagcgccaaaaaattgaagcacccccgactccagcagctgaaaattatataccaccaccagcaccaccatcttatgatgaaattaatggagcatttgcatccacttctgttaacgagtcagtccaatctgtcgatttcttccttggagaggcccttgattcatttaatgctgaaagtgagtttgagcttaccttgtcagctggtgacattgtaattgtccgaaagatctcaagcaatggttgggcagaaggtgaatgcaagggcaaagcaggatggttccctcatgcttatatcgaaaggcaggaacgtgttctagcaagcaaagttccacatatattttaggagtttctggcagtcgcattacacggttttcatttctattgttgggagctggaactgtatccatgttttcacttcctcttagtttccgcgatgtaattactggctgtcatgtgcatagattaaatttacttccctttttttagtctggaaaaggttttggatgtaacatatttttgagagaccaattggatatgggttaccttgatattgtgaaagagttaaaaactagctgttttatagatttttcttacctggactt

SEQ ID NO: 102323 - DNA, 1557 bp, Zea Mays
ctgggtggctgggtgtgaaagggccgtgcgggaagctaaccaccgcgaaagcgcctctgggggagtcagacgaacgaagcaatccaaccgaacgaaccgacctaggtcgtcgtcggctcgtcccctccgcaggaccggttcgccgtctcgtcccgatctcgccgcctgcccgccgcgccctattaccgccatggaggcgctgtggaagcaggcctccaggctcaaggaccaggtctctcggcagggtgtgttcaagcagtttggctacgggaattctgataatgcgtttacagatgagtcagaggttaaactgcatcagagattggaaaagctttacttatcgactcgtgctgctaaacattttcaaagggacattgttcggggcgtggagggctatatagtcacaggatctaaacaagtcgaaatagggaataaattgtctgatgacagccagaaatacggtgttggaaacacatgtacaagtggtgatactttgtccaaagctgctacatatttcggaaaggcacgctcacagatggaaaaggagcgtggcaatatgttgaaagcatttggcacacaggtggcagagccactgcgggcgatggttatgggtgcacctttagaggatgccagacatatggcccagagatatgacagaacgaggcaagaagctgaagcacaggctgtcgaagtatcaagacggcagaacagggtgagggaatctactgggaatggcgatatggtatcaaaattggaagctgccgagtacaagcttgaagaactgaagtcaaacatggtgggattagggaaggaagctattgcagcaatgtcggctgttgaggctcagcagcaacggttgaccttacagcgtctcattgcactggttgaggctgagagaacttaccatcagagagttctggagatacttgacaaattggaagaagaaatggtgtctgagcgccaaaaaattgaagcacccccgactccagcagctgaaaattatataccaccaccagcaccaccatcttatgatgaaattaatggagcatttgcatccacttctgttaacgagtcagtccaatctgtcgatttcttccttggagaggcccttgattcatttaatgctgaaagtgagtttgagcttaccttgtcagctggtgacattgtaattgtccgaaagatctcaagcaatggttgggcagaaggtgaatgcaagggcaaagcaggatggttccctcatgcttatatcgaaaggcaggaacgtgttctagcaagcaaagttccacatatattttaggagtttctggcagtcgcattacacggttttcatttctattgttgggagctggaactgtatccatgttttcacttcctcttagtttccgcgatgtaattactggctgtcatgtgcatagattaaatttacttccctttttttagtctggaaaaggttttggatgtaacatatttttgagagaccaattggatatgggttaccttgatattgtgaaagagttaaaaactagctgttttatagatttttcttacctggacttc

SEQ ID NO: 102324 - DNA, 799 bp, Zea Mays
atgaattagctgagctattatatagtttgagtgtgtctctgtttctcttcaacataaaacagtagtatttctcttacttcccccctcctttctttgtttctttttaggctgtcgaagtatcaagacggcagaacagggtgagggaatctactgggaatggcgatatggtatcaaaattggaagctgccgagtacaagcttgaagaactgaagtcaaacatggtgggattagggaaggaagctattgcagcaatgtcggctgttgaggctcagcagcaacggttgaccttacagcgtctcattgcactggttgaggctgagagaacttaccatcagagagttctggagatacttgacaaattggaagaagaaatggtgtctgagcgccaaaaaattgaagcacccccgactccagcagctgaaaattatataccaccaccagcaccaccatcttatgatgaaattaatggagcatttgcatccacttctgttaacgagtcagtccaatctgtcgatttcttccttggagaggcccttgattcatttaatgctgaaagtgagtttgagcttaccttgtcagctggtgacattgtaattgtccgaaagatctcaagcaatggttgggcagaaggtgaatgcaagggcaaagcaggatggttccctcatgcttatatcgaaaggcaggaacgtgttctagcaagcaaagttccacatatattttaggtaagactatttcacttctggagtctcaaggtgaaatggtcaagttgcatggaatttgaagctcctgctggatacct

SEQ ID NO: 102325 - DNA, 305 bp, Zea Mays
cggtctctagtctcttagtacgtggtaggtgtaggtgtcataagaactacgcgagccatacggattttagtatcagaaatgccaagtgtttgctccattctcatcacccccatggcgcctgtgtttttagttactctcggccggacggacgagtagttgctgtcaggcttttttttatcgctatggaacacattgtgcctgctacccatgcgaattagacatttgcaggtcgcagactctctccagcgcaaaaatatgaaatggggcaccttcacttcatatacaaatccatccaaaaaaaaaaa

SEQ ID NO: 102326 - DNA, 642 bp, Zea Mays
atggtcggcgtccgcagcgggccgggcggcggcgccacggcccggtacgcaccgtcgtgcgcgaacggccgccgctgctgcgcaagcgggggccgcccagccaacgacgcaaccacagcggggggaggctgcgcctgcggcggcagctcagagagcgagtcgtccatgatacgggacacccactccaactcctcgacgtcatgcgacggcagttcaaccatctccggcggcggcgacgggaggtcgtacgtcacgaccgacaacggctgcgagtcgtctttcgacctctcctcggccgcggcgggtaccggcggggcgtcatcgtcctcaggctcggcgccgtccttgtcaggctcgccaaactcctcgaggtccagcaagtcctcgaccgagaacccgtctttctcgacgagcgccccggcggcgtcggcgtcctccgcggtctcctccggcggggcgctgttgttgttacacttcagcgcgtccatcctggtatcatccttcaccggccggaaaaatacccatacaggtcgtatgtcaaaatcacaaattcccaacaccagaggggaagcagggcggttcaagaaaaaaagttttttcgtctctgggtttttttttttgtttatctctcggtataaataa

SEQ ID NO: 102327 - DNA, 1514 bp, Zea Mays
tcaccgccgagcagcttcgagcccactaaaagcctttggcaccccaagaccgccggtaccatgccggtcctccgctccccgttcgccgggggcgacctccccgccggcgacgccgacccggactacctctatttcctcgaacacatccgcatcgacggtgactcctacaccctcgagctcccctcccacggcgactccccgccatcactcatcaagtacgagaccccgttcgccagcccctccgacggcgagtgcgtctccgatccctcccagggccgcctcagcggcaaccgcagcgcgcaagacgagagggaaccggtggagtcggcgtcattggagacgggacccgcgtggtacgattgtctccatgacgtcgacgaggactaccgcctcttcctgcagcacacgcgcgttgtggacggccaattggttctggagatcgggggcgtcgtcgtcaactacgataacccggttgctgtggaatctccgggggagaaggatacgcagcggggggaagaggcggtttttgcttcgccgggggaagggatcagtgttgcagcggggagcgatcaggtcgcctccggtgctccagcgacggctgtttcggagcagaacgcgtccgattggcgtgcggatccatcaccacggcgtgaggtgaacgatggcggagatgaggggctgtcggatgcaagcgcgctgaagggcgcgtattgggaggcgagctcaagcgatggccgtcgtgcaccccctactaattcggggggaaaggtagaaaaggaactaggtattatatggcctacacatatcacaagaaggccagattcagatttcaagcgaaggttgatcaaggcccttacaaaaccagttgctcggaaggaatactatagattgtttgacacggttactatccgtactccgttaatgaagctgcggcaggtccgcaacgaaacaaaattctatcctaccgaagagatgggcagttcatatttggaccattacccagatctggcggagcaaattatgaacaatggccgtcgtaatggcctagctctgatgcgcgggtttctcttctggttgcagaacgcagtacatgaagatcagttcaagccatgggtagatgattctaataaagaacatgaagttatttatttggtggattgagctcgcactgacttggtggctatatcattcgtttgcttgatttcgcccgatggtggtaataactctgcgcgcgtgacaaattgtcctcagcggagactgtacggattccaacatgcgatggaaacctcgatcctgggacctggaataccatgttcacgagtatctattggatagcaatgcacatacattccagctgttgagtgaataaacggttcctcattgaaaataatacatgaacgctctatcttatgcattgtgtgattacgtctgggatgtgacccctgtagagttttcccaagactggagttagggtttggtcaatccgatgagttgttgcacttgatctccctatc

SEQ ID NO: 102328 - DNA, 1477 bp, Zea Mays
cgccactcgccaccccactttccaaaccagaccacagccgaaaacccccgatcatgccgccgccggtcgaaccctacatcccttcgttcaccgccggcttgtccgcgcacgaggccgccgatgccgacaaagactacctctacttcctccgccacgtccgcctcgacggagacgcctacacggtcgtgattccgtccaaggacggcgcctcctgtcctccccagatcatcaggtacgaacaaccgcactccgatcacaatgccggggcccccgtcgcgggctctgaatgcgggagacaaagggcccatcccccgtcggaggagaactcttgggctacgggtgaggccgccccacacggcgtgaagcgcaaggttccaggcgcgagccccgccggcgaggtccgaagcggtgctgtccgtatggaagaggacaccccgacattggtggcgaagtccgcgtggtatgacttgcaacccgacatcgacgatgactaccgcttcttcctccagaatgctcgcgtggtgaatgacaaattggtgttcaagacggggaactgttcaataactatcggggaccatagtgatgctgaggagcacgacgacaccgaggaggaagagaaagaggaggaaggggaaggggaagaggatgatgaagaagaagcagacgaccttcctgcgtcagggcagtcgggggaggacggtatcggtatggaggaggccggtcctgtgtcagagacagaggacggtgttgactcggatttgccaattccaaaggtgaaggatgaagtggtgagcaaaaatgaagaggatgatgtggggcctggatcagatttgcatattactaacgatcaggtgtattgtgagacggagaaggtgaaagaaggaggagggaatacgttgaatgatctagccaggagaacaacagatttggatcctttggacaagaaggaagcaagctcaagcaagggacatctggccatgcctctcaatccttcggaattacaaggcgttatatggcccccacatatcaatgagaggccaaattcagtttttaaagagaagttgattgagtttctcatcaaaccatttacacaggaagaatatgataggtattttgctctggctagtgatcgcattccaatggtcaaagaacgaaggacccgtaatacggtggcatactatcactggacgcatgagatgagcaagtcatactttgataggtacccagatcttgctcagcaattcagtctccaacgcaataactatacaaatggcttggctcttttgcgtgggcttttcttctggttgcagaacattgagctagaagaccaattcagaccatggagcgatgaatttaaaaagtaccgagttgtcatggaatgtttgtagagggtttacccatactagccattactccatccagttcagaaagtcgtttggtaagttagcgcggtcgtctctgtgcaactctctgacct

SEQ ID NO: 102329 - DNA, 286 bp, Zea Mays
ctcacctcacaaataaatagaccaatgctcctatcatttttcacccttatttttatcaattctgtctataaaaacaacataaatacatacaaatatatgaactctatttttatattgttaagcataatgttaaacatacaaataaacacaaatgttctataaagaaggaagtctagatttaatcatttaacttcaacactatattttgggatggagggagtagttttatggaacatatcaattttttgaataagacaaatgattgaagttattaaaaaaccacgtc

SEQ ID NO: 102330 - DNA, 2884 bp, Zea Mays
atgggggcgattggaggtgacgagcaggtgcagttggacaatgtggatggggccgaggtggccaatgacggcggtgcaggtgctgcgggaaggctggagaagatactggtctctgtgaggctgagaccgctcagcgacaaggagattgcaaggagggacccggcggagtgggagtgcatcaacgacactaccatcatctcccggagcaccttcccggaccggcctactgctccgactacgtattcatttgatagggtatttcgttctgactgtaataccaaagaagtatatgaggaaggggccaaagcagttgctctctctgtacaagtgtttttgcatatggtcaaacaagtagtggaaaaacatacaccatgactggaataacggaacatacagcagcagatatctatgattacattggcaagcatgaagagagagcatttgtattgaaattttcagcaattgaaatatataacgaagttgtaagggatcttcttagtgcagaaaacacatcacttagactttgggatgatgcagagaagggaacatatatagagaaccttacagaggtgatcttgagggatttggaccacctgaaagaacttatttctgtgtgtgaagctcaaaggaggaccggcgagacatacttaaatggaaacagctccagatcacaccaaatacttaaactgactattgaaagttctgctcgtgagttctcaggtaaggacaagtcaacaacacttgttgctagtgtgaacttcgttgatttggctggaagtgaacgtgcatctcaggcattgtcagttggggctaggctgaaggaaggttgtcatattaatagaagtctacttaccctaggaactgtgatccggaaactaagcaaggtaagaaatgggcacataccataccgagattcaaagctcacacgcatattacagatttctctaggaggcaatgcaagaacagcaattatttgtacaatgagcccagcccgaagccatatggaacagtcaaggaataccttgttgtttgcaagttgtgcaaaggaagtggtgacaaatgcccaggttaatgtggttatgtctgataaagcattaattaagcaattacaaaaagaacttgcaaggttggaaagtgaattgcgatgcccagcttcatatcctggtcttgaagcattagtgaaggaaaaagataatcaaatcctggagatggagaaagaaattaaggaactgaagttacaacgtgatgtcgctgaatctagactgcaagatctgctcaaggttgttggagataaccatggttcaaagcaccccctggcttcttctggaagaaactttgatgttcctcagccatgtgaggatgagcaatcgacgacatcagaagttgtcagcagtggccaaaattttaggcttcaaggacgccagacaacacaaagagattataggttacagcaatctgaaaatgatgtgcagtttgctacctctcttagctgttcagtcagcagtcccccgttcagtgggatgcccccaactaatggcagagatgataactctcaaatatctaatgaagattcaggggatctttgcaaagaagtacggtgcatagagaccaatgaaacagaggaaaacaaatgtttagagtcgtcagctgtgggaagcactagtctgcaagattcaaatgtagcttccagcatgcatgggaacaacaatacaaatcgatctgtgaattctagacagcatgatgagtctcctattaccctggagcaacatttggagaatgccaataattcgttagccaatcttgggatggatctgggatcctctacaggtaattcaccaagctcaaaagtaattgacagaagcaggagctgtaggtctctgatgggttctaccttgttggaagacttggagaaacaagattgcacccctccaagcagaagttttgtggactacccagggagacccgaaacatgtcaaagaagggtacctgcactgaactatgatgtagagagtgaaactttatccagaacaggatcaatgctatctgaaattattaccgcgagggacggactgaaggaaaacagctctattgctggtgatacagaatctgttgctggcataggtgaatttgttgcggagctaaaagaaatggtccagggtgatgatggagaattggctgaagggaccataaggagcgtggggctagatcccattatggatgacttgcaatcaccatctcgctggccattggatttcgagaagaaacaacaagagatcattgacctgtggcatggatgcaacgtttccttggtccacaggacttactttttcctgctgttcaaaggggacccagccgacgccatttacatggaagtggagcttaggaggttatcatttctcaaaaatacatactccaacggaagcatggggcgtaatgtggtagcaggcagcgtgagcgcttctctggttttaagtgcaaagaaactgcaacgtgagagggagatgctctgtaggcagatgcagaagcggctggcgatccaggaacgggagagcttgtacaccaagtggggagtctcactgtcctccaagaggaggcggctgcaggtcgctcggcgcctttggacggagaccaaggatctggagcatgttagggagagcgcgtccctcgtggccagactgatcgtgctcctggagcctgggaaggcgctgagggagatgtttggtctgagcttcgcgccgcagcagttcacccggagatcgcacaatagttggcgatatggccgttcttctctagactgactgaactcgaaaaactaagctgagggggaaaaacgttccgtccttttgtttttgtgtaatagattgttgccctcttggaaatagaa

SEQ ID NO: 102331 - DNA, 2900 bp, Zea Mays
atgggggcgattggaggtgacgagcaggtgcagttggacaatgtggatggggccgaggtggccaatgacggcggtgcaggtgctgcgggaaggctggagaagatactggtctctgtgaggctgagaccgctcagcgacaaggagattgcaaggagggacccggcggagtgggagtgcatcaacgacactaccatcatctcccggagcaccttcccggaccggcctactgctccgactacgtattcatttgatagggtatttcgttctgactgtaataccaaagaagtatatgaggaaggggccaaagcagttgctctctctgtagttagtggcattaactcaagtgtttttgcatatggtcaaacaagtagtggaaaaacatacaccatgactggaataacggaacatacagcagcagatatctatgattacattggcaagcatgaagagagagcatttgtattgaaattttcagcaattgaaatatataacgaagttgtaagggatcttcttagtgcagaaaacacatcacttagactttgggatgatgcagagaagggaacatatatagagaaccttacagaggtgatcttgagggatttggaccacctgaaagaacttatttctgtgtgtgaagctcaaaggaggaccggcgagacatacttaaatggaaacagctccagatcacaccaaatacttaaactgactattgaaagttctgctcgtgagttctcaggtaaggacaagtcaacaacacttgttgctagtgtgaacttcgttgatttggctggaagtgaacgtgcatctcaggcattgtcagttggggctaggctgaaggaaggttgtcatattaatagaagtctacttaccctaggaactgtgatccggaaactaagcaaggtaagaaatgggcacataccataccgagattcaaagctcacacgcatattacagatttctctaggaggcaatgcaagaacagcaattatttgtacaatgagcccagcccgaagccatatggaacagtcaaggaataccttgttgtttgcaagttgtgcaaaggaagtggtgacaaatgcccaggttaatgtggttatgtctgataaagcattaattaagcaattacaaaaagaacttgcaaggttggaaagtgaattgcgatgcccagcttcatatcctggtcttgaagcattagtgaaggaaaaagataatcaaatcctggagatggagaaagaaattaaggaactgaagttacaacgtgatgtcgctgaatctagactgcaagatctgctcaaggttgttggagataaccatggttcaaagcaccccctggcttcttctggaagaaactttgatgttcctcagccatgtgaggatgagcaatcgacgacatcagaagttgtcagcagtggccaaaattttaggcttcaaggacgccagacaacacaaagagattataggttacagcaatctgaaaatgatgtgcagtttgctacctctcttagctgttcagtcagcagtcccccgttcagtgggatgcccccaactaatggcagagatgataactctcaaatatctaatgaagattcaggggatctttgcaaagaagtacggtgcatagagaccaatgaaacagaggaaaacaaatgtttagagtcgtcagctgtgggaagcactagtctgcaagattcaaatgtagcttccagcatgcatgggaacaacaatacaaatcgatctgtgaattctagacagcatgatgagtctcctattaccctggagcaacatttggagaatgccaataattcgttagccaatcttgggatggatctgggatcctctacaggtaattcaccaagctcaaaagtaattgacagaagcaggagctgtaggtctctgatgggttctaccttgttggaagacttggagaaacaagattgcacccctccaagcagaagttttgtggactacccagggagacccgaaacatgtcaaagaagggtacctgcactgaactatgatgtagagagtgaaactttatccagaacaggatcaatgctatctgaaattattaccgcgagggacggactgaaggaaaacagctctattgctggtgatacagaatctgttgctggcataggtgaatttgttgcggagctaaaagaaatggtccagggtgatgatggagaattggctgaagggaccataaggagcgtggggctagatcccattatggatgacttgcaatcaccatctcgctggccattggatttcgagaagaaacaacaagagatcattgacctgtggcatggatgcaacgtttccttggtccacaggacttactttttcctgctgttcaaaggggacccagccgacgccatttacatggaagtggagcttaggaggttatcatttctcaaaaatacatactccaacggaagcatggggcgtaatgtggtagcaggcagcgtgagcgcttctctggttttaagtgcaaagaaactgcaacgtgagagggagatgctctgtaggcagatgcagaagcggctggcgatccaggaacgggagagcttgtacaccaagtggggagtctcactgtcctccaagaggaggcggctgcaggtcgctcggcgcctttggacggagaccaaggatctggagcatgttagggagagcgcgtccctcgtggccagactgatcgtgctcctggagcctgggaaggcgctgagggagatgtttggtctgagcttcgcgccgcagcagttcacccggagatcgcacaatagttggcgatatggccgttcttctctagactgactgaactcgaaaaactaagctgagggggaaaaacgttccgtccttttgtttttgtgtaatagattgttgccctcttggaaatagaa

SEQ ID NO: 102332 - DNA, 2176 bp, Zea Mays
acagccaaatccccaactcttccaaccgctcctccgcttagcgtgcagatctaacgatcgctccgatcccaagcacaacaacttctccaattccaatcaccagccgatcagatttatgcagtcttactgccgcgagcgccagtcatgccgcgcggcagcagcttggaccagagcttgagcgacgacgagggctcggcaggtgttggggcggtttgggttcggcgtcgctggcaatgtccgggatgtccgactccgctgggggtgtgcgcgcgggcgcggagctgatggtgcagcagttccacctcaaggtgctccacgccgtcctcgccgtgcgcacgccgcgcccgcacgccttcgcggcgccagcggcggcgtcgttcaggcggagggacaggtggttccatctcccgctccacgacccgccgccgccgcccgaggcggctgaccgcctggacgagctggtccccggggagccgctggtggtggacgtcctcctgagccccgccggtagtgtgggagcccgaggggaggtggtggagaggtggactgtggcgtgcgagccctggccggacgccgcgggcggcgaggaggttgccgtgaaccgggcgtacaagcactgcttcacgctgctcaggtccgtctacgccgtgctccgcgtcctcccggcgtaccgcatcttccgcctcctctgcgccaatccctcctacaactacgagatgggccaccgcgtcgacaccttcgccgagcccttctcgcgcccccaggaggccgccatgcgttcccaacgctttgttcccgtcgaaacccagctcggccgcctcgtcgtttccgtccagtaccttcccagcctcgccgccttcaacctcgagatcacctccctttcgccctccaagataatcccagactacgtcggcagcccagccgctgagcccatgcgcgccttcccggcctcgcttacagaagccacgggctccggcttcccaccatctaatcagcagcagcgcccgcacagctgggcttcgcctgtgttctggtcgcacacgccggcacaccaggccaggttctcgccgcctccagtgttttacgcgtcaccgacgccatcgcctccccactttccaccccgtctcatgaggtgggagtctgcaccaatgcccataccacaggtgagcgagaggaggagccctgcacaccgccagaatatgctaccaccaccttcgacgagaagaggagacatgagggcagcaggtgctctacagtctccatctgagagtggccggttgattgggaggatggaggaacttcggatagctgatccatatgtgacctcgtcacccagacataagggcaaggacactaaagatggatctggcagattctctgcactctcctcatgcgattcaccacggcaagatgatctggatgatgtggattaccatttcgacgttgatgatgttgatactccagtctcccaacctcggagaattgatgggaaggaaacaggtgatcaggttggttcatcatcccataaatctcaagacgcacaagtaggttctctagtcaacctgctgagaaatgccagcccgctgcgaaatcctagcaattcatcacagatatcaagggccgagtccagcgaagtagcctcagcaagctcggtcacgtcccgcaggacatctgacgcccttgaggagctccagtccttcaaggagataagggagcgactgctgttccggagcagcgcaaaacatcaagagccaccaggaaaaccataaggccattctttgttttgtttctcttaacgtgatcgctgatagactcccaaccgggaaaccatatgcacagcgaactatagttgctgtgttcatgtatatacgagtgctaaagttgatgcttttgattgaagagaaggcaccggcttccatttatttcagcggaacaatcactcgtcgttctcaagagtgatggagtgatgccgctgttgatactcttttgtatatgggaagcgaaaccgatacacgtaggtgggagcgagggagcctgtgaattgtgatggatgaaagcaggtctcattgtgtgcgtgtgtttgtaaattatgtaactgctggaaatcaaatgttcattagacgtcaacctttgaagagttgctcgcacttcgcaagactagttttatttgctcttg

SEQ ID NO: 102333 - DNA, 738 bp, Zea Mays
atggaccctcacctcagctcccacgttcacgcggcagctgcggcggcctcggctttccccgatggtaagaagttggagagtgacgtgctgcctccaggggtcgtgaccctcgacgtcgaggcgggtgcgccgacgaacgcggccggggccgatccgcgcgacggcgacgacggggacgccggcttcgactacatggcccgcgcgcagtggctccgcgcggccgtcctcggcgcgaacgacggcctcgtctccgtggcctccctcatgatcggcatcggcgccgtgaacgcgacgcgcaaggccatgctggtctccggcatggcggggctcgtggccggcgcctgcagcatggccatcggcgagttcgtctccgtgtacgcgcagtacgacatcgaggtctcgcagatcaagcgcgacggcgaggaagccgccagggacagcctgccgagcccgacgcaggccgcgatcgcgtcggcgctggcgttcgcgtttggcgccctcctgccgctgctggcgggggtgttcgtaccgtcgtgggccgccagggtggccgcggtgtgcgccgcgaccagcgtcggcctggccgggttcggcgtggcgggcgcgtacctgggcggcgccaacatgctgaggtccggcctgagggtgctcctgggcggctggttcgccatgctcgtcacgttcggtgtgctccggctgttcgggacggtcttccacatacaagtctcgtcggcgtga

SEQ ID NO: 102334 - DNA, 342 bp, Zea Mays
atgcagcgatggacccgcaacgggatgctcgacttctcgcagccgtcggcgtcgtccccatacggcttctacaacgccggccagggagcgtcgagcagccgcggcaggtcacacggctgccggagccaggacaaggagcagcgcaatctggagaagaacctgaccaaggtgcgcaaggagtggatgaaggtgaaggaggagatggggtacgcgaggctgctgagcgagcacctcagcgagacggtgacggaggctgaccggaaggtggccgccatgctggaggagctcgaccggacggacaagtatatgcaggacatactgtcctcgtccctgcagaagtga

SEQ ID NO: 102335 - DNA, 2538 bp, Zea Mays
atggccgccgaggcgcccgtgcgagcccccgccacggcgcggtcctcgcgccggccggccgccgccgtcgtctccgcctcgcgcctcctcctcggccaccgccccttccttgcgccgcgcttcgctgcggggcgcgccgcggtggcaggccccgcggccggactacgcccgcgcccgcgcaggccgcgcctctcggtcgtcgtcatggccagcagcgatcgccaagtgcctttacatgattaccgcaatattggtattatggcccatatagatgcaggaaagacaacaactactgagcgcattctgtattacactggaaggaactacaagattggtgaggttcatgagggaacagctacaatggattggatggaacaagaacaagagagaggaataaccattacatctgcagcaacgactgccttctggaacaaacacagaatcaacattattgatactcctggtcacgtcgacttcactcttgaggttgaacgtgctctcagggtgctggacggtgctatatgtctctttgacagtgttgctggggtagaaccacaatctgaaactgtgtggcgccaggcagataaatatggggttccaagaatatgtttcgtgaacaaaatggaccgccttggagctaacttctttagaactagagacatgatcgttgcaaatttgggtgccaaaccattggtgattcagttgccgattggttcggaggacaatttccaaggagttgttgatctagtaagaatgaaagctattgtatggacaggggaggagctgggtgcaaaatttgaatacaaagacatacctgctgatctccaagagatggctcaagactatcgtgttcaaatgctggaaactattattgaattggatgatgaagttatggagaaatatcttgaaggaactgaaccagacgaggaaactgttaagaaactaatcagaaagggagcaatttctgccagctttgtcccagttttatgtggttcggcattcaaaaacaagggtgtccaaccattgcttgatgctgttgtcgattacttgccatctccacttgatctaccttcaatgaagggtactgacccagaagaccctgaaataatatttgaaaggcaaccaagtgacgatgaaccattttctgggttagctttcaagatcatgactgatccattcgtggggtcactaacatttgttcgcatatactccgggaagctgatagctggttcctatgttctcaatgcaaataaagataagaaagaaagaattggaagacttcttgagatgcacgcaaacagtaaggaagatataccagttgctgtgacaggtgacatagtagcgcttgctggtctgaaagacacaattactggtgaaacactctgtgacccagacaagcctgtagtgcttgaacgtatggaatttcctgatcctgtcattaaggttgctattgaacccaagaccaaagctgatgccgacaaaatggctactgggttaatcaagcttgctcaagaagacccgtcattccacttctctagagacgaggaaaccaaccagactgttattgaaggaatgggagaactgcatcttgatatcattgtagacagactaaagagggagttcaaggttgaagcaaacgttggagctccacaagtcaactaccgtgaaagtatttccaaagttgcggaaatacaatatgtccacaaaaagcaatctggtggatctgggcagtttgcagacattattgtgcgttttgaacctttggaagctggaagtgggtatgagttcaagagtgaaatcaagggaggggcagtgcccaaagaatatgtaccaggggtgatgaaaggattggaagaaagcttacccaatggtgtcctagccggttacccagttgtggacttccgggctgtgctggttgatggctcatatcacgatgtcgattcaagtgtcttagcattccaaattgcagccagaggagcattccgtgagggaatgaggaaagctggtccaaggcttctagagcctataatgaaagttgaagtgataactcctgaagagcatctgggtgatgttattggtgatttgaactctagaagaggacaggtcaacagcttcggggataagcctggtggactcaaggtggttgattcttttgtgccacttgctgagatgttccaatacgtcagcaccctccggggcatgaccaaggggcgagcgtcctacacgatgcagctcgccaagtttgacgtcgtcccacagcacatccagaaccagatctccgtggcaaaaacagaggaagctgctgcttagttttggttttccgtagatatatccatacagcaacaggagagcaggttgataggaaggacatcaaggtgtatgtagctttgtagtgtaaatctcttaaggcttgttcggatgattggaggggattgatatggattgagagagattttaatttactatggattgaaacttcctcaattcatatggattggactagaaccgaacatggtctaagggagcattatttgccat

SEQ ID NO: 102336 - DNA, 2106 bp, Zea Mays
tccggtgcccactcacgcgacggacgcgtgtttccagccttccaggcgcctctgctgcctgcgcctgcgcgcgtcgtgaaggcgtgaacggcagctcggctcggcgcaggccccccgcccgcgccggcatcgcgtcgcggccgccgcgcgagccccatgctgcgttgctgccgcacgacacgtcacttcgggtagcttttttaaagccccccacggacccaaccccgccgtcaccactcaccccagtatcccactctctcgcacttaaccgcctgctctctctgtctgacgcgccggcgccgccctcgcgatcgatgatggcagctgcggcgtggttgtgtggactcctctcgctcctggccctcgccggcgctgcgtcggctgcggatggggcggagggtgagtgggagccgctgatacggatgccgacggcgaaggggagtgacgctgcttctgctccggctgctgaggatgatgaagtggggacgaggtgggccgtgctcgtcgccggatccttcggttatgggaactaccggcaccaggccgatgtgtgccatgcgtaccagatactgcagaagggaggagtgaagaaggagaacattgtggtgttcatgtatgatgatattgcccacaacattctgaaccctaggcctggagttatcattaaccatcctaaaggagcaaatgtttatgatggtgttccaaaggattacacaggtgatcaggtcactactgaaaacttctttgctgtcctcttgggcaatagaagtgctaccactggagggagtaagaaggtgatagacagcaaacctaatgaccacatcttcatctattactcagatcatgggggtcctggagttcttggtatgccgaacctgccatatctgtatgctggtgacttcatcaaggtcttgaaaaagaagcatgcttccaatagctactcaaaaatggttatatatgttgaagcatgtgaaagtggcagtatctttgaggggttaatgcctgaagatctaaatatttatgtcacaacagcctcaaatccagttgaaaatagttggggaacttactgccctgggatggaaccatcaccccctcctgagtacattacctgtttaggtgatttgtacagtgtttcttggatggaagacagtgaaacccacaatctaaagaaggaaaccatcaaggatcagtatgaagtggtgaaaacaagaacctcaaactcaaataagtacaaagagggttctcatgttatggagtatggtgataagaccttcaaggatgagaagctttccttttatcaaggttttgatcctgctaatgccaacattgcaaacatgctgctttggccaggcccaaagggtgcagtcaatcaaagagatgctgatcttctcttcatgtggaagaggtacgagcagttaaatggggggaccgaagagaagctgagggctctcatagagattaaagaaactgttcagcacaggaagcatcttgacagcagtatcgatttcgttgggaggctcgtcttcggatttgagaaagggccttcgatgcttgaggctgttagaacctctggtcaaccattagtcgatgactgggactgtttgaagaggatggtgcggattttcgagtcccagtgtggttcacttactcagtacggcatgaagtacatgagagcgtttgcaaacatctgcaacagtggtatatctgagatgaaaatgagggagtcgagcatcagcgcttgcagcagctacaactcggcgaggtggagcccgatggctcggggacacagtgcttgatggtaaagatcaaatagcaaagccccccgaggtctgctgccccatgtccctgtgagcgagctcgtatcatctggggactgtggacccatcgacggttgtacatatcatgcacttgtgctcgtgcctatgtaaagtagtaataccaactcaactctgatcttcatccaagtaccgaaatgattaaaagatcagatgtgaatgctgttgcgatgggtgatcgcaagtaggccataatcagtggaccgaaaatgatgacccaaatcaaggtagtgctcctctgatcgatagcccaaatctattgctaacaaaa

SEQ ID NO: 102337 - DNA, 1930 bp, Zea Mays
gtgtttccagccttccaggcgcctctgctgcctgcgcctgcgcgcgtcgtgaaggcgtgaacggcagctcggctcggcgcaggccccccgcccgcgccggcatcgcgtcgcggccgccgcgcgagccccatgctgcgttgctgccgcacgacacgtcacttcggctgcggcgtggttgtgtggactcctctcgctcctggccctcgccggcgctgcgtcggctgcggatggggcggagggtgagtgggagccgctgatacggatgccgacggcgaaggggagtgacgctgcttctgctccggctgctgaggatgatgaagtggggacgaggtgggccgtgctcgtcgccggatccttcggttatgggaactaccggcaccaggccgatgtgtgccatgcgtaccagatactgcagaagggaggagtgaagaaggagaacattgtggtgttcatgtatgatgatattgcccacaacattctgaaccctaggcctggagttatcattaaccatcctaaaggagcaaatgtttatgatggtgttccaaaggattacacaggtgatcaggtcactactgaaaacttctttgctgtcctcttgggcaatagaagtgctaccactggagggagtaagaaggtgatagacagcaaacctaatgaccacatcttcatctattactcagatcatgggggtcctggagttcttggtatgccgaacctgccatatctgtatgctggtgacttcatcaaggtcttgaaaaagaagcatgcttccaatagctactcaaaaatggttatatatgttgaagcatgtgaaagtggcagtatctttgaggggttaatgcctgaagatctaaatatttatgtcacaacagcctcaaatccagttgaaaatagttggggaacttactgccctgggatggaaccatcaccccctcctgagtacattacctgtttaggtgatttgtacagtgtttcttggatggaagacagtgaaacccacaatctaaagaaggaaaccatcaaggatcagtatgaagtggtgaaaacaagaacctcaaactcaaataagtacaaagagggttctcatgttatggagtatggtgataagaccttcaaggatgagaagctttccttttatcaaggttttgatcctgctaatgccaacattgcaaacatgctgctttggccaggcccaaagggtgcagtcaatcaaagagatgctgatcttctcttcatgtggaagaggtacgagcagttaaatggggggaccgaagagaagctgagggctctcatagagattaaagaaactgttcagcacaggaagcatcttgacagcagtatcgatttcgttgggaggctcgtcttcggatttgagaaagggccttcgatgcttgaggctgttagaacctctggtcaaccattagtcgatgactgggactgtttgaagaggatggtgcggattttcgagtcccagtgtggttcacttactcagtacggcatgaagtacatgagagcgtttgcaaacatctgcaacagtggtatatctgagatgaaaatgagggagtcgagcatcagcgcttgcagcagctacaactcggcgaggtggagcccgatggctcggggacacagtgcttgatggtaaagatcaaatagcaaagccccccgaggtctgctgccccatgtccctgtgagcgagctcgtatcatctggggactgtggacccatcgacggttgtacatatcatgcacttgtgctcgtgcctatgtaaagtagtaataccaactcaactctgatcttcatccaagtaccgaaatgattaaaagatcagatgtgaatgctgttgcgatgggtgatcgcaagtaggccataatcagtggaccgaaaatgatgacccaaatcaaggtagtgctcctctgatcgatagcccaaa

SEQ ID NO: 102338 - DNA, 1292 bp, Zea Mays
acgtactccctcccgtgcacacccatccactcgccgcccaagcccttagcttcctgcccaacgctgctgcgcttcacgctccatcgcccctcatccaataactccaacaaagaccgggttgcttcgatctgcacacaacagaagaagcacgcccatccgcggctcttgcttcttttggcaccatgatgtcgtcggcgccggaggagacgctgttcaacctggaccagcagcagcctccgccggcggagcaggagcagatctgctacgtgcactgcagctactgcgacaccatcctcgcggtgggcgtgccgtgcagcagcttgttccagacagtcaccgtgcggtgcggccactgctccaacctgctctacgtcaacctccgcgccctcctgctgccggcggcggcggccaataaccagctaccacccttcggccagcctctcctctcccccacctccccgcacggtctacttgacgctgaggcgatgtcgttccaggcgccgagcctgccgggtgctgaaccgccgagcgcttgcgtgagcggcgtcacgagcatcaacaacacgtgcggtggcaacaccaccacgtcgtcggccatgtcgtccatggcgccgccaccggccaaacatgcactgcaggaggcgcagcagctgcccaggaccgcagcgtcggtgaacagaacttcagagaagcggcagagagttccttccgcgtacaaccgtttcatcaaagatgaaatccagcgcatcaaggccagcaatccggacatcactcacagggaagctttcagcgcggctgccaagaattgggcccatttcccccacatccatttcggcctcatgcccgatcagggcttgaagaagaaccctatgcaaaatcaggagggagctgagtgcatgcttttcatggacggtctctacgccagcatgggcttttctccattctgacttcacgtcttcacccccactagggttctgtcttctgaagcccctctgtgtatcccggttgccggaggaatctcgaaatgtctaccgcaaatctctctctctctctctctctctctctctctctctctctctctctctgtgtgtgtgtgtgtgtgtgtcctctcgttctccttacttaggttccagtttcttatttcgttaatttattattgttatgtaacctagagagcaaggttgttatgtgtatgatgctgctgccccttgtcttatatggacataatttcgagctggatgttggctgggcatcgatctagtcatatatctatggcttcaacttcttccaaa

SEQ ID NO: 102339 - DNA, 1266 bp, Zea Mays
gtactccctcccgtgcacacccatccactcgccgcccaagcccttagcttcctgcccaacgctgctgcgcttcacgctccatcgcccctcatccaataactccaacaaagaccgggttgcttcgatctgcacacaacagaagaagcacgcccatccgcggctcttgcttcttttggcaccatgatgtcgtcggcgccggaggagacgctgttcaacctggaccagcagcagcctccgccggcggagcaggagcagatctgctacgtgcactgcagctactgcgacaccatcctcgcggtgggcgtgccgtgcagcagcttgttccagacagtcaccgtgcggtgcggccactgctccaacctgctctacgtcaacctccgcgccctcctgctgccggcggcggcggccaataaccagctaccacccttcggccagcctctcctctcccccacctccccgcacggtctacttgcgccgagcctgccgggtgctgaaccgccgagcgcttgcgtgagcggcgtcacgagcatcaacaacacgtgcggtggcaacaccaccacgtcgtcggccatgtcgtccatggcgccgccaccggccaaacatgcactgcaggaggcgcagcagctgcccaggaccgcagcgtcggtgaacagaacttcagagaagcggcagagagttccttccgcgtacaaccgtttcatcaaagatgaaatccagcgcatcaaggccagcaatccggacatcactcacagggaagctttcagcgcggctgccaagaattgggcccatttcccccacatccatttcggcctcatgcccgatcagggcttgaagaagaaccctatgcaaaatcaggagggagctgagtgcatgcttttcatggacggtctctacgccagcatgggcttttctccattctgacttcacgtcttcacccccactagggttctgtcttctgaagcccctctgtgtatcccggttgccggaggaatctcgaaatgtctaccgcaaatctctctctctctctctctctctctctctctctctctctctctctctgtgtgtgtgtgtgtgtgtgtcctctcgttctccttacttaggttccagtttcttatttcgttaatttattattgttatgtaacctagagagcaaggttgttatgtgtatgatgctgctgccccttgtcttatatggacataatttcgagctggatgttggctgggcatcgatctagtcatatatctatggcttcaacttcttccaaa

SEQ ID NO: 102340 - DNA, 429 bp, Zea Mays
caaaatggatcatatatggtttttttgttctgcatatcttctccaatgccgtctcatacacgggcagtatttttaatacttcatacattcttccgttccaagttgtaagccgttttggcttttctaggttgtatgcatgcaccaagatatacattatgtctagaattttccattttttttagataatagaacaaaataaggtcccagcctctacgctatgtctaaaattttcattatgtctacgctatgtctagagttttccattttttttagataatggaacaaaataggttccagcctctacgctatgtctagaattttccatttttttacattatgtctagaattttccatgtatctataaaagctagaatgacttacaatttgtaacagagggagtatatctcaagagtcaagatactcattcaa

SEQ ID NO: 102341 - DNA, 2239 bp, Zea Mays
cccaccttggcgcgcgataagattcgccagccggccccagtcccgccgcaccgtctcttcccccgctaaacctccccaagtccaccgtcgccaggcccaaaaaccaccgaggatttttcacacgcgaagcggcacagccatgcgcctcctctgctgcttggccgctctcgtcgtcctcgctctccaacaccaatgccacggcctactcctcccgctcaccaacacgatgctctcctcgctccgcggaaccaatggcaccaccacgcctgtgcatcacctcctccgcgcgtcgtccctccgctcggccgcgcgccacggccgccaccgcgcgcgcaggagcccgccatcgcctcccagtcccggacgccaccgccagctctcgctcccactctccccaggcagcgactacacgctgtccctgtccgtggggccggcgtccgccgcggcgccggtgtccctcttcctcgacaccggcagcgacctcgtctggttcccctgcgcccctttcacctgcatgctctgcgagggcaagcccacgccgggacgcttggggccgctgcctccgccgccggactcccgccgcatcccctgcgcgtcgccgctctgctccgcggcgcacgcctcggcgccgccgtcggatctctgcgccgtggcgcggtgcccgctggaggacatcgagacgggctcgtgcggcgcgtcccacgcgtgcccgccgctgtactacgcgtacggggacgggagcctcgtggcgcacctgaggcgcggccgcgtcgcgctgggcgctggcgcgcgcgcgtccgtggccgtggccgtcgacaacttcaccttcgcgtgcgcgcatacggccctgggcgagcctgtcggggtggcagggttcggcagggggccgctctcgctgccgggccagctctccccgcagctctccggcaggttctcgtactgcctcgtgtcccactccttccgcgccgaccggctcatccggcctagccccctcatcctgggccgcagcccagacgacgccgccgccgccgccgagacggacggcttcgtgtacacgccgctgctccacaacccgaagcacccgtacttctactcggtggcgctggaggctgtctcggtaggcgcagcaaggatccaggcccggccggagctagcgcgcgtggaccgcgccgggaacggcgggatggtggtggactcgggaacgactttcaccatgctgcccaacgagatgtacgcgcgggtggccgaggcgttcgcccgcgcgatggccgcggcagggttcgcgcgcgccgagcgcgcggaggaacagacggggctcacgccctgctaccgctacgccgcgtcggaccgaggcgtgccgccgctggcgctgcacttccggggcaatgccacggtggcgctgccccggaggaactacttcatggggttcaagagcgaggacgcaggggccgggacgaggaaggacgacgtggggtgcctcatgctgatgaacggcggagacgcgtccggtgaggagggtgatggacccgccggcacgctgggcaactttcagcagcagggtttcgaggtggtgtacgacgtcgacgccggccgcgtcgggttcgcccgccgccgctgcacggacctgtgggactcgctgtctcgccggtgatgcttccactctcctctccacctgtatcatgcattacctagaccgctagctagacgtagctttgcatgtcctgcttgtacttgtagtcttgtacagagccactgccacccgtgtgttgttcagtgccacgtagttgtatgtttagtgatacatctcgcttttttttttttgtagtttttgtatcttcttctgtctcaatttgtctgtcaagcgctatgggaacctgcgttcttgccaagatcgaaaaggactccacgggttgctagcaacagggagacagcagtaaacagacgcgaagctttggcacacttgttggtgaatcattgtcgtgctgatgctgttgcaggtccgtttccgaattccgagatctgcccgtccaacgccggagagcaatcgcattcgagccttgatgcaggtcttaaaaaaaacaccaccttgtcgattgctgctgcacctgcacaggaaagcaagtggattttctgaagctggagccataggtttcttttggataaaaaaaatagcacgacgagtacagtagcaggcagtttttgcaggcgagcaaggctgcaaaaccaatgataaaaaaaa

SEQ ID NO: 102342 - DNA, 2141 bp, Zea Mays
aaaaaccaccgaggatttttcacacgcgaagcggcacagccatgcgcctcctctgctgcttggccgctctcgtcgtcctcgctctccaacaccaatgccacggcctactcctcccgctcaccaacacgatgctctcctcgctccgcggaaccaatggcaccaccacgcctgtgcatcacctcctccgcgcgtcgtccctccgctcggccgcgcgccacggccgccaccgcgcgcgcaggagcccgccatcgcctcccagtcccggacgccaccgccagctctcgctcccactctccccaggcagcgactacacgctgtccctgtccgtggggccggcgtccgccgcggcgccggtgtccctcttcctcgacaccggcagcgacctcgtctggttcccctgcgcccctttcacctgcatgctctgcgagggcaagcccacgccgggacgcttggggccgctgcctccgccgccggactcccgccgcatcccctgcgcgtcgccgctctgctccgcggcgcacgcctcggcgccgccgtcggatctctgcgccgtggcgcggtgcccgctggaggacatcgagacgggctcgtgcggcgcgtcccacgcgtgcccgccgctgtactacgcgtacggggacgggagcctcgtggcgcacctgaggcgcggccgcgtcgcgctgggcgctggcgcgcgcgcgtccgtggccgtggccgtcgacaacttcaccttcgcgtgcgcgcatacggccctgggcgagcctgtcggggtggcagggttcggcagggggccgctctcgctgccgggccagctctccccgcagctctccggcaggttctcgtactgcctcgtgtcccactccttccgcgccgaccggctcatccggcctagccccctcatcctgggccgcagcccagacgacgccgccgccgccgccgagacggacggcttcgtgtacacgccgctgctccacaacccgaagcacccgtacttctactcggtggcgctggaggctgtctcggtaggcgcagcaaggatccaggcccggccggagctagcgcgcgtggaccgcgccgggaacggcgggatggtggtggactcgggaacgactttcaccatgctgcccaacgagatgtacgcgcgggtggccgaggcgttcgcccgcgcgatggccgcggcagggttcgcgcgcgccgagcgcgcggaggaacagacggggctcacgccctgctaccgctacgccgcgtcggaccgaggcgtgccgccgctggcgctgcacttccggggcaatgccacggtggcgctgccccggaggaactacttcatggggttcaagagcgaggacgcaggggccgggacgaggaaggacgacgtggggtgcctcatgctgatgaacggcggagacgcgtccggtgaggagggtgatggacccgccggcacgctgggcaactttcagcagcagggtttcgaggtggtgtacgacgtcgacgccggccgcgtcgggttcgcccgccgccgctgcacggacctgtgggactcgctgtctcgccggtgatgcttccactctcctctccacctgtatcatgcattacctagaccgctagctagacgtagctttgcatgtcctgcttgtacttgtagtcttgtacagagccactgccacccgtgtgttgttcagtgccacgtagttgtatgtttagtgatacatctcgcttttttttttttgtagtttttgtatcttcttctgtctcaatttgtctgtcaagcgctatgggaacctgcgttcttgccaagatcgaaaaggactccacgggttgctagcaacagggagacagcagtaaacagacgcgaagctttggcacacttgttggtgaatcattgtcgtgctgatgctgttgcaggtccgtttccgaattccgagatctgcccgtccaacgccggagagcaatcgcattcgagccttgatgcaggtcttaaaaaaaacaccaccttgtcgattgctgctgcacctgcacaggaaagcaagtggattttctgaagctggagccataggtttcttttggataaaaaaaatagcacgacgagtacagtagcaggcagtttttgcaggcgagcaaggctgcaaaaccaatgataaaaaaaa

SEQ ID NO: 102343 - DNA, 161 bp, Zea Mays
ttatattttttttattttataaaacatagtatatatatatatttagattttatatttgctatttacaacaaatgcgctagagttctactggttagcctcagcttggaagagggaggtcccgggttcaaaaccccactacgcacagtttttttacagttttt

SEQ ID NO: 102344 - DNA, 1189 bp, Zea Mays
aagaatacgaggccgtcttctcctctgtcagaattcggaaacacaccaaagctagcctccgctccctccccttccagcttcgtctagacagagtccagcagacacggccaacagttaaaaccggttgctattagtacgcgcccgccaccacgctcgcacagacacacacacacacacacacacacacactcaacagcaacagctaagcctctcccacaagacagcaacatggctgaggaggaggccaagaaggtggaggtggaggtcaccaaggagcccgaggcggcggcgaaggaggacgtagccgatgacaaggccgtcatccccgcgaccgacccgccgccgccgccgccgccggccgacgactccaaggccctggccatcgtcgagaaagttgcagatgaacctgctcccgagaagcctgcccctgcgaagcaagggggctccaatgacagggatctcgctcttgcaagggtggaaacagagaagaggaactctttgatcaaagcttgggaagagaatgagaagacaaaagctgagaacaaggctgctaagaaagtatccgctattctttcatgggaaaacacaaagaaagcaaacatagaagctgaactgaagaagattgaggaacaactggaaaagaagaaggctgaatatgcagagaagatgaagaacaaggttgcaatgatacacaaggaagccgaagagaagcgagcgatggtggaggcaaaacgcggtgaggaggtcctgaaggccgaggagatggctgccaagtaccgggccaccggccacgctcctaagaagctcatcggttgcttcggagcctaagaaaccttccaagtcagaccgagcagaaagtgaaaaacgtcagccagtgattgcttggtcctctcgctctatcaagtgtgtagtgtgtcttcgaaagtttgtaaagcctactgctgctgctgtatatactgatatcgcttccaaggcaggcgtttggtggtgtacatgttgaatgcttgacgagaaacattcttgtgtgtagttaagaggtcacgctgttgttgttgttgttgacattcaagcagacattttgttttcttctggtgttattgtttttgtgcccgtctctttgttccttgccgcggatttaagtttgtagtattcatgtgcatctgtcatgttcttttcatgtacagctttt

SEQ ID NO: 102345 - DNA, 1116 bp, Zea Mays
aagaatacgaggccgtcttctcctctgtcagaattcggaaacacaccaaagctagcctccgctccctccccttccagcttcgtctagacagagtccagcagacacggccaacagttaaaaccggttgctattagtacgcgcccgccaccacgctcgcacagacacacacacacacacacacacacacactcaacagcaacagctaagcctctcccacaagacagcaacatggctgaggaggaggccaagaaggtggaggtggaggtcaccaaggagcccgaggcggcggcgaaggaggacgtagccgatgacaaggccgtcatccccgcgaccgacccgccgccgccgccgccgccggccgacgactccaaggccctggccatcgtcgagaaagttgcagatgaacctgctcccgagaagcctgcccctgcgaagcaagggggctccaatgacagggatctcgctcttgcaagggtggaaacagagaagaggaactctttgatcaaagcttgggaagagaatgagaagacaaaagctgagaacaaggctgctaagaaagtatccgctattctttcatgggaaaacacaaagaaagcaaacatagaagctgaactgaagaagattgaggaacaactggaaaagaagaaggctgaatatgcagagaagatgaagaacaaggttgcaatgatacacaaggaagccgaagagaagcgagcgatggtggaggcaaaacgcggtgaggaggtcctgaaggccgaggagatggctgccaagtaccgggccaccggccacgctcctaagaagctcatcggttgcttcggagcctaagaaaccttccaagtcagaccgagcagaaagtgaaaaacgtcagccagtgattgcttggtcctctcgctctatcaagtgtgtagtgtgtcttcgaaagtttgtaaagcctactgctgctgctgtatatactgatatcgcttccaaggcaggcgtttggtggtgtacatgttgaatgcttgacgagaaacattcttgtgtgtagttaagaggtcacgctgttgttgttgttgttgacattcaagcagacattttgttttcttctggtttttaaatcataataagaaaaaa

SEQ ID NO: 102346 - DNA, 122 bp, Zea Mays
tcaacagcaacagctaagcctctcccacaagacagcaacatggctgaggaggaggccaagaaggtggaggtggaggtcacgctgttgttgttgttgttgacattcaagcagacattttgttt

SEQ ID NO: 102347 - DNA, 1086 bp, Zea Mays
cagccatcgatcaccggccccaacgctagctttagcttcgcctatttacatacccgagcggagaagagaagagaagagaagcgatcgggattgtgggcgagtgcgtgcgttcgtgcagccacagacaggcgtccgggcaccatgtctttcaccggcacgcaggacaagtgcacggcgtgcgacaagaccgtccacttcatcgacctcctcacggccgacggcgccatctaccataagacatgcttcaagtgcagccactgcaaaggggtcctctcgatgtgcagctactcctccatggacggtgtgctgtactgcaagacccacttcgagcagctcttcaaggagaccgggagcttctccaagaacttcacgccaggtggcaagtcatcagacaagggtgaactgacaagggccccaagcaagctgtcgtctgcattttctggtacccaggataagtgcgcagcatgccagaaaacagtgtacccgctggagaagttaactctggaaggcgagtcctaccacaagagctgcttcaagtgctcgcacggcggctgcatcctgaccacctcctcttatgccgcgctcaacggcgtcttgtactgcaagatccacttcgcgcagctgttcatggagaaggggagctacaaccacatgaacaagaagagcccgtcccaggaggttctgccggacgtggctgacgaggagcaaccgccggaaccagcgccaccgcaagatgagaaagaagaggacaactaggatcggagcgaccaacaaccacccatgcatatatatcacgcagactgaagtctacacgtttgccatatttctttacgacgacgacgcttctttattccctcctcccttttttttcctcttaatctctctgtgaacccggtttatcatcacgctgcaatcaagtgtgccagatgccttcgttacgtctgaggctcacgacaatggaaaatctgacatggacctgtcttagcctcgcggaaaaaaattgtaactttgtaagcagagccacttctttgaatatatgatcctaacaacgctgcccttaatacttatgcagttgttctatacttc

SEQ ID NO: 102348 - DNA, 1079 bp, Zea Mays
ttgcaatggcacacgcaacacgccgcctccatgtgggtggggaggcaaacgcgttcgtccatctctgaaactcaaacgccttgtattggagcatactacaggagtacttctgtacaaatataaatacccctggcgagttgggttgggtctatctcgcaatcgaggcgttttttttctgcttcgtaagttcgtggtcgatccagcgagcgagcgagcagaccggcggctaaccgcggagggagagatggcgcaggggacgctggaggtgcttctcgtcggagccaggggcctcgagaacaccgattacctgagcaacatggacccctacgcgcttctgcaatgtcgctcccacgagcagaagagcagcgtcgcatctggcaaaggctgtgaacctgagtggaacgagaccttcgtgttcaccgtctccgatggcgcagcagagctgttcatcaagctcctggacagtgacggtggcactgatgacgattttgttggtgaggcaacgtaagtagttagttaggctatcttcatcagcttatctttccacgtcactatatttaaactctattctgcatggtctatatcaacttttgattttggatgtgttttgggacccaaattttaacgttctcaatgtttattatttcaatcgagtgtggcctgggcttctgcaggattcctctggaagcagtttacacggaaggaaacatccctccgactgtttacaatgttgtgaaagacgaagaataccgcggagaaatcaaagttggcctcacgttcactccagaggaccagggcttctgaggaataacttggcgtgtggccgctggaactggaggcagcaggcagtcgtcttatgattcagaagcaaacgacggatcgattcccttgatgtactgcagtccagtgagcgtgcatctacaacttgtagaagaagcctgcaacatgatcacgggatcctgtactgcatcactctaaagcctagctaaaaccaccagctcctgtacttgatgccgggcgggcttgtcatgtactgaaacctacaataacggtcgccgaaccccactctttgatgttca

SEQ ID NO: 102349 - DNA, 1080 bp, Zea Mays
ttgcaatggcacacgcaacacgccgcctccatgtgggtggggaggcaaacgcgttcgtccatctctgaaactcaaacgccttgtattggagcatactacaggagtacttctgtacaaatataaatacccctggcgagttgggttgggtctatctcgcaatcgaggcgttttttttctgcttcgtaagttcgtggtcgatccagcgagcgagcgagcagaccggcggctaaccgcggagggagagatggcgcaggggacgctggaggtgcttctcgtcggagccaggggcctcgagaacaccgattacctgagcaacatggacccctacgcgcttctgcaatgtcgctcccacgagcagaagagcagcgtcgcatctggcaaaggctgtgaacctgagtggaacgagaccttcgtgttcaccgtctccgatggcgcagcagagctgttcatcaagctcctggacagtgacggtggcactgatgacgattttgttggtgaggcaacgattcctctggaagcagtttacacggaaggaaacatccctccgactgtttacaatgttgtgaaagacgaagaataccgcggagaaatcaaagttggcctcacgttcactccagaggaccagggcttctgaggaataacttggcgtgtggccgctggaactggaggcagcaggcagtcgtcttatgattcagaagcaaacgacggatcgattcccttgatgtactgcagtccagtgagcgtgcatctacaacttgtagaagaagcctgcaacatgatcacgggatcctgtactgcatcactctaaagcctagctaaaaccaccagctcctgtacttgatgccgggcgggcttgtcatgtactgaaacctacaataacggtcgccgaaccccactctttgatgttcagttaacttgtcgcggtttacaagaggccgtgtgactgctgcaagatatcgcttgtctgctctctatttcgcctgaaccctgaggctttgtttgggtaaggagggattggagtggattgtagtgttttaaagggattgagagaaaaattagttcatattacacttcaataca

SEQ ID NO: 102350 - DNA, 2864 bp, Zea Mays
aattcgcataggccgtgctactgtgctagcaagcaactgatcctagtcatacactgggcagcaggcagcgagcattccactccacgacgcaaccatccggcgccggtctccgttcgtcgtcccagtctccgcgccgtcccgtaacaatcacaacactgcaggtagtagctcagtttcagtggtcgccggcgagccactcgactcgagcgcacggccaaattgttggaccgaaatccggttcctccccaccgaacggctacgcatccgccatgctcgtcgccctcctctgcctcctcgcctgctgcgccggcgccggcgcagcaggcgccgccgcgccgaacgcgcgcccgtgcgcgtcgccctactcgaccagcgcctacccgttctgcgacgcgtcgctctccatcccggcccgcgcgcgcgcgctcgtctcgctgctcaccctggacgagaagatcgcgcagctgtccaacacggcgggcggcgtcccgcgcctgggcatcccgccctaccagtggtggtccgagtcgctccacggcctcgccgacaacgggcccggggtcaacttctcctcgggccccgtccgcgccgccaccgacttcccgcaggtcatcctgtccaccgccgccttcaaccgctcgctgtggcgcgcggtcgccgaggccgtcgccacggaggccctcggcatgcacaacgccggccaggccggcctcacgtattgggcgcctaacatcaacatcttccgagacccaaggtggggccgcggccaggagacgtccggggaggaccccgctgtcgctgccgcgtactccctcgagtatgtcaagggtttccagggagaggaaggagaggaaggcagaatcaggctctctgcgtgctgcaagcactatacagcgtatgacatggagaaatgggaaggcttctcgcggtacaccttcaatgccaaggtaaatgcacaagatttggaagacacgtaccagccgcctttcaagacctgcatccaggaggctcgtgctagctgcttgatgtgtgcatataaccaggtcaatggtgtgcctatgtgtgctcacaaagatcttctgcagaagaccagggatgaatggggcttccaggggtacattacatctgattgtgatgctgtggcaattattcatgaaaaccagacatacactaaatcaggcgaagattcaatagcaattgttcttaaggcaggaatggatatcaactgtggttctttcctagttcggcatactaagtcagcaattgagaagggaaaaattcaagaagaagatatcgaccgtgccctttttaatctattctcggttcagttgcgtcttggaatatttgataagcccagcaacaaccaatggttctctcaactagggcccaacagtgtgtgcacgaaagagcatagagagcttgcagcagaagctgtaaggcagggtgctgtccttctgaagaatgaccataattttttgcctctgaagagaagcgaagttagacatgttgccatcattggaccatctgcaaatgacgcgtatgcgatgggcggagactatacaggtgttccctgcaatcctacgaccttccttaagggcattcaagcatatgctacacaaacaagctttgcccctggatgcaaggatgcttcctgtaactcaacagatttgtttggcgaagctgttgaagcagctaaaagagccgatattgttgtcgtaattgctggcttgaacctgacagaagagcgtgaggacttcgacagagtgagccttctccttccaggcaagcagatgggcctcatacatgccattgctagtgtagcgaagaagccccttgtgttggttctcctgggtggtggtcctgttgatgtttcgtttgcaaagcaagatccacgaatcgcaagcattctttggctcggatatcctggcgaggttggtggacaagtccttccagaaattcttttcggagagtacaacccaggaggaaagctgcctataacttggtatcctgaatcctttactgctattcccatgactgatatgaacatgagagctgatccttcacgaggctaccctgggagaacatatcgattttacactggagatgtagtgtatggctttggatatggtttaagttactccaaatattcatatagcatctcctcggctccgaagaagatcaccgtgtcgcgttcatccgatttgggcattatcagcagaaagcctgcatacacaaggagggatggactaggctctgtgaaaactgaagatatcgcttcatgtgaagctctggttttctctgttcacgtcgctgtttcgaatcatggtagcatggatgggagtcatgctgttcttctgttcgcgagatcgaaatcaagcgtcccgggctttcctataaaacagctggttggctttgagagtgtccacacggcggctggcagtgcatccaatgtggagattactgttgacccctgcaagcaaatgagcgcagccaatcctgaaggcaaaagggtacttctgttgggtgcccatgttctaacggtgggtgatgaagagttcgaattatccattgaactctgacagggatgtgccaagtcctaccattttatggagttcaaagttgggaataatctgatgaaacttgtaaagaaacacgttgtaaagattcattattgagctggatgcgtgtacggtaaacatgctgtgacctgtgaagattcatcatttgagttgggtgctagtacaattgcagccattttgcggtataaactgccgaaaaatacatccagcacactactctgaatcgtatagatagatttaattaaaaggttggaacaaacagcacactactgccagaaataaaaa

SEQ ID NO: 102351 - DNA, 878 bp, Zea Mays
agtacaggctaccagcccacatgcttttctttccctcccgttccccgtctgtctccctctcgtcgcatcgcgcaccgcttccccagttcccccagctccccccaccttccgttgccttctcgaactcaacccccgcccccgtcgcggatcgtcatggccgccggcctcgccttccccgtcgcctcctttccactcgcctgcgtctcctcacctccccaccccgggcaccgcatctgctgcgcgatcccgtcgtcgtcctcgcgccgcaccgtcaaatcctcgccgctccgcgcgactaccgtcctctccagggaacgacggggcacgggccgtggcgcgtccgtagtgtgcgctgtccaaggccaggacacgaccatccaaggtacccgggtgacgtgtgtatgtggattcgtccgtacgtagaattgtataaattgttcatagatttggtcctttggagggggctgcagatttggttctaggaatcaacaagtaggataggatcgtatcgtaggaggatgctgtgtcgtttaggttgcgtggtctcctctacgtagccgactgttcgctggaattagctagggaggcaaaggttacgacaccaagggcgcagctgcgcagcattctggatgtgaggttcttgttttttctagcaactccacacaagcagctgttgacgtgtgtgcttctagctctttgtgaatatctaccttaagtgacttcagaccatctaaaagagactagctaaatgactcgccaatccaaattttatctactcaaaagcaaaacaactcttcaacatctaacccgtcaagctatctgacttttcaaattggcttcctcactagtccaacgtgtgtgcttctagctctttattg

SEQ ID NO: 102352 - DNA, 992 bp, Zea Mays
agtacaggctaccagcccacatgcttttctttccctcccgttccccgtctgtctccctctcgtcgcatcgcgcaccgcttccccagttcccccagctccccccaccttccgttgccttctcgaactcaacccccgcccccgtcgcggatcgtcatggccgccggcctcgccttccccgtcgcctcctttccactcgcctgcgtctcctcacctccccaccccgggcaccgcatctgctgcgcgatcccgtcgtcgtcctcgcgccgcaccgtcaaatcctcgccgctccgcgcgactaccgtcctctccagggaacgacggggcacgggccgtggcgcgtccgtagtgtgcgctgtccaaggccaggacacgaccatccaagtcccagatgtgacaaagtcaacatggcaatcactcgtgatcgagagcgagcttcctgtcctggttgagttctcggcggcatggtgcgggccatgcaagatgatagaaccagttgttggcaagctctcgaaggactacgaggggaagctgaaatgctacaagctaaacacagatgagagcccggacatcgcaagccagtacggggtccggagcatccccaccacgatgatcttcaaggatggcgagaagaaggattcggttatcggggccgtgccagagagcacactggtcacatgcatcgagaaatttgtcgagaggtagaatgcgtagtggatctcttgagcggtttcctttaaatcaaaaggtcatttcgagaccacttgggccatacagaacaattctataactgcctctagatgatgggattatatgtatattatatactctgttattattgtttgaagaaagcggcatgaaatttgtgtccaccccagccttggttttgttttcttattctttagaggctctgaactgtgtaacgtggacgaccgagaacctcgttctattcttctcataatatataagaatgcacacatgaaacatcattcctt

SEQ ID NO: 102353 - DNA, 864 bp, Zea Mays
aaaaacctgggcatacctaaatcattatattgctctgcataaaacttaatgttgcactggtacaaattgtccctttaaactgtattgttagtagtagtatttcgtagaaaacaaaatctaatcgagaaaattatctctcccattcaatcgcacctgaaactcttttatcattgttgtaatatcttgagattccttcctttgttgttgatactatacctatggatcaatcaattgctactctaatttttgaactgctcaattgcagtcccagatgtgacaaagtcaacatggcaatcactcgtgatcgagagcgagcttcctgtcctggttgagttctcggcggcatggtgcgggccatgcaagatgatagaaccagttgttggcaagctctcgaaggactacgaggggaagctgaaatgctacaagctaaacacagatgagagcccggacatcgcaagccagtacggggtccggagcatccccaccacgatgatcttcaaggatggcgagaagaaggattcggttatcggggccgtgccagagagcacactggtcacatgcatcgagaaatttgtcgagaggtagaatgcgtagtggatctcttgagcggtttcctttaaatcaaaaggtcatttcgagaccacttgggccatacagaacaattctataactgcctctagatgatgggattatatgtatattatatactctgttattattgtttgaagaaagcggcatgaaatttgtgtccaccccagccttggttttgttttcttattctttagaggctctgaactgtgtaacgtggacgaccgagaacctcgttctattcttctcataatatataagaatgcacacatgaaa

SEQ ID NO: 102354 - DNA, 426 bp, Zea Mays
atgggatttgagggactcataaatgactctatgccacccaaggatcctgaagagggaggtttgttacttcttgaatcatcatacactgaagaaacacaatataaaaagattatctgggaggaaatgaacaaagagtaccttgaggaacaagcagccaaggaagctttggcagctgaattggcagctacagggattgatccagaagcgggaaagaaacccaagttattggatgagaagcagaccactatctacaaaatggttgtagacaagaattataacttgaagatgaaagcatcaaggtttattttcagtgaaatcagccagaagttcccaatcatgcccttcactgctagggcattagaagagaagcgtgcacgcttaggcttggtggaatgcatgaaccgtgagctattgcagctgtaccct

SEQ ID NO: 102355 - DNA, 1603 bp, Zea Mays
tttttttcattctcctccctcgtttagccgagccgaatccccccactcattatataccccttgacggagcctccctccgaaatccgcctctcttgtcatcatcggcctgccgcctgcccgcctgctcctcctgccccattaacgccgccggctgccgtgccgccgcgtcctgctccccgccaccgcgttcctcgcccgaagcaccgccgcggcctcgcgccaccgcccagaaaccatctccgggcctcgttcgaccgaagcgccttgtgtcatatctccgcgacctagccgccgcccgccgccgacgctgccgtcgtcgtcatcctcgctggcggtgctgtacctgcgtgcagcgcagatccatccgagctcggattgatttcttcctttgctgtactgtcataaccgaactaaaacagtttctgagaggaagcatcgcgattgccatggaagctgggagaatggatcagccatttatggctgctatcaatagccagcctttcgtggaggatattgagccagtgaagaaagccagtggggacatgcctgcgacaacaggaagcggatgcttcgaatgcaacatctgccttgattttgcatcagaaccagtggttactttctgtggtcatctctactgctggccttgtatctacgagtggctgcgccctggggtggagtcagctgccagcgacaacagcagttcggcaaggcggcaatgtcctgtatgcaaggcaacactctcaacggacacccttgtgccactatacggccgtggaggcaactcaaagaagtcacttgatggcatggccatcccgcgccgccccatggtacaccgggagactgttgaggagcaacagaatgcacagagcaatgtcaatgaccagcactaccaccagagcatggaagacaactctcagcgccagccattgctgcaagcgcaccaccatcccattcccactgggtttgacttcatctaccctccagcaccagtagggcgtggcttgatccactcaactgccggaggggtgctcggagggatggcagagattgtgcttcccttggcgctccgtggccagatgccagcgagcttgtactacacgaatccataccatgctgcgacgcagaacgtgaaccccaggctgaggcggcatcagatggaaatcgagaggtccctgcaccagatctggttcttcctctgtgtgtttgtggtgctgtgcctgctcttgttctgagacaagactattctatacacctctttgtagatattgaaagtgggagggggatactaatggatgatgcgtatagtaaacagggtaatggtctgtgtcgacaggcatgtgcttaagcatgctgatgtagagttgtaatatgatgagacacggaggtgaaatgcatatttcattcttctctatcactgtcggcctgttaggttgcctacctgacatcttcatgttaggtttagcatcatctgttgtgtattggttggtgtcactgccaagggccttttgatttgtatataaatagaaaatgatggtttgtctaccaatttctgctctgtatcctctttaatccctgttccaagattgacacagcaattttgtcc

SEQ ID NO: 102356 - DNA, 558 bp, Zea Mays
atggaggtcgcggagcagaagtgcgaggagcgctgggatcggatgatgaagatcctggagcgtttgggcgacaaggtggaggcgatggagattgggcagcaacgtcttcaacgtcaagcagaggcgatggaggcgggacaacagcgtcttcatcaccaagttgaggctgctgcaacatctgcgaggaaggcggaagaggaacgaaccattttagcgcgccaagtggatgaaaccaggaaggcagtgtcgcgccttcgtttggagtggatggcgaaggagatggaaggtatggaaactgagtctgagagggaagggcgtaaccaaaggcggtctgagggtggtgatcgggagtatggtgagcaggagtttcgtgtggatgatcagccggaaggaagtagagagcgtcggacatgtgttggcacaattacctcgaacactggatcgggcgatacttctggcgcagattcagtaggaagtggtggagatgaacaaggccaaatttcagaggaactatttaggtggcaaagtaatggtgaacacagtgaaaggagatcctag

SEQ ID NO: 102357 - DNA, 675 bp, Zea Mays
ctggccctactgatttggctaaggagaggcagctgagagagtttcggaggctaaacggtttatgttttggttgtggagagaagtacgagccaggacatcaagctaaatgccttaaaagaggtggagcacaattacataatctgactgtagaggatatggggttggtgttgtcagatgagacgttgcaacagctggatcaggaagataaggaagtggaggaagcatataagctgtctataaatgctatcagtggaactgaccgtgagaattgtatgagagttcgggcactgatccagaatcaagtgttggtgatgttggtagactctggcagctcctcaagttttgtcagtcagaggatggtagatcagttggctttatcaactgaagttgttttcaccggtaagagttaaggtggcaaatggtgagttcatgttgagttcaaaaagggtggcagcgctggagtggtgggcagaagggcacacttatgccagtaacatgagagtactggatttagaagcctatgatgctatattggggtatgattggctaaagagccatagtcctatggagtgtgattgggacaacaaggtgctgacattctgggataaaggggtcagagtgcagctgaagggggatggtgtaggaagtacagaggtattgcaagtgtcagcggtt

SEQ ID NO: 102358 - DNA, 1348 bp, Zea Mays
ccacttccgtgagtcccaggcggccaccaattgcggcaccgtcgcgagccgatctgtctctcacttccatctcgcctccgcggcgcgaaaccctaggttcgcgacgccatgccggcctctgggtcgccccgtgatggtcgaggcgccgaggaggatgaggcggcgcgcagcggcagcaagtcgctagacgctgaatgcaacgaccgctcaaaggggagccggaaccgggaccaccgcggcaagtccaagcggcgagaggaggaggagagcgagtcctccggagaggactccagcgagcgacggaaacggcgtagaaaggagaaagagcgccggcacaggcgccggcgccgcagcaacagtgagagctcgggctcgtcgtcagagtcggagtccgagtcgtcgtactcggggtccagcgtggagtctgagagcgagtcggagttggattcggaggaggagaggcggaggcggcggcgcaagaggaggaaggaaagggaggatgaggagagaaggcggaggaagaaggagaaggagaggagaaagaggaaggagaaggagaaggagagggagaggaggaagaagaggaaggaggggaagaagaatttggggaagaagggcgctgtgaccaactcgtgggggaaatatggcatcatccgtgagctcgatatgtggagcaagcggccagagttcactgcatggctatcagaagtcaagcaggttaatttggaggcattgtcaaattgggaagagaagcaaatgttcaaggaattcatggaggatcacaatacagccacgtttccatcaaaaaaatattataatttagatgcttaccatcacaaagcaatggagaaagagaaaaagaagggtttaaaaatgattgtgacagaacgcactgtatttaatgatgaggaacagcgacgactagaattgttgaaggagcgtgagcgccgaaaggaggaagaagtggaagctttaaaacgctctatgcaagctggactggctcaagacatgaaggagcaggcccgtctacgcgaagaaatgaactaccaatacaggttgggcaattttcaggctgcagctgcaatccagaaaagattggatcctgatgctcccttgcagtagccggttcgtggatagcccaattccctgcagttattccttggctttcctggacactgtaggacgacgagcataccttagcatattgaacggctgctagctactacgatgttttttttatatagtgtgccagatgctacttttgtattgtatcggcagaattttgaattccagttattcagactcagttgtttgtttcccatgttcgaactaccatcgtcattcatca

SEQ ID NO: 102359 - DNA, 1472 bp, Zea Mays
ccacttccgtgagtcccaggcggccaccaattgcggcaccgtcgcgagccgatctgtctctcacttccatctcgcctccgcggcgcgaaaccctaggttcgcgacgccatgccggcctctgggtcgccccgtgatggtcgaggcgccgaggaggatgaggcggcgcgcagcggcagcaagtcgctagacgctgaatgcaacgaccgctcaaaggggagccggaaccgggaccaccgcggcaagtccaagcggcgagaggaggaggagagcgagtcctccggagaggactccagcgagcgacggaaacggcgtagaaaggagaaagagcgccggcacaggcgccggcgccgcagcaacagtgagagctcgggctcgtcgtcagagtcggagtccgagtcgtcgtactcggggtccagcgtggagtctgagagcgagtcggagttggattcggaggaggagaggcggaggcggcggcgcaagaggaggaaggaaagggaggatgaggagagaaggcggaggaagaaggagaaggagaggagaaagaggaaggagaaggagaaggagagggagaggaggaagaagaggaaggaggggaagaagaatttggggaagaagggcgctgtgaccaactcgtgggggaaatatggcatcatccgtgagctcgatatgtggagcaagcggccagagttcactgcatggctatcagaagtcaagcaggtatattctttctgttattctgtatgtgtcgaattgttgatacacagtaagggagacagaggtctatgtaggtccactgtccacaacattgttaatctattattttttgttaatgtgaacccaggttaatttggaggcattgtcaaattgggaagagaagcaaatgttcaaggaattcatggaggatcacaatacagccacgtttccatcaaaaaaatattataatttagatgcttaccatcacaaagcaatggagaaagagaaaaagaagggtttaaaaatgattgtgacagaacgcactgtatttaatgatgaggaacagcgacgactagaattgttgaaggagcgtgagcgccgaaaggaggaagaagtggaagctttaaaacgctctatgcaagctggactggctcaagacatgaaggagcaggcccgtctacgcgaagaaatgaactaccaatacaggttgggcaattttcaggctgcagctgcaatccagaaaagattggatcctgatgctcccttgcagtagccggttcgtggatagcccaattccctgcagttattccttggctttcctggacactgtaggacgacgagcataccttagcatattgaacggctgctagctactacgatgttttttttatatagtgtgccagatgctacttttgtattgtatcggcagaattttgaattccagttattcagactcagttgtttgtttcccatgttcgaactaccatcgtcattcatca

SEQ ID NO: 102360 - DNA, 678 bp, Zea Mays
gtatttccattcctacctgaaataaatataggggcaagtagtgctttggaccttatgtggaatatacttgagtccatggtaccacaagtttattttctttttcatattaggtccttgtgttttttttgtaatactactaatacatgttctagtaaatataatgtgcattttttatctttctgtagattttcttagataatatccccatcatagtattttttgtgtatacattacggaaggaataagccatggcatggtaattgaaagcagaatatttttctttatgtcatctaatatgtgtctgtcttctgtgttctgctcattattaggctcaagacatgaaggagcaggcccgtctacgcgaagaaatgaactaccaatacaggttgggcaattttcaggctgcagctgcaatccagaaaagattggatcctgatgctcccttgcagtagccggttcgtggatagcccaattccctgcagttattccttggctttcctggacactgtaggacgacgagcataccttagcatattgaacggctgctagctactacgatgttttttttatatagtgtgccagatgctacttttgtattgtatcggcagaattttgaattccagttattcagactcagttgtttgtttcccatgttcgaactaccatcgtcattcatca

SEQ ID NO: 102361 - DNA, 2103 bp, Zea Mays
gaatcgaaccacggcggtgcgagcgctaaaaggccacatttggaggagccctcgggccagatctgcatatgcaggtcgcaacgcggtagtagtagctaccaccagccgccgcagttgttggcgagcaaggaggccggaggtggcggcggggtggagattatggagtcggtgaagatgaggacggcaatggcgacgaagcgggagtacaggaggatggaggcgggcgaggagggggaggagctgggggaggcggagtgggcgcgccgcgccgaggcgcagaggcagcggcgcaggcgaggccagcgctacgccttcagctgcgcgctcttcgcgtccctgaacgccatcctcctcggttacgatgttggcgtaatgagtggcgcgatcatctacatgcagaaagacctccacataaccgagtttcagcaagaaatcctagtaggctgtctgagcgtggtctcactcttgggaagcctatcaggggggcgaacatctgacgcaattggcagaaaatggacaatgggcctcggtgcaattgtgttccagataggcgcgaccatcatgacgtttgctccatcattcactgtgcttatgatagggaggctccttgctggggttggcattggctttggtgccatggtatctggagtgtacattgctgagatctcccccgcaggtgcccgagggacgctcacatcccttcctgagatctgcatcaattttgggatccttcttggctacgtttccaattatgccttctcaggcctttctgagcacatcaattggaggattatgcttggtgtcggtatcctcccatcagtcttcattggctttgcgcttttcgtgatcccggagtcccctaggtggttgatgatggagaagagagtttcagaagcaagggcagtgctgctgcagattagcgagtctgaagctgaagctgaagaacggctggctgagatcgaggaagccgcaggtctgatgaaatcaatgaaatctgaggacaaagaagtgtggagggaacttttgaacccgtctcccgccgtccgtcggatgctgtacgctggttgcggtattcagttgttccaacagatcacaggaattgatgctactgtctattacagcccaacaattttcaaagatgctggcatcaagtctgatcaggagcttctcgctgcaactgttgctgtgggtttcactaagacagtgttcatcttggttgcaattttcctaattgatagagttggacggaagccacttctttatgtgagcaccattggcatgaccatctgcttatttctcttgggggttgcacttacactgcaaaaccatgcggtggggcttatgtctccacgtgttggtatcgacctagcaattttcgcagtttgtggcaacgtggcattcttttcaattggcatgggaccaatatgttgggtcttgtcctcagaggtatttcctttaagattacgagctcaagggtcagcgcttggtcaagtaggtggtagagtgagcagtggtttggtttccatgtcattcctttctatggcccgtgctatatcagtggcaggaatgttcttcgtctttgctgcaatatccactatctctgtactgtttgtgtacttttgtgtgccagaaacaaaagggaaaacactggagcagatcgaaatgatgtttgaaagtggggacgaatggggaggaggtgaaattgagcttgaggatacacagcatttaataccgagtatcaagaagtctgtgcctcttggttgatatttgtagcatcaataaaattcttattagctccatgtttcaatgacgagccaaccaaaccagctggattctgaactttggtttcgagtgatctggccacactgagccacgaccgatctgataaaagataagcttgatagacataggtgcaacgtagaagattaattgtgatgttagttcaaaatgtcaatgattttactgggaggcggtctgtaatgtatgatcttacatctcttgtaccttcttacatctctcgtacctcccagcggaagaatatactcgcagaaaagttttctactgtgcatttttttataacactaaaatgagtattagatgcta

SEQ ID NO: 102362 - DNA, 2125 bp, Zea Mays
acggaacaccattgttggaaataaaataaaagaacaccacatcgacatcctctcacctccctcgcactccattggatttgggggagctcggggggcgcgggccactgatgatccccggaacgagcaccgatccgtggcgaggaaactccaccgggtagccggcccgggagcgcggggcacggcgatggcgggcgccggggcagcggccaatggcggcaggaacaagtacgcggttctcgatcggagcgaggagcgacagacggacgctaggacggagcggcggaggaggccgttggcgcccgagagcgagagggggagaagggagcggttcgtgtacgcctgcgcggtcttcgcctccctcaacgccgtcctgctcggctacgatgttggcgtaatgagtggcgcgatcatctacatgcagaaagacctccacataaccgagtttcagcaagaaatcctagtaggctgtctgagcgtggtctcactcttgggaagcctatcaggggggcgaacatctgacgcaattggcagaaaatggacaatgggcctcggtgcaattgtgttccagataggcgcgaccatcatgacgtttgctccatcattcactgtgcttatgatagggaggctccttgctggggttggcattggctttggtgccatggtatctggagtgtacattgctgagatctcccccgcaggtgcccgagggacgctcacatcccttcctgagatctgcatcaattttgggatccttcttggctacgtttccaattatgccttctcaggcctttctgagcacatcaattggaggattatgcttggtgtcggtatcctcccatcagtcttcattggctttgcgcttttcgtgatcccggagtcccctaggtggttgatgatggagaagagagtttcagaagcaagggcagtgctgctgcagattagcgagtctgaagctgaagctgaagaacggctggctgagatcgaggaagccgcaggtctgatgaaatcaatgaaatctgaggacaaagaagtgtggagggaacttttgaacccgtctcccgccgtccgtcggatgctgtacgctggttgcggtattcagttgttccaacagatcacaggaattgatgctactgtctattacagcccaacaattttcaaagatgctggcatcaagtctgatcaggagcttctcgctgcaactgttgctgtgggtttcactaagacagtgttcatcttggttgcaattttcctaattgatagagttggacggaagccacttctttatgtgagcaccattggcatgaccatctgcttatttctcttgggggttgcacttacactgcaaaaccatgcggtggggcttatgtctccacgtgttggtatcgacctagcaattttcgcagtttgtggcaacgtggcattcttttcaattggcatgggaccaatatgttgggtcttgtcctcagaggtatttcctttaagattacgagctcaagggtcagcgcttggtcaagtaggtggtagagtgagcagtggtttggtttccatgtcattcctttctatggcccgtgctatatcagtggcaggaatgttcttcgtctttgctgcaatatccactatctctgtactgtttgtgtacttttgtgtgccagaaacaaaagggaaaacactggagcagatcgaaatgatgtttgaaagtggggacgaatggggaggaggtgaaattgagcttgaggatacacagcatttaataccgagtatcaagaagtctgtgcctcttggttgatatttgtagcatcaataaaattcttattagctccatgtttcaatgacgagccaaccaaaccagctggattctgaactttggtttcgagtgatctggccacactgagccacgaccgatctgataaaagataagcttgatagacataggtgcaacgtagaagattaattgtgatgttagttcaaaatgtcaatgattttactgggaggcggtctgtaatgtatgatcttacatctcttgtaccttcttacatctctcgtacctcccagcggaagaatatactcgcagaaaagttttctactgtgcatttttttataacactaaaatgagtattagatgcta

SEQ ID NO: 102363 - DNA, 2212 bp, Zea Mays
ccacatcacgcgcacacgctagctctccccgcgccgccggtcgccccgcgagcggagtgaatcgtttcaccggccgggggagttcgttcgttcgttagtccgtccgtgctccagtcccttgctgcaagttggtctaaggattggtttttttacgaggctcttgtctcttctatatatctgctgtcagcgccgcgggcgggcggggcacactgcactgctgctgctggggatttcggttgcgcgcatcttcgcatcggttgcttcggtcggagttggggcatggacgcgtcaagcgagagcggtggcgcggggggcggtcgtgggggcaggaggtggaagggcaaaggtgtgacgcccatacagccgcggcggacgcagctggcgccggtcatggaggacgcgtcggcggcactgctgcgcccgctcaagaagatcggacgggcgccggaccgcttccagcgctcggcgtcgtcgctgtcgacgacgtcttcgtcggccccgccttcccctcgctccagcgctgctggcgccacctcgccagcgtcgctatcgccgccctcggcgcggcatatgttcccgttcgcgtacgagccctccgcgccgttgggcggggccccgcggctggagctcccgccgccgtggcagcactcccccagcgtgtcacagccggcgtcgccacagcagcagcagcagcagcaggctcaagcgcctgtgcagcgtcagcagcagatgatatcgttcggcgcgccgccccagtaccaggcgcagttcttgttgccggagggcgcgcagcagcagcagcatctgctgcggtactggagcgaggcgctgaacctgagcccgcgcggcgggcaggctgcgggcgtgctgccttcgctgtaccagcacctgctgcggccgccgccgcctcagaagctgtaccgcggcgttcggcagcggcactgggggaagtgggtcgccgagatcaggctgccgcggaaccgcacgcggctctggctcggcacgttcgactccgccgaggacgctgccatggcgtacgatcgcgaggccttcaagctccgcggcgagaacgcgcggctcaacttcccggaccggttctttgggaagggctacgccggggggagcggccgcaccagcgccacacccgcagccgcgccgacagctgccgccgcgtcgggctccacgtcgtcatcgtcgcctccacagactcctgatgacccaagcacgcaacaaacgccgccggacgcagaaagatcgttggacaagcagccacagcctccggttgctacatcgtcgcagctagaaggcagctctggtgagccgaccttggcagattcgggtcaaatgattcactcgccagagccacccgctggcagcgactggggtccggcggacgaggcatggctcaatgcgtggggcccaggaagctccttctgggactacgacattgatagcactcgcggcctctttctccatcacgggcgcttcgccggtgatgaggccggcataaacacagctacaactgcggcggcaaccgggacggacatgccatgcgatcacgtcccggtaacacctgcttcttcttcttcccctcttcactcacagtctcctcattcgccttccttcatggatcactaaacagcacatccaagtaccttgcgctgatctcattctttttcttacacttcgattacttgcagaaatagcactagctagttggatagagatgcacgcaggtttcagattttttagacaacttgcggcatcacacagattcatttcgcaccagcgcattcaagaaccatccgtccatgcatgcctttgtcattccaccatcaaacacttcttctcaaattcaccaggacaccatgcatgctctagtctgcaatattttggtcagctactagggcaaccagtcaatttctcaaccatgatctgcaacggcatcctcattagacgattcatgatgttttagatttttcctatattcttcaatgtgttctaatttagctatgggttcctacttttcctagtgtctggaaaattatgttgaccagtttatgtacgttgtactatataattagatctgatttattttcctgtactgctaccttccatacacagtttagggttttcatccatgcattgttttgaaatgtcaggcatcaacttgtgcgtgcattcaaagttttgtgattactttagaattctt

SEQ ID NO: 102364 - DNA, 885 bp, Zea Mays
cccggccctgttgtcatcctcctgcggctcccgcatctctagctctcacgtgcgcaccgcctgctcgacgcaattccccactcgcccaccaaccttcccgtccccgatggcgatcatggcggccaccgccactgccgtggcttccccctccagctccacctcgccaggtcccctccaacccagcccccgcttcctccctcccgtctccacgcccgctcgctgccatctcctccccaagccgcggcggtggtgcgcgcgcctccacatcgagcgtcgggtggccgtcggcagcgacgtgtcttcgtcccatgacgtggctgccgaggaggccgctgctgcgcccaaggtcgggaagcgcgtgcgcgtcacggtgcccgtccgcgtccaccacgttgccaaggcgcccggcctggacctgcgcggcatggagggcgtcgtcaagcagtacatcggcgtttggaaggggaagcgcatcacggccaatctcccattcaaggtagagttcgagctcaagctggacggccaggacaagccggtccggttcatcacccacctccgcgagcaagagttcgagatcctcggggaggaatagagctctggactagagaataacgcgctctcatcggcggctgtggcatctgtatactattgtgtctgcgctaaagaagaacgtggtcgagggtgcggggagaataggagattgcaactttgctagtaagttcctgtttgtttgcttatttgcggtgcgcttctcccctctccaccctttaacattgaaattttcatatgtgaggattgaggaattgttcgattgttgatacttatgatccaaagtaattaaactgaggaatctgttcagcatcacgttctgttgatgttcaagac

SEQ ID NO: 102365 - DNA, 1249 bp, Zea Mays
ctgctcgacgcaattccccactcgcccaccaaccttcccgtccccgatggcgatcatggcggccaccgccactgccgtggcttccccctccagctccacctcgccaggtcccctccaacccagcccccgcttcctccctcccgtctccacgcccgctcgctgccatctcctccccaagccgcggcggtggtgcgcgcgcctccacatcgagcgtcgggtggccgtcggcagcgacgtgtcttcgtcccatgacgtggctgccgaggaggccgctgctgcgcccaaggtcgggaagcgcgtgcgcgtcacggtgcccgtccgcgtccaccacgttgccaaggcgcccggcctggacctgcgcggcatggagggcgtcgtcaagcagtacatcggcgtttggaaggggaagcgcatcacggccaatctcccattcaaggtagagttcgagctcaagctggacggccaggacaagccggtccggttcatcacccacctccgcgagcaagagttcgagatcctcggggaggaatagagctctggactagagaataacgcgctctcatcggcggctgtggcatctgtatactattgtgtctgcgctaaagaagaacgtggtcgagggtgcggggagaataggagattgcaactttgctaacagctcgctggtgggcacaggtgtttggatttcaaagcgtcaacaaatgggaataagttctgatcagcttctgctgctttcagagccatcattcctgcacaattggcaaatggtacttggacagttgaaaatcccaaaaacatcactaatcctttcattgagggctggcggaattctatggctgatatggaggacatatatagttctctatcattgagggatgtcaaaatgaagatggtgatatgagtgaaacaaattattcaacaatttagagctacaacggcctaagaacattctctgttagagctactggagcatcaacatgtaggaacagtgaccatcaggactttctacaactggaagatactatttctccaggagtttctttcaagttgaaaacttacgcaaaatatgctaattggaagccttataagttactcataacttttcaagtcttttcccttacattgatttaagcatttgcctctagcagtatatattggagcactctcttatgaacacttgcttgcttacatgtaaaattccgctgactagtcatatctggagaatcgaaaaagttagttacctgttgcg

SEQ ID NO: 102366 - DNA, 2060 bp, Zea Mays
agccggtcacctcgcctctctcctcccccaccgcgtccgaatcccatggggctctgtttcagcaagaagcagcaagcgaagcgccgagacgagcagccgtccagtgacgccaagaagagcagccgccggaaatccggcagcgacaccgtgcttgtggccgatgccaaaaaggcgcctcaggcaaaggcgccggcgccgcccaagaaggctgtagccaggccggaggagctggcagccgacaagaggacggtgttcgtcgtcaaggccgcggcggcggcggcggccgccgaggtcgcagccgccgcgaagggcgggtccgaggaggcggaggcgaagagggaggcgccggaggaggagccgatgcccgtcgccgtcgccgtggcccgggcgccggtgcggacgtcgagctgcaccaaggaggaggtggacgcgatcctgatccagtgcggccgcctcagccggacctcgtcggcgtcggggaatccgccatcgggcgagcacggcggcgggcgccgaaggtacgccggatccaagcggagctatgacttcgaccacggcacgaggggcggtggcggcgacgtcgacgagtgcgattggggcagggagggggccgcggtgaccaggccctccccgcgccggaggacgccggagcggaagcgctcatcgagccacgatggccgcactggcggcgggagcgggagcgggagccggagccggaggattagccggtcgccggggcggcgcgcggacgtcgtccccgccgcggggagctccgaaaccggcgagcgaggggcgaggcagcatcctggcaagatggtgtcggtcccggccagggagaaggggcgcgcgcagtcgcccgtgaaggctgcttcgtctggcaagagatacccatcgccaaggtcgaactcgcccgcgagggcagcggcctcggggaacgagaatgccggggtgcagtcgacgcacgggccgtcgctgagccgcaactcctcgaagaaggccgagcagtcgccattccgtcgcaaccccatggcggaactcgacgagaatgcgctcggcaacaaccaccatcacagcaacggcaagcctgtaaagaaatccgctgatggtgccattgcattgccacagaagactgcggagcgggcaaaggatcagatccccagctgccgaacaactgcgaaggagaaggaaattgtggaggaggccgtggcttcggacaccagagcagcgcccgcaaggatgaaggcgacccactcggtgagtattgtggctgagaacgtcaccaatccgaggccggggagccggtcgtcgaggcggtcctcgcgtgacttcgagcacaacgacaacacctacgcatccctgctactggaggacatccaaaactaccaccagcagagcgccagcgctgccaccgccactgccactccagcgccgaccttggcgctcccagcgtgcgtgtcgaatgccttctcgatccttgaagctgtcgccaacctcaactcctcgtcgcccgacaacaagagcttcgagctggagaggtcggtcaacgacaaggaatccttcgtcaacgggaggtacggcggcaatggtgcgagcaccaccctcgtggtggagtcggaggtcggcgtgaaggacgacctcatggagccgagcatgcacaagtacgtctccgtgcgtgacatccgtggggagaggagggagaccgagccgcaggagtctgcggggagcaacagctttgccagtgacgcctggacgtgctcgtgggagcccaagtccgttgactccacagaccggaccaggagtaggacggcctcgaagtcgtacaacggtgacaaggtggagcagtcgtggcagagcaagcagaagctgtcgtcatcccaggagcccagccaccgtggttctactagcaatgtttatgcttagcgtccagctaaatatcgagagtgtattgcttccaatcgtacttcgttttagttttgtttacggtgcaacagtttttgttgtcaactctttcttggaattccatcatcaaaactaatcaaaattgcgttcatagttcagtt

SEQ ID NO: 102367 - DNA, 606 bp, Zea Mays
gcctgcctttgccttccactggttcgcttctccctctcctgtgcttggctgctgcttgcccgttgagcacagcagggggggggggcgtgcctgcacagccggcgcgatgagggactgggcgccgtcgatcatcgccacggcgctgttcgcgctcctgtgcccgggcggcgtgctgcagatgcccgaccggcaccgccccgtcgacctcatgaacatgaagaccagcttcccgtccatgctcgtccacgtcgtcatctactccctgctgctcatgctcttcctcgtcatcctgcagcctcacctctacatctgaggtgagcgtgttccccaccccttcacacaagcttctagcatgtttcagtttcttctttcttgggatgcagttttgggcccttttaatagctttgtaaccttatgaaccagaggattatatacgtaatatgcgatccgtagcttccgttgggcaataaagaactgaagtttccctgcttcctgaaaacttttagtctgcttcagagtttcaggcttcagtgtgtcagtttatctggaccgaagtttcgtcccaattttcgtctcctgcagcatgacgtgcatggtttaaaaaaa

SEQ ID NO: 102368 - DNA, 379 bp, Zea Mays
aatacgaaggagagtgtgtattttccattgcggggaataaatggccaggtcttacaacaacacgaactctctacaggacatcgctggagagggtatattatactaagataagaaacatgacaaccaaataataatttttcaaaaagaagatgaccaaataagctgctgtcctagtggtatggggtgtggtaggagtatgctctcccttgtgtggtcagagtctgctctcacggtctcacctattccgggtattatttcgggaattgttttgtattttgaggacctttcccctgttctcatgtgcagttcttctgcgtattccagaaaaaaagatgatcaaataattagcagtacacaatgtttatgttagagtggacgc

SEQ ID NO: 102369 - DNA, 390 bp, Zea Mays
atcactcatttgggagatgggtctgatactctgttttggaaggatcgttgcctgaatggcaaatgtattaaggaggtggcacctgctgtcttgggtatggtgcccaagcgcattgcttctaggcgcctggtcaaagacaccttgcctgatctcaattggttggctgatctgaggggggctatttctgttacagcccttgctaatctcatggacctttgtgacttgctagaggggatggttcttcagccggatgttcccgatgtgcatgcctggaggttcagtgaatcgggtgaatactcggctagttcagcttacaggactttgcttcttggctctgttagctttgagcctgctgaacgcatttggaaatcctgggctccaggaaagtgt

SEQ ID NO: 102370 - DNA, 1827 bp, Zea Mays
tgtagatacgtcagaaattaaagctattgtatgcgctcaaacagttcgtgaaaacaccagagaaaatcaaaccacggctcccaaatcaaaaaaaaggaaaaagaggaaaggaaacaaaagaaaaagcaattctattttactttcggttctatttcgcgtatcacgagcacaagacacgcaagtcacacgaacacagcggattcgagtgtcatagtcatagtccttagccatgtcgcatgttttttttgtaaaaaaaaatagagagagacaaaatcatggcttgtagccttaagcccttggctccagtggagcgtttggagctataccgctcgttcctttcgggcacgtatatgttaacaaagacaatggtcacgccttctcgctgaaaaaaaaaatatgataaaatgcaaaaactaaatttggaaacaatatctctaagaccccaactgctatggccaaagccaaaaaaaaccagtgggtgaagagcataaagttggcaggtaattaagagctagcatatccttgcgcgcagtgggggagatatagcacaattagcttagaaatcattgatgacacttgcaaaaatgctccttcgcccctgaaaaaagctgagcccacatcagtctagttctgctccttctctgaactgaagccatacgcgaaggcaagactagagggcgattttgggcacgaatagagagatggcaagctccactgcgattgcgactgcgcgcgcccatgatgctgctgtttatggcgcggcagggacccactccaatctgaggagttttcttgacagtgttacgccggttgtaaaggcgcacacggtccctatggcatcctaccttccattgtcaaacggatattatgaaaagattgcagatggggttagatgtttctaccttggagatctttggaattcattctatgagtggagcgcctgtggcgttggtacttcagtgtgcatcgctccgggtgagacagtggttcaatacttcgtgccatatctttcagcaattcagttgtacaccaacacgagaaatgctcctgtttcacaaagcatgatttatgatggaagattcgatcggaataaccattatagtgtcgggatgtacactcatggatatcaagcaccattacgcatgcccactattggagttgaagggaagggggagttgttcttcaagtattttgagcctgactccccttacgagaggatacctttcgcagacaaggtatatgagctttgctatagttgtccttccctatcatctttaagcagtgcagagctctcaccatcaagttggatgtccgttttttggtatccaacaagtcatgtccctatgaagaatagaaaagatctgaatacttgctttttgacctaccatagcctttcaacatgcaaagatattgttgctttagatagcatgcaagccttcaatcatatgtcacttgcgccgttcggccttgcaacatacaagttagatgccaaagtgtgggcaagtccaaactccggtgaccaagagcatatttcctctctcttcgatgcatcacaatcatggctaaaggagcataacatccaccactacgacttcaactactttgcccatagatgctcctccaaatgaataacatgaacatgaccgatcaacaagttcatagtctttggggactcaagtgtgttgtgtgttgtttttaacacatctctgcatgtcgtgaagggttgtagtagtttttccattgtctttttattaatgcttactttctatggttgtattatgtgaacccttggagcgtaatcattgcgatatcatacttgatacatta

SEQ ID NO: 102371 - DNA, 911 bp, Zea Mays
ccacaaatcacgccaatccatggcagcccgcgtgccccgctcccccgcagcgcctggctcccctttccttgcgcgacgcgagatcggcgagattgccctcaacgcgctcgcgtcgcgccgcggatcccccaccctcctcccctctgcacgccgccatcaactcgcaccggccctcgcccgtgatccatcctctcccccgcggcaatgatatggcgtcccccctcaaccgaccattcccgcagcggatccgcaccaacccgttcgcgccggcctctggaagaagaatccaccgaaggcgaaaacgacgacggaggtccggctgactcgtctgggtctttgcaatagcggcaagcgggttggagctccgcttcgggcaggggagaaccacgtggagacctggagtcacgctgcctagactcgccgctgggtggattcgtcgcgatggaggtcggattgtgaacacgccgtccagttaggacgctgtcgtcttcagatccaggggatggggttgctcggcatggcggccaagggcccctcgcccacgcgtcgcctaatgccacagccgcacttggccgtctcctcgctggcggcctccgtggctctgatccactgcttcctcaacacccggagatggttgacgtcgccttcgtcgtctcctcgccagtggcctccaccagccccgcagtccaagacaaagccacgacatgagtcaacccaagtccggtcgcacctacaccgatggccgtacccaacgtgagtcaagccaagtccattcccctcccttgcttcctcaacttgttgtcttgtggtctgctatttgtctcagagaaggtggtgccatcatcatcagttgtgattatgaattatattctaccgataggtattcaatctctctattcggcaacacctta

SEQ ID NO: 102372 - DNA, 1788 bp, Zea Mays
caaatcacgccaatccatggcagcccgcgtgccccgctcccccgcagcgcctggctcccctttccttgcgcgacgcgagatcggcgagattgccctcaacgcgctcgcgtcgcgccgcggatcccccaccctcctcccctctgcacgccgccatcaactcgcaccggccctcgcccgtgatccatcctctcccccgcggcaatgatatggcgtcccccctcaaccgaccattcccgcagcggatccgcaccaacccgttcgcgccggcctctggaagaagaatccaccgaaggcgaaaacgacgacggaggtccggctgactcgtctgggtctttgcaatagcggcaagcgggttggagctccgcttcgggcaggggagaaccacgtggagacctggagtcacgctgcctagactcgccgctgggtggattcgtcgcgatggaggtcggattgtgaacacgccgtccagttaggacgctgtcgtcttcagatccaggggatggggttgctcggcatggcggccaagggcccctcgcccacgcgtcgcctaatgccacagccgcacttggccgtctcctcgctggcggcctccgtggctctgatccactgcttcctcaacacccggagatggttgacgtcgccttcgtcgtctcctcgccagtggcctccaccagccccgcagtccaagacaaagccacgacatgagtcaacccaagtccggtcgcacctacaccgatggccgtacccaacaagttgagctttaagaggaacgtggtgtcattgtcatctgagctcaagggtgtgaggagcaagcttgcttcctaggagcagctgtttgtaagggaatctcaaactagaaagcttgcggagacaaaaacaaggagcatggaagaggaagtaatcaagctgcagaaatgcttacaggacaaggatgggcaactgtgttcatccacaagtagcacggaacagtaccatcatgagttggatgatcttagaacacatctgtcatttactcaagctacaggagaagcaggtgttgcatcagctaagttagctcggatgtagtgcatgtcattgctgaaagagctgaatgagaaggacaactcactcaaagaccatagacttcgagtgaacaatctaggtgagcagcttgatcttctccagaaggatgtacaagcaagggaggtcacacaaatgcaacttaaagatatagttataaggatcgagaccaacatcatggatgaagttgccaaagcttttgaaattgcgatgttgagaggggaaatcagaatattgtctactcactggacgaacaaaaccaagaaccttgaatcacagttaaaaaagcaccagagaactgatcaggagctgaagaagagggttctgaagcttgaattttgtctctggtcctgtcatccactggtatggtgcataaaaaagtaggaaccacaatgagattgtaatgctgcacatggcacatcaaggtgcgcaagatatgtaccgtagaaattatcgtaaagtgcacacagctgtatgtatagatgtttagaagtggtcgaagttaggcttgctcaaccggggcaatgatttacttagcctgctgaaatgtactataggtagcattcaagtttgtgaccatcatgcaagtacatgtgggtttgttgaaattgagtggtcatcggagaagtagcaaaatgttccctatcgagagctcgtgtactatatttgttttatgaacttaatttttattacaacataacatgtggtcatacatatgttattgctaca

SEQ ID NO: 102373 - DNA, 2289 bp, Zea Mays
aaatcacgccaatccatggcagcccgcgtgccccgctcccccgcagcgcctggctcccctttccttgcgcgacgcgagatcggcgagattgccctcaacgcgctcgcgtcgcgccgcggatcccccaccctcctcccctctgcacgccgccatcaactcgcaccggccctcgcccgtgatccatcctctcccccgcggcaatgatatggcgtcccccctcaaccgaccattcccgcagcggatccgcaccaacccgttcgcgccggcctctggaagaagaatccaccgaaggcgaaaacgacgacggaggtccggctgactcgtctgggtctttgcaatagcggcaagcgggttggagctccgcttcgggcaggggagaaccacgtggagacctggagtcacgctgcctagactcgccgctgggtggattcgtcgcgatggaggtcggattgtgaacacgccgtccagttaggacgctgtcgtcttcagatccaggggatggggttgctcggcatggcggccaagggcccctcgcccacgcgtcgcctaatgccacagccgcacttggccgtctcctcgctggcggcctccgtggctctgatccactgcttcctcaacacccggagatggttgacgtcgccttcgtcgtctcctcgccagtggcctccaccagccccgcagtccaagacaaagccacgacatgagtcaacccaagtccggtcgcacctacaccgatggccgtacccaacaagttgagctttaagaggaacgtggtgtcattgtcatctgagctcaagggtgtgaggagcaagcttgcttcctaggagcagctgtttgtaagggaatctcaaactagaaagcttgcggagacaaaaacaaggagcatggaagaggaagtaatcaagctgcagaaatgcttacaggacaaggatgggcaactgtgttcatccacaagtagcacggaacagtaccatcatgagttggatgatcttagaacacatctgtcatttactcaagctacaggagaagcaggtgttgcatcagctaagttagctcggatgtagtgcatgtcattgctgaaagagctgaatgagaaggacaactcactcaaagaccatagacttcgagtgaacaatctaggtgagcagcttgatcttctccagaaggatgtacaagcaagggaggtcacacaaatgcaacttaaagatatagttataaggatcgagaccaacatcatggatgaagttgccaaagcttttgaaattgcgatgttgagaggggaaatcagaatattgtctactcactggacgaacaaaaccaagaaccttgaatcacagttaaaaaagcaccagagaactgatcaggagctgaagaagagggttctgaagcttgaattttgtctctggtcctgtcatccactggtgcgttcgccaccgcacctaccgctgttactagctcccttgctcttctcttgctgcgactgggatatagcatcgtggatcttgaacctaggccagaatttaggcaggtctagaaccaccatgatgcctggaacatactcctattttatccatgtatgagccttatgggaactctgcaattactatggatcctcttatacattatgttcgacatggagacaaggtagtatattgagttggaccaataatccttcatatttatttatgtgaattatgttgtactggtgtcctgtccttttgtttgtgctttataatttgtaattcttagctattgatatggtatgatggatgggaggtggctgaaatcgttcagataagtgccaatttgttgttttcttttttaatgaatggttttctatttcagctgatgaaccttttatagttcttttattatatgctgccactgattgctaatagggtgcatgtcttctatttctaggtatggtgcataaaaaagtaggaaccacaatgagattgtaatgctgcacatggcacatcaaggtgcgcaagatatgtaccgtagaaattatcgtaaagtgcacacagctgtatgtatagatgtttagaagtggtcgaagttaggcttgctcaaccggggcaatgatttacttagcctgctgaaatgtactataggtagcattcaagtttgtgaccatcatgcaagtacatgtgggtttgttgaaattgagtggtcatcggagaagtagcaaaatgttccctatcgagagctcgtgtactatatttgttttatgaacttaatttttattacaacataacatgtggtcatacatatgttattgctacaata

SEQ ID NO: 102374 - DNA, 1636 bp, Zea Mays
gaccaagcagaaaatgtttaccaaatggcaaaaattctgacactatcaaagcaacatatcaggtttctgacaagtatgatctacagcatttaattgtctgaaacaaacagcttactgatcttttcagttaatcaagtacaacaactagagttctcaccatgctaaagactgtaaataaaatgtgtgggcataacagatcctgtgcatgcgatagatagatgtcctgggtcaaattaaacctcaatttgagtgcaccagactaggatacgttttccatgtgcatcaaggaatcgctgtgaatccactatcgaacacaaatccacgatacacaccatcatcataaccaggaacaccatccacccagtcccacttgccactgctccccgtctcatcttcctcccacattgcaagcttcccgcgcactcgcttaccagcgaaccacacctttccatcgcctccgaaaaccttgaccttattgttacccccgccagcggtggcaggcatggcgttgccctgtgaagcagcctcgcagaggccagtgaagcagcggtacatattgggcggcatgcgcccagcttcgtcccactccatggtggctagatctagacggagtatgagaacggtggagcacggcgcgtccatggcgaacgaggatctgagcccgccgaccataagaacccggcggccgccggcaccggcaaggagccgaggacgcttgagaacctcgaagacgtctccccacgctgctcgctccacgggcgcccagcccccggtgagcctgtccagcgggcaggagaagagcttccactggctgcgccacggcgtgccgacgtcgcagagggcgaagacggcggcggaggccagtatggggctccgcggcttggacggcagcgagagcgggtgcttcatccacttgccggattcggagggtgtgtaggacagcgctgcgagctcggtgaggacgagcaccatgccgccggggccggcgaggacggtgccgtggcgcgcccaggcggatccgagctggggcaggaggcggtacgttccggcgaaggggttgcagacggcgagcgatttgagcgggtgcgcgggcgaggcggcggaggaagacgtagtggtggactggagggctaggggcgaggtggaggaggaggtctcgacccagaggtagaggagggacgtggatgaggcgacgggggagaaggactggtaggggaggaagtgagcgaaggggaggcggagccaggtgcggcgcgcggggtcgaaggcgtggaggcagccgccgccgtcggggcgcgggtggcggaggaggaggaggcgcagggtgggcagcagcgcgaggagctgcggcgagagggtctcgtggaagaggcgcgagacgaggcggcacacgacggcgtcgcgcagctgcagccggagcagcacgttgtggagcgcgtccggcggcaggtggtggatcggcggcgggagctgcgcttccgcggccgggtcggggcaggagccgccgggcatggcggattggggggtggggttaggtggggaacacacggatgagaccatagcgggggccggcgaggagaagaagaggaggtcggggaaggcgggggacagggtgtcagtttcgcctacgatgctg

SEQ ID NO: 102375 - DNA, 394 bp, Zea Mays
ggtacttggggtgaagaaaagagaagtgtctataggctcgggttctaaatcgagggaaaaggttgtgctggtacaagatgcgactcttgaaggtgtctacgatgctctgaagaagtcttgtaattgtgcatgaggtatgtacgttaatcctggagttaacttgaatgggcagggcatgtgaatgcttttctgatacgtaacctatttgcgatgtgatcctgttccagcttgcaaacacaagttagaaaatgaagtgagacgaggctgaattgttcgttcttgctctaagctgtcagaataataatgcatatatgtcaatgcgatgatggtatagggaatgcagatgcaccagacattactgaaccttggtttgtatggctatctgcattgcacc

SEQ ID NO: 102376 - DNA, 491 bp, Zea Mays
ggtacttggggtgaagaaaagagaagtgtctataggctcgggttctaaatcgagggaaaaggttgtgctggtacaagatgcgactcttgaaggtgtctacgatgctctgaagaagtcttgtaattgtgcatgagcttgcaaacacaagttagaaaatgaagtgagacgaggctgaattgttcgttcttggttgattttgtgacaagtggatcacgggggatcgaagggaattgagggggaaatgaactaattttcccctcaatcctctccgatcctcccgtgatccctggtcatcaaatcagctctaagctgtcagaataataatgcatatatgtcaatgcgatgatggtatagggaatgcagatgcaccagacattactgaaccttggtttgtatggctatctgcattgcacccgtggagacacgtacgtgctgacacgttgctcgagtgcaaactcatccgaaccgaacgtgcctacagcacttgcgta

SEQ ID NO: 102377 - DNA, 2462 bp, Zea Mays
ggcaagtgttcgttttcgtctcccttcagctgcttcagtgcatcaacagaagcgcgtctttcccgttctccagtgtatcaacactgctgataccctcaatcgcgtcatcgcttgagattcgccacctcaatcgcggcgatcctaacgggaaccgagcagggctggtatctgcatgagcagcgtcgtttcccacgaatccaatggagcggcagaagatgatcgccggcctcctcagggcaagcgcgagaagctcgtcgctccgcggcggcgtccagctgcacggcgccataacgaagatggggttcggatcggacaccatgctgggcaacaacctgatcgacatgtacgtcaagtgcggggagctggacctggcgtgcgaggtgttcggcggaatgcgcgacaggaacgtggtctcctggacggcgctcatggtgggcttcctgcggcacggcgacgccacgggctgcctcaggctgctcggcgagatgcggaccgcctccgaggcggcgccgaacgagtacacgctctccgcgagcctcaaggcctgctgcgtcgtcggtgacacggctgcgggcgtcgggatccacgggctctgcgtccgggcagggtaccaggagcacgacgtcgtcgccagctcgctggtgctcgtctactccaagggcgggaggatcggcgacgcgcggcgtgtgtttgacggcgccgggctcgggagtggcatcgccacctggaacgccatggtctccgggtacgcgcacgccggccacggcagggacgcgctgctcgtgttccgggagatgcggcggcatgagggtcagcatcagcctgacgagttcacctttgccagcctgctcaaagcctgcagcggtcttggcgcgacacgcgagggcgcgcaggttcacgcggccatgacggcaagcgggttctcgacggcctccaacgctatcctcgccggcgcgctggtcgacatgtacgtcaaatgccggcgcttgccggtggcgatgcaagtgttcgagaggctggagcggaagaacgtcatccagtggacggcggtggtcgtcgggcacgcgcaggaggggcaggtgacggaggcgctggagctgttccggcggttctggcgctccggcgcccgacccgattcccacgttctgtccagcgtcgtcggcgtgctcgcggacttcgcgctagtcgagcagggcaggcaggtgcactgctacggcatcaaggacccgaccgggacggacgtgtccgcgggcaactccatcgtcgacatgtacctcaagtgcgggctgcccgacgaggcggagcggatgttccgggagatgcgggcgccgaacgtcgtctcgtggacgacgatggtcaatggcctcgggaagcacgggcttggccgtgaagccgtcgccttgttcgaggaaatgcgagcgggaggcgtggagcccgacgaggtgacctacctggcgctgctgtcggcgtgcagccacgccggcctagtcgacgagtgccgccggtatttctcctgcatccggcgggaccggacggtgaggccgaaagcggagcactacgcgtgcatggtcgacctcctcggccgcgccggggagctcagggaggcgagggacctcatccggacgatgccgatggagccgaccgtcggcgtatggcagaccctcctgagcgcgtgcagggtgcacaaggacgtcgccgtcggcagggaggcaggcgacgtcctcctggccatggacggcgacaacccggtgaactacgtcacgctgtccaacgtcctcgcggaggcgggggagtggcgcgagtgccacaaggtgagggacgccatgaggcgcagggggctcaagaagcagggcgggtgcagttgggtggaggtcggcaaggaggtgcacttcttctacggcggcggcggtgaagaggagacgcacccgcaggccggcgacatccgccgcgtcctgagggacatggagacgaggatgcgggagcagcttgggtacaacgccgacgacgcgcgcttcgctctgcacgacgtcgacgaggagtcccgagcggagagcctgagggcgcacagcgagaggctcgccgtcggcctgtggctgctgcgcaacggcgtagacggcggcgggcacggggagccgatcagggtgtacaagaacctgcgggtgtgcggggactgccacgagttcttcaaggggctgtcggccgtcgtgaggagggcgctagtagtcagagacgccaacaggttccacaggtttgagcatggctcctgctcgtgcaaggactactggtgatggcgtcatgccatggcgaccctgccagttcgctttgctagcagtagactagccatctctgcccagttgttgttgttgttgtcacttcacagtgtagactagtcatcaagaatttttggtcatgtgtatcgaacagcacaacagataaatcagctccgataagattattgactc

SEQ ID NO: 102378 - DNA, 243 bp, Zea Mays
atgcatcagtttacagcagccacttccttcagtgagttcactgtcttcaggacttcttcccccatccgcttgcatccaaccaatgttgttccaggagaatatatgtccccagttcggaacccatggttcagtgtttcagtaactgcagcttcaattctgttcgcagcattttcttctcctaggccatatctcaatagcatcgctgcactaagaattgtagccaatggattggccttgtcctgc

SEQ ID NO: 102379 - DNA, 681 bp, Zea Mays
actgcaaagcgagacttcccatccattccactccgcagtggcggcggcggcggcggcgaggtctctacgactttcagatctctccgaagagggcggaggggagggagatgtcgtaatgctgccggagggctgctgacgaagatgcggaagctggtgaagggcctcgccaggcccgagcccaggtggctcagggccatggaagacaccagtgacatttcctcgcatgatgggaagattaaggggtgtttgtttgggattataatctgtccagattatatagtccaacaacttgaacaccccctaagaagatcgagtttctgatgatgtgtatgttaggaagctaaacaaaaagaacatccggattcgctatgccatgatgcaatcaatggatttgatccaccaccagcacgagcttttgcttggcggtcctggagttgaaagaacaaggagtcagtgaagatgatgtgatggctgtagcagatgtaattattctcttctataatcctattgttcatttttatcaaacgcccttaaacagaaaactcaattctgggcctcactgagctgtttaagtttgaacgctactggttttattggatgactgttgtataacaaccatccttaatttgctcataatccaattgggtcaacattgaatggcagctttttttgcagtagcaa

SEQ ID NO: 102380 - DNA, 686 bp, Zea Mays
actgcaaagcgagacttcccatccattccactccgcagtggcggcggcggcggcggcgaggtctctacgactttcagatctctccgaagagggcggaggggagggagatgtcgtaatgctgccggagggctgctgacgaagatgcggaagctggtgaagggcctcgccaggcccgagcccaggtggctcagggccatggaagaggcagcaccagtgacatttcctcgcatgatgggaagattaaggggtgtttgtttgggattataatctgtccagattatatagtccaacaacttgaacaccccctaagaagatcgagtttctgatgatgtgtatgttaggaagctaaacaaaaagaacatccggattcgctatgccatgatgcaatcaatggatttgatccaccaccagcacgagcttttgcttggcggtcctggagttgaaagaacaaggagtcagtgaagatgatgtgatggctgtagcagatgtaattattctcttctataatcctattgttcatttttatcaaacgcccttaaacagaaaactcaattctgggcctcactgagctgtttaagtttgaacgctactggttttattggatgactgttgtataacaaccatccttaatttgctcataatccaattgggtcaacattgaatggcagctttttttgcagtagcaa

SEQ ID NO: 102381 - DNA, 705 bp, Zea Mays
gacggctcgagcctgcgtcgagtctgccgctcctcttccaccgccgccgctcctcccgttccatctgcgttcgatctgctcctcctcccccgcctccgctcgctattcctccatcaccgtcattctgctcagtgtttggttgcatatatagatgtcatttcgtttggttcagttgtgctgcatttgtatcgtcgtatgtataaaccgaagatgcctggtgtgtctatcaccagtgacatttcctcgcatgatgggaagattaaggggtgtttgtttgggattataatctgtccagattatatagtccaacaacttgaacaccccctaagaagatcgagtttctgatgatgtgtatgttaggaagctaaacaaaaagaacatccggattcgctatgccatgatgcaatcaatggatttgatccaccaccagcacgagcttttgcttggcggtcctggagttgaaagaacaaggagtcagtgaagatgatgtgatggctgtagcagatgtaattattctcttctataatcctattgttcatttttatcaaacgcccttaaacagaaaactcaattctgggcctcactgagctgtttaagtttgaacgctactggttttattggatgactgttgtataacaaccatccttaatttgctcataatccaattgggtcaacattgaatggcagctttttttgcagtagcaa

SEQ ID NO: 102382 - DNA, 334 bp, Zea Mays
tgcgggtgcaagtgggcccacttcagttggagctcggaacgaatcgagccggggcccacttcgatcgaaacgagatggctccggggaagcgaggcaaggccaaaggggcggcgccgccgccgcccaccgcggcggcgagtaccggagctgtagggttccctggctgcctccgcctgatgccgccgtcgaccgtggccatatctatacacgccaagcccggctccaaggtcgccaccatcacagagattggggacgaggcggtgggcgtgcagatcgacgcgccggcgagggatggcgaagccaacgccgcgcttgtcgactttatcagctcggt

SEQ ID NO: 102383 - DNA, 1245 bp, Zea Mays
acactactgcgtgctactccggctctatatatatcacgatcacgagacacgagtcactcgtccgatccgatcacacgcatcgccggccatggccatgatgagcggcatggacggcggcagcaacgtcgtgaaggtggccgccgtggtggacgcggagaaccctgccgtggggccgccgccgtgcgcggtggactccgacgacctgtcgcagcgcgccaactggctgcgcgcggcggtgcttggcgccaacgacgggctggtgtcgacggcgtcgctgatgctgggcgtgggcgccgtgaaggcggacgctcgcgccatggtgatctccggcttcgcgggcctcctggcgggcgcgtgcagcatggccatcggcgagttcgtgtccgtgtgctcccagcgcgacgtggagctggcgcggctggaccgcggcggcggcgacgacgagaaggcggcgctgcccagccccgtgcaggccgccgctgcgtccgcgctggctttctccgtgggcgcgctgctgcccctgctggccgccggtttcatcgccgactacaggctgcggattggagtggtggcggccgtggccaccgccacgctggccgcgttcggctgcgtcggcgccgtgctggggcgcgcacccgtggcgcggtcgtgcgcgcgcgtcgtcggcggaggctgggtcgccatggccgtcaccttcggcctcatgagactcttcaaggccagcggtatatgaaggatgggagaggcgtggcagggcgggcctcacgcttctggtgtgtgtgactgctgctcggtcggtgctgcatgctgctagctctgcttccatgcatgtgcctcctgtgcgtgcacctcctagctaaaccatgcataattaataacatatatatacttattagtatattagtaattaccatgatagatatatatgatgcacgcacacgcgtgtgctagctagctacaagcagctcgatggctcaatccccttgctagttttgcatgcatcgactatgcggtcatgtgctgctgttgttgaacaccgatcgaagcttgttaccatgcatgcagatcagctaggttttgagccaattaacgtaatgcttaccttgtactggtctagctatgctagctactcgatctgatcaagagtgatccatgtgcaagactaaggcttgcatgtgttgtaagcattatactttaaaaaatatatgtacaactaagtctaatatataatttatgagtttatct

SEQ ID NO: 102384 - DNA, 107 bp, Zea Mays
aagatgataggccacagaccaaatatccaaaagataatttgggcccataagacgattatcagacacacgctaacacaagttcacccttaaagagaacaacagggtct

SEQ ID NO: 102385 - DNA, 1806 bp, Zea Mays
acgaacatacggatcattcgagaaaagagaatgaacagacggggtgataagtggaaaagataacaaagacggggtattaagtgaaaagcgaacagagaccggtggaaaggaccccggcccacctggaagccggagagaatcgagcagagccaccgatcgctcctctccactttccacattccagttccactccgcctccgctgccggtcgccgactccgaaactccgacagtccgaccacaaggtgaggatccgatcccaaacagtttcaggcgactgcgccaccccaacgctcctagggggacttcttccagtgagatccatggctgccgatcttagattggggggcgggaggcaagggcagactggcgtggtaccagtaccaccggcggggcaacttgatcggagtggttgctgtgtcagggccggagccggagccggtggcagctctccgccgccggcgacgggtgctggagggcggagcggggctggggagctagtggctgtagtcgtgtttctgtcgggagtcgggactcgggaggctcaagagagcgaccgctgcactggaggccgaagggaaggaacgaggccgttgaatcgcaggatcagggaaaaatctccagcctctctacatattcttgtcgtctcatggatctggcctgccatttggtgtctggtgatgggattctaggatcaattctactttgtagggtttcatcgattcttgtgttacatctgtggtctaggaaaattgctgttttatgtttctcagtgaagaaaaataccgatactaataatgtaggtcttgtgcgggatccacagaaggatgagtgaagaggataagactgctgcttctgctgagcagccgaagagggcccctaagctcaatgaaaggatcctctcttctctgtccaggaggtccgtagctgctcatccatggcatgatcttgagatcggtcctgatgctcctgctgttttcaatgttgttgttgagatcacaaagggaagcaaagttaaatatgagcttgacaagaaaactggactgattaaggttgatcgagtcctgtactcatcagttgtataccctcacaattatggtttcgttccaaggactctttgtgaagacaatgacccaatggatgtgttagtcctgatgcaggagcctgttgttcctggttcgttcctgcgagcaagagcaatcggccttatgcccatgattgaccagggtgaaaaggatgacaagataatagcagtctgtgctgatgatcctgaatatcgtcactacaacgacatcagtgagctgtctcctcatcgcctgcaagagatcaagcggttctttgaagattataagaagaatgagaataaagaggttgctgtcgatgcattcttgcctgcgaccacagctcgagaggccattcagtactccatggatctgtatgcgcagtatattttgcaaagcttgaggcagtagattggaagcaactatttatctgggcgtcttggaatgagtgtgattttaataagtcaaaacacttgatattgtgtgcaaatcttggggttgagaacaatgtcactagctgtgatttacttctgtgacttgcattttttttcttgttaaattatgaataagcgaagtccatacgtctactgtgtggcttcttgctgggttcatcgtctacccatgttcctcaagcttgggaacatggggcttttccccatttccgtgtcttccatgcgaagtaaaatttatttgtatacaatcgtattaatctgttcatgtgagttttttatttgtttggacgtaagg

SEQ ID NO: 102386 - DNA, 1248 bp, Zea Mays
acgaacatacggatcattcgagaaaagagaatgaacagacggggtgataagtggaaaagataacaaagacggggtattaagtgaaaagcgaacagagaccggtggaaaggaccccggcccacctggaagccggagagaatcgagcagagccaccgatcgctcctctccactttccacattccagttccactccgcctccgctgccggtcgccgactccgaaactccgacagtccgaccacaaggtcttgtgcgggatccacagaaggatgagtgaagaggataagactgctgcttctgctgagcagccgaagagggcccctaagctcaatgaaaggatcctctcttctctgtccaggaggtccgtagctgctcatccatggcatgatcttgagatcggtcctgatgctcctgctgttttcaatgttgttgttgagatcacaaagggaagcaaagttaaatatgagcttgacaagaaaactggactgattaaggttgatcgagtcctgtactcatcagttgtataccctcacaattatggtttcgttccaaggactctttgtgaagacaatgacccaatggatgtgttagtcctgatgcaggagcctgttgttcctggttcgttcctgcgagcaagagcaatcggccttatgcccatgattgaccagggtgaaaaggatgacaagataatagcagtctgtgctgatgatcctgaatatcgtcactacaacgacatcagtgagctgtctcctcatcgcctgcaagagatcaagcggttctttgaagattataagaagaatgagaataaagaggttgctgtcgatgcattcttgcctgcgaccacagctcgagaggccattcagtactccatggatctgtatgcgcagtatattttgcaaagcttgaggcagtagattggaagcaactatttatctgggcgtcttggaatgagtgtgattttaataagtcaaaacacttgatattgtgtgcaaatcttggggttgagaacaatgtcactagctgtgatttacttctgtgacttgcattttttttcttgttaaattatgaataagcgaagtccatacgtctactgtgtggcttcttgctgggttcatcgtctacccatgttcctcaagcttgggaacatggggcttttccccatttccgtgtcttccatgcgaagtaaaatttatttgtatacaatcgtattaatctgttcatgtgagttttttatttgtttggacgtaagg

SEQ ID NO: 102387 - DNA, 1228 bp, Zea Mays
acgaacatacggatcattcgagaaaagagaatgaacagacggggtgataagtggaaaagataacaaagacggggtattaagtgaaaagcgaacagagaccggtggaaaggaccccggcccacctggaagccggagagaatcgagcagagccaccgatcgctcctctccactttccacattccagttccactccgcctccgctgccggtcgccgactccgaaactccgacagtccgaccacaagaaggatgagtgaagaggataagactgctgcttctgctgagcagccgaagagggcccctaagctcaatgaaaggatcctctcttctctgtccaggaggtccgtagctgctcatccatggcatgatcttgagatcggtcctgatgctcctgctgttttcaatgttgttgttgagatcacaaagggaagcaaagttaaatatgagcttgacaagaaaactggactgattaaggttgatcgagtcctgtactcatcagttgtataccctcacaattatggtttcgttccaaggactctttgtgaagacaatgacccaatggatgtgttagtcctgatgcaggagcctgttgttcctggttcgttcctgcgagcaagagcaatcggccttatgcccatgattgaccagggtgaaaaggatgacaagataatagcagtctgtgctgatgatcctgaatatcgtcactacaacgacatcagtgagctgtctcctcatcgcctgcaagagatcaagcggttctttgaagattataagaagaatgagaataaagaggttgctgtcgatgcattcttgcctgcgaccacagctcgagaggccattcagtactccatggatctgtatgcgcagtatattttgcaaagcttgaggcagtagattggaagcaactatttatctgggcgtcttggaatgagtgtgattttaataagtcaaaacacttgatattgtgtgcaaatcttggggttgagaacaatgtcactagctgtgatttacttctgtgacttgcattttttttcttgttaaattatgaataagcgaagtccatacgtctactgtgtggcttcttgctgggttcatcgtctacccatgttcctcaagcttgggaacatggggcttttccccatttccgtgtcttccatgcgaagtaaaatttatttgtatacaatcgtattaatctgttcatgtgagttttttatttgtttggacgtaagg

SEQ ID NO: 102388 - DNA, 1611 bp, Zea Mays
gcctacagcctaaacgcaccgcaccagacaagaaacaaggggagggagaaccgagagcggcggcgaccggcgagagagagggagggagggacgagatagattcataggtactagcggaggaagcgagtcaagggaaagatgcggactcccgcgatgcgcgttgcctaaaagttccatttcattccttccggcggaggccgggcaatacgctatctctggcgagagagatgccggcgacaggagaaatccacggcctttattagagagaagagatcctattcctacggttctcctcgcatcctgttgcttctgcgtgcggccagacgcgggcacgatatgcaggccgccgccgccgccgccccgtggacgacgaagaccctgccggtgtttgggaaccacctcggcaaccccacgcgcttcacaggcgcctcctcgtccttccacagtacgcccgcctccttcgccaagtggaggaacaaatgggactgccacaagagcgaaaaaggagcacgaaaggcatccaggaattatgagaggtatgtggttcggcaaaaacgagcagaaggaaagaaggccctaaaggattatcttctctatggaaagtcattgcctcatttacaggatggaagcacaggtagctttgctaactcacatgcaattccgaggttcaaaacgtttaggaaaggacctcaaactcactggtcatcgaattcatggcaaggcgtacacaatcacagaaagaataaaaaggacaaggaaaggttctgcaacttcttccatgatgaccatcatgtgcaccctgatgacatctttgaagctgtcttcggggcacattatggttttacttggtctcaaatatcgtgggaagggtttcacttcagggacaaatcgttcagatttagatggagcggccgtgaatcacgcagagagaaaattccatgtgacagcgaagatgaagaaagcgcggatgagagcagagaaacagccagcgttggttcacatgctcacagggtcatccttggattacaaccatgtggtccactaactctagaagatgttaaaactgctttccgggcatctgcgctgcggtggcaccctgacaggcacccggggtcatcacaggccatggctgaggagaagtttaagctgtgcgtgaatgcgtacaattcactctgcagtgtcctcaaggctgcttaggttgtgtttgctgtcactggaggatgttagcttgttatggtatatcagttttgaagggctcaggggctgaacaatttggcggggaaaccactggcgaccatggatgcagtgcagtgggttgttttgtttcactttttatttcgattgagatagtaaggggaaacttaaatccccggacccctgcctttaaaggctagtttgggagccacaaaaccagagggggttggagggactaaaatctacttcttattcaaaattgaataagaaagtgattttatcccctccaatcccctccgggttttgaactcccaaactagccctaaaccctttgggatctctgccttttctcggggtgaggaagcagtccatcggggtaccatttgaattagacatttatttccttatgtgaggttt

SEQ ID NO: 102389 - DNA, 478 bp, Zea Mays
atccgacgtctgctagaggtggcgctgccctgacccgcggtggaggccttgccggcgtgtggcgacacgacgcccaggtgcgcggatttgagtgcaaatacatgcaaaacattactgacaacatggtgcccttatcgagggacagtgccaaagtggagtcgtccacagtacgagcagttttatgacgttgtttgtgctccggcgagcaattgatgctgccacggtggctggctgatccaccctgtctcggccacgggcaccatcctggtgatatagtgaagttcctcgggttgactttgaggcctcctttatgacgaggacgcgggtcaacggcgacggcgtggtgcgactccgccacgatgactggctctggtgtatgatgctcctgcgctctgatggatcccgagcccgactaggtacgcacgcgtgcttccgatggtctcgcgatgcacatgggctacacactgaagccagagaa

SEQ ID NO: 102390 - DNA, 1601 bp, Zea Mays
ccctgcatagtgcatacccttctcgccatccattatattatacacacacccgtacgtcccgccgccggcgccgctgttgctgctgccacagcaacatgggcggcgatttggcgaagccggtggcggcgatggtggttgtgcaggtgatgtccgccggcgtgaacatattctacaagctggcggtgttggacggcatggacatgagggtgctggtggcctaccgctacctcttcgcctccgccttcctggcgcccctcgcctacttcatcgagaggaagagacggaccaagttgacgtggagagtgttggtgatatctttcctgtgtggcctaaccgggggctctctggcgcagaacctgtacatctcgggcatgaagctgacctcggccaccttcgcctccgccaccaccaacctcatcccgggggtcaccttcgtgctggcgctcatcttccgctacgagcgcctggccgtccgcgcctcctccggccaggccaaggtggccggcaccctgctgggcgtcgccggcgccatgctgctcaccttctacaagggcgccgacatcaccccttggcacacccacgtcaacctcgtcgcctcctcctccgcgcaccacgcagcggacgaagccgccgacgccaaccgcgtcatgggctcgctgctctgcatcgccagctgcgtcttctacgcgctctggctcatcctgcaggccaacctcagcagggactacccgttccactactccagcacggcgctcatgtgcgtcatgagcacgctccagtccgtcgccttggcgctctgggccgaccgcgaccccgcccgctggcgcctcggcctcgacgtccgcctgctcgcctccgcctactcgggcgtcctcgcctcgggggtcatgctcgtcgtgctgtcctggtgcgtcaggaagcggggaccgctcttcgcctccgtcttcaacccgctcatgctgctgctcgtggccatcctcagctccctgctgctgggagagaggctctacctcggaagcgcgctcggcgccgtgctcatcgtcggcggactatacgccgtgctctgggggaaggggcgcgaggtcactaccaaggtcagcgagctgcccctgcccatcgtcactaccgatgacgacgacggcaacgtcgacgtggttgttgccgtgcagcaagcccaggcgtccgatcgcgattccaaggagcagcagcagcggtcgacgaggacgggatgagtggagttattattattaacaaacaggggatcgtccatgctcatcaaccaactgtccaactcaacctgcagctcatcattgtggatgtagaattaattcatcgcattgctgattggctacccaatctcaatttggaagcatcaatttccagaacgaacaacacttaaacagtcatcgtcagcagagcacttcctttcacaccagaagccaacatacatgggcgagccagaaataacttttttgggcccgttaccttagcaggccgaatgtgtccctgctattgttgttgggccgtccttactaaattgtacttacccggtaatcaatagaaattttttatttatagacttattatgaaaaacgaattag

SEQ ID NO: 102391 - DNA, 1186 bp, Zea Mays
ctcaacactccactacggtacctcagcaacaatgaactgcttgcgaattaacactaggaatatactactggtaggagtagaccgtagtttttagagctgatcactgtttttagagctgatcactgatgaagatgaaaacggcagtaaacaggggccagaccgcacaaaggaaggaaggaaggcggttttttcggacgtggcgtgtccactcatcttctcacctctttcttcacgctgttttgtcctctcctcgcctcgcccggccccatccatctcggcatctcgctcgtcgtcctcctctcccctccataaaatccgatcggcagctcctggccgctgcccactcctccccgctctggctcttcctcgcgcctcgcgcgcccacccaccttcacgcgctctcccagctagatcgaccccactggcaatcgcgcaggctcccctatcccttcctgttccttcaaaaagactggactggatcttcccagagttcccgttcggagagccgccggatcttcttcgacgaggcttcgatctgctgctctccgtcggcgtgttggggacttgcaccttatccgaagatgtcttttcggagcatggttcgtgatataagggaaagttttgggaatatatcgaggcggaactttgaggtgagaattcaccacagagggaagtctcttgggtcttcaggtgacttgcaagacaggcctgctgaagttcagcaaagcaggtgggctagccttcctcctgagttgctctgcgatgtgatgaaaaggttggaggaagatgacagtagctggccggatcgcaaggatgttgtttcctgtgcatctgtttgtacaacctggagggatatgtgtaaggatattgttagaagtccagaacattgtgcaaagctcacatttccagtatctcttaagcaggtaatgagtgggttcagtgaatgtttatgaattgtgaatcctttccctctaaattcaccttgcctttgctgaaattctctcatatcacctaatattggtgaggagcgggggcatagttttagttattcagatttagaactcttaattaacaaggaaactctctgtccacgaattctgtttcctgtctttcttaacacttgtttgaatttttcttgttcagcctggaccccgagacggggtaatccaatgtttcataaaaaggg

SEQ ID NO: 102392 - DNA, 2139 bp, Zea Mays
ctcaacactccactacggtacctcagcaacaatgaactgcttgcgaattaacactaggaatatactactggtaggagtagaccgtagtttttagagctgatcactgtttttagagctgatcactgatgaagatgaaaacggcagtaaacaggggccagaccgcacaaaggaaggaaggaaggcggttttttcggacgtggcgtgtccactcatcttctcacctctttcttcacgctgttttgtcctctcctcgcctcgcccggccccatccatctcggcatctcgctcgtcgtcctcctctcccctccataaaatccgatcggcagctcctggccgctgcccactcctccccgctctggctcttcctcgcgcctcgcgcgcccacccaccttcacgcgctctcccagctagatcgaccccactggcaatcgcgcaggctcccctatcccttcctgttccttcaaaaagactggactggatcttcccagagttcccgttcggagagccgccggatcttcttcgacgaggcttcgatctgctgctctccgtcggcgtgttggggacttgcaccttatccgaagatgtcttttcggagcatggttcgtgatataagggaaagttttgggaatatatcgaggcggaactttgaggtgagaattcaccacagagggaagtctcttgggtcttcaggtgacttgcaagacaggcctgctgaagttcagcaaagcaggtgggctagccttcctcctgagttgctctgcgatgtgatgaaaaggttggaggaagatgacagtagctggccggatcgcaaggatgttgtttcctgtgcatctgtttgtacaacctggagggatatgtgtaaggatattgttagaagtccagaacattgtgcaaagctcacatttccagtatctcttaagcagcctggaccccgagacggggtaatccaatgtttcataaaaagggacaaatcaaagctaacgtaccggctctacttgtcccttagctctggtgtgcttgatgagaacgggaagttcctgctagcagcgaaaaggagccgcaggatggcgcacacggagtatgcaatttttatggactcgaggaatttctcccgatcgagcactggctacattgggaagctaaggtcaaatttccttggaactaaatttatcatctacgacacacaggctccgtacaatggcgggagagtttgcacacaggaacgtgcccccagccgtcggttgtcttccaggaaagtttcaccaagagttccaagcggcagctaccccgtcgctcaggtgaactacgagctgaatgtgctgggaacccgagggcccaggcggatgcagtgcgctatgcattccatccccgcatcagcggtggagcccggcggcgtggtgcctgggcaaccgaaagagctcctcccgaggctgttcgacgagtccttccgcagcaccgcaacttcctctttctccaagtactccgtcgcggacagctccatggacctgggcagctgcccgttctccgaggtcgaggtgggcgggggaagtctgcgagaaggtgacgagtcggagaaggagaggccactggttctgcgcaacaaggcgccgaggtggcacgagcagctgcagtgctggtgcctcaactttcgcgggcgcgtcaccgtggcctcggtcaagaacttccagctgatagctcctgcaaagacgcagccgcagccgcaggcctccggccccccgccgccgccgccgccgtcgtcgtcgtcgtaccatgacccggtgatcctgcagttcggcaaggtcgggagggacatgttcaccatggactaccggtacccgctgtcggccttccaggccttcgccatatgtctgacgagcttcgacaccaagctggcctgtgaatgaatgaatgaatgaatgaatgaacgaacgaacggtgagagagtcgttcgttttatgtgttccaaagtgataagcattctgagccttggcatgtaaataatttaagaagtaggtgtttgattcaagtattgtattgtttcgtgagacaagacaatgttgcttctgaaacctaaaagtgtttcttggtcagtgaagcaaatctactaaactagctgcctgcaattatttattcttgtcc

SEQ ID NO: 102393 - DNA, 1637 bp, Zea Mays
cctcctctcccctccataaaatccgatcggcagctcctggccgctgcccactcctccccgctctggctcttcctcgcgcctcgcgcgcccacccaccttcacgcgctctcccagctagatcgaccccactggcaatcgcgcaggctcccctatcccttcctgttccttcaaaaagactggactggatcttcccagagttcccgttcggagagccgccggatcttcttcgacgaggcttcgatctgctgctctccgtcggcgtgttggggacttgcaccttatccgaagatgtcttttcggagcatggttcgtgatataagggaaagttttgggaatatatcgaggcggaactttgaggtgagaattcaccacagagggaagtctcttgggtcttcaggtgacttgcaagacaggcctgctgaagttcagcaaagcagcctggaccccgagacggggtaatccaatgtttcataaaaagggacaaatcaaagctaacgtaccggctctacttgtcccttagctctggtgtgcttgatgagaacgggaagttcctgctagcagcgaaaaggagccgcaggatggcgcacacggagtatgcaatttttatggactcgaggaatttctcccgatcgagcactggctacattgggaagctaaggtcaaatttccttggaactaaatttatcatctacgacacacaggctccgtacaatggcgggagagtttgcacacaggaacgtgcccccagccgtcggttgtcttccaggaaagtttcaccaagagttccaagcggcagctaccccgtcgctcaggtgaactacgagctgaatgtgctgggaacccgagggcccaggcggatgcagtgcgctatgcattccatccccgcatcagcggtggagcccggcggcgtggtgcctgggcaaccgaaagagctcctcccgaggctgttcgacgagtccttccgcagcaccgcaacttcctctttctccaagtactccgtcgcggacagctccatggacctgggcagctgcccgttctccgaggtcgaggtgggcgggggaagtctgcgagaaggtgacgagtcggagaaggagaggccactggttctgcgcaacaaggcgccgaggtggcacgagcagctgcagtgctggtgcctcaactttcgcgggcgcgtcaccgtggcctcggtcaagaacttccagctgatagctcctgcaaagacgcagccgcagccgcaggcctccggccccccgccgccgccgccgccgtcgtcgtcgtcgtaccatgacccggtgatcctgcagttcggcaaggtcgggagggacatgttcaccatggactaccggtacccgctgtcggccttccaggccttcgccatatgtctgacgagcttcgacaccaagctggcctgtgaatgaatgaatgaatgaatgaatgaacgaacgaacggtgagagagtcgttcgttttatgtgttccaaagtgataagcattctgagccttggcatgtaaataatttaagaagtaggtgtttgattcaagtattgtattgtttcgtgagacaagacaatgttgcttctgaaacctaaaagtgtttcttggtcagtgaagcaaatctactaaactagctgcctgcaa

SEQ ID NO: 102394 - DNA, 1722 bp, Zea Mays
cttcgatcccgtgggtcgtgggcgtccctccggtccaacgcacgccgtacctgccacaacaggaaagcttgtccacgaccttccttccctcgatcatatcgggcgtaggcatagggcggaacgggacgcgatagctagacaatggccgtcgtggccacgatccgccagcggcgttgcttcgtcctggtgctcggaacggccattgtcgtcgccttctccgccttattcggcacgacgtccggcgccgcgctagtgggtgactcgtgcagagcgtcatcgtccacctcggacggaggcggctgcggcaaggggcttcgttgcaccacctgcgtgcctccaccggggacgggtccggccgcgtgcgcgcggaccacgcccgtggacccaaagacacacggcacgggtctccccttcaacaggtactcatggctgacgacgcacaactcgtttgcggtggtaggcaccaagtcgccgctggggtctgccatcatctctccgcccaaccaggaggactcggtgaccgaccagctgaagaacggcgtgcggggcctgatgctggatgcctacgacttcaacgacgctgtgtggttctgccactccttccatggtcgttgcctgaccttcacagcctacgtgccggcgctgagcgtgcttacggaggtccgggtgttcctggacgccaacccgtccgaggtggtcaccgtcttcctcgaggactacgcggcgccagggtcactcagcaacaccttcaatgccgccggactgtccaagtactggttccccgaggctcaaatgcctagccctagtaagggcggcggtgactggccgctgctcagggacatgatcgccgataaccaccggctcatcgtgttcacatccaagaaagggaagcaggggacggaggggctcgcgtaccagtgggactacgtcgtggaaacccaatacgggagcgagggcatggcggatggcagttgcccaaagcggaccgagtcgaagcccatggactctaaggcccagtcactagtgctgctgaacttcttcaccagcaacccgagccaaagctgggcctgcagcaacaactccgcgccgctcatcagcaggcttaacgcctgctaccacgcctccgccaaacgatggccaaactacatcgccgtcgatttctacatgaggagcaacggcggcggagctcccctggccaccgacatcgccaatggccgcctccagtgtggccacgacaacatcgcacactgcaagatttcttctgcatcggcaccggcacccgcttcggcttcttcaccggcacccgcttcagcctcttcaccgtctcctgccccggcaccggattttgccgccacttctcccgccatctcatcgtctcctgggccggcgcctgggcctcttaatagctactactagtagttaaaaggcggacgcgacaaatatatgtatgtatggattttattttaggtggactggcccagcatgaaattacctatgaaagggtccctgattaatccattatttagaggaacaaattaaaactaataacccttttcaacaagttaatttttaaatttataatgtagatatataagagtgttgatacaccaagtatgtttataaggggaattttgacataagactttaagagcaattgatggtgcggaacttgttctttaactcaggttggtctctcttgtctattctttaattcaggctggc

SEQ ID NO: 102395 - DNA, 1795 bp, Zea Mays
cttcgatcccgtgggtcgtgggcgtccctccggtccaacgcacgccgtacctgccacaacaggaaagcttgtccacgaccttccttccctcgatcatatcgggcgtaggcatagggcggaacgggacgcgatagctagacaatggccgtcgtggccacgatccgccagcggcgttgcttcgtcctggtgctcggaacggccattgtcgtcgccttctccgccttattcggcacgacgtccggcgccgcgctagtgggtgactcgtgcagagcgtcatcgtccacctcggacggaggcggctgcggcaaggggcttcgttgcaccacctgcgtgcctccaccggggacgggtccggccgcgtgcgcgcggaccacgcccgtggacccaaagacacacggcacgggtctccccttcaacaggtactcatggctgacgacgcacaactcgtttgcggtggtaggcaccaagtcgccgctggggtctgccatcatctctccgcccaaccaggaggactcggtgaccgaccagctgaagaacggcgtgcggggcctgatgctggatgcctacgacttcaacgacgctgtgtggttctgccactccttccatggtcgttgcctgaccttcacagcctacgtgccggcgctgagcgtgcttacggaggtccgggtgttcctggacgccaacccgtccgaggtggtcaccgtcttcctcgaggactacgcggcgccagggtcactcagcaacaccttcaatgccgccggactgtccaagtactggttccccgaggctcaaatgcctagccctagtaagggcggcggtgactggccgctgctcagggacatgatcgccgataaccaccggctcatcgtgttcacatccaagaaagggaagcaggggacggaggggctcgcgtaccagtgggactacgtcgtggaaacccaatacgggagcgagggcatggcggatggcagttgcccaaagcggaccgagtcgaagcccatggactctaaggcccagtcactagtgctgctgaacttcttcaccagcaacccgagccaaagctgggcctgcagcaacaactccgcgccgctcatcagcaggcttaacgcctgctaccacgcctccgccaaacgatggccaaactacatcgccgtcgatttctacatgaggagcaacggcggcggagctcccctggccaccgacatcgccaatggccgcctccagtgtggccacgacaacatcgcacactgcaagatttcttctgcatcggcaccggcacccgcttcggcttcttcaccggcacccgcttcagcctcttcaccgtctcctgccccggcaccggattttgccgccacttctcccgccatctcatcgtctcctgggccggcgcctgggcctcttaatagctactactagtagttaaaaggcggacgcgacaaatatatgctggctttgaaaataaaatcaaatagttgatctttgacacaagatcgacaagagcacaagaaactcaatgacactcttctccaatgtctctctcaaggcactattctctagttgatcattttcttaattgtggcacttgaaggatctctgttgctttaagtgtgacttagaatggaagctattgctcttgcaacgaatatgagtacttgtgttgcttgaatcacttggatgtcattgaatggaagttcttgctcttgcaacgaatatgagtgcttgtgttgcttgaatcacttggatgtcattgaatggaggtggttggagtggtatttataaccaccacctagttgtt

SEQ ID NO: 102396 - DNA, 685 bp, Zea Mays
cttttttgtggtcgtcatcttcttcttcttgtgagcatgcacacatgctcagacgggagcgagggcatggcggatggcagttgcccaaagcggaccgagtcgaagcccatggactctaaggcccagtcactagtgctgctgaacttcttcaccagcaacccgagccaaagctgggcctgcagcaacaactccgcgccgctcatcagcaggcttaacgcctgctaccacgcctccgccaaacgatggccaaactacatcgccgtcgatttctacatgaggagcaacggcggcggagctcccctggccaccgacatcgccaatggccgcctccagtgtggccacgacaacatcgcacactgcaagatttcttctgcatcggcaccggcacccgcttcggcttcttcaccggcacccgcttcagcctcttcaccgtctcctgccccggcaccggattttgccgccacttctcccgccatctcatcgtctcctgggccggcgcctgggcctcttaatagctactactagtagttaaaaggcggacgcgacaaatatatgtatgtatggattttattttaggtggactggcccagcatgaaattacctatgaaagggtccctgattaatccattatttagaggaacaaattaaaactaataacccttttcaacaagttaatttttaaatt

SEQ ID NO: 102397 - DNA, 1275 bp, Zea Mays
ctgatccgcggggcatccggtggggtgcacagcgtttccatccccggtgtcacaaggtcggaaagggtttccctgtctccgcttgtccctctcgaagccgtcgccgcccattgctcagtttgcgcacgacagcctcatcttcctcgcgcacaccaccggagccccctcctcttcctcgcgcacggcggcttcctctccctctctaagccgccgccgcccaccgtctcagttcgcggacgattcatcttcctcgcgtagaccaccggaaccccctcctcttcctcgcgcagagcaccggatccccctcttcctcgcgcagagcacgacacataggagatctgcaaagcctcatcaagatggcaggagatctacaaagttcaaatcagtaaccatctgctgtgtaacaggtgcaagcataagttttttcagaagatcaaaggttgctcttctatggagacttccaaagaacaggcttccaaggactatgctgatttcgagaaaaaagttaagaggacgatatatattgaccacctttctcctcaagtaaaggaatcggccatcaaagctgctcttgcacaatgtgcaaatgttgtccatgtggagtttatcgtcaattacacgatcccatataaagatattgcttctgctgcattggtggaattggatgatgatgtgcaggctaaggctgctgtagaattgatgaatgatttcccgttcataattgggggaatgccaaggcctgtaaaagctatccatgccaaggctgagatgtttcgtgatcgccctccttgccctggccttcgaaaaggtttctgctgggtaaaacaaggagataaggactatgaagcgatgcagaaattgaaaaaccttgcaaagaggcaggaatctgagaacatggccctcatacagaaaatcttgaaagatgagaaggaactggcgactcggcagcaggaggtgcttgatggaaactgcaagaagtacgacatgctggaaactctagtgcagaagggagacatcactaaccttgctcaacaatacggagtgaacttgaacgactgatgagtcattcgtgtcttttccccccttccccttggagcgatggcggaactggtgtgatgatgatggaataggatagcatgccatagttttggtccggtagctggaccctccctctggtgtaaagactatcccaacttaggcttgggcttttcagccttctttggctctccaaaaaatctaaattagctggctctgagcctctgactttctgatcga

SEQ ID NO: 102398 - DNA, 1106 bp, Zea Mays
aaaagttaagaggacgatatatattgaccacctttctcctcaagtaaaggaatcggccatcaaagctgctcttgcacaatgtgcaaatgttgtccatgtggagtttatcgtcaattacacgatcccatataaagatattgcttctgctgcattggtggaattggatgatgatgtgcaggctaaggctgctgtagaattgatgaatgatttcccgttcataattgggggaatgccaaggcctgtaaaagctatccatgccaaggctgagatgtttcgtgatcgccctccttgccctggccttcgaaaaggtttcttgctcaacaatacggagtgaacttgaacgactgatgagtcattcgtgtcttttccccccttccccttggagcgatggcggaactggtgtgatgatgatggaataggatagcatgccatagttttggtccggtagctggaccctccctctggtgtaaagactatcccaacttaggcttgggcttttcagccttctttggctctccaaaaaatctaaattagctggctctgagcctctgactttctgatcgatccaagctagctggctagctacaggttgtgtatatgaatcttgcaggggtgctgacgacgttgcaggaagggtgtagtggcccaaggaagaagagcagcggcagaggaggaggccgaccacgacgacaaggagcatgagtcggtggtggagtcggtgggattgttctccaacctggaagagctgctggtgttcaaccccagagccattctgtcctgctttgttgtcgtccacaaggcctagcttgagctgaactagtagtagtatatggctacatgtagggatgtaatatggtttggaaaatatccgtctggatccggattcgaagatggtgaacaatggttcggatggaatttttggatatccagactttttcggataacgaatcacacgagaaatcactttaagtatccaagttttaacataagcaatactttattttatcattttcatgtggagattttaggttatattcttatcgaatgcttattagtctcggtagcttatttgtattttgatgattttatgcaaaataaattaataa

SEQ ID NO: 102399 - DNA, 252 bp, Zea Mays
atgacgcacggcgaggagaaacgtggacagcaggtccgcgaagctccggtggagaaggtgctaggcgtcggagtttcttcaaccgctcgccagggcctgcccgtcgcgctgggcatgcgcaggctgccgtacgtgcgcacccgccggccaccacgggacgccggggcaccgcgcagggcgagccgtgccgggctgctggttgccgccgctgctggttgccaaggagagcagggaacagatgcttggggttga

SEQ ID NO: 102400 - DNA, 2119 bp, Zea Mays
aggcggtggagtatgccaccaacttcaactggaaactcgtaagaggaaaaaaaaacacacccgccccgccgtccacctctccgcctcctccggtgccggcgctggagcggccgacccacgcaatctatgggcaacatgacccgctcaaactcgcccgtctcccgccgcatcgtcctctccttcctcgacttccttaactccgtcgaattagctcctggtgttgatcctgaagctctggaagttgctaaggattgtctggagtccatttttagtgttaactcaacagccactggtgacgcaatacaaccaggactgttgtttgagctatttgcttctctcgaagcaaatgaaagagaccagagcgacagccaggtggaggatacatttgaactagatcattcaggagatgaactatttgcaaaattttatgctgcacttgatgaaatcaatttctttaagacatcacctgctggagctgaagatcctggtctactttcaaaagcaacacaatactttgatgatgcattactggcgatgcagaagttgggaaagaaaagggcaagcttagtagacattgcagagtcctttaaatcaagagggaatgaattcatgagatcaaaccaacaccttaaagcggtagagctgtacacctgtgccattgcattgaaccaacaaaatgccatttactattgcaacagggctgctgcatatacccttcttaatatgaacaacaaagctattgaggactgcctgaagtcaattgaaattgaccctcactacagcaaagcatatagccgactcggatctgcttattttgctatggggaattatcacgatgctctgtacaagggatacttgaaagccgccgagcttgatcccagtaatgaaaatgtcaggcagaatattgaggtcacaaaaaagaaactggctgaacaacgagtcccaccagaagagcagaacacacatgcaggccaagctcaaggaccacatccaatatttacaagtggtggtgttcctttcaatctgtttccaccaggtagttctccagttcaagaattcttcgctggctggtcgtccgatgttggtgcaccaccaccaggacattcgataagtataaatttgaatgatatttttggccaagcaaatgtcaatgctagcggtcaaggatcaagtcaaacagggaattcaaataaccatactccatctgcttctttctcaactggtgctgctgttcctcctccctttgccttctcgggctcaggaaatgaaggaacgcaggcacgccaagcttctaatggacttgaaggggaacatggtgaaccaggcatacacagggatgatgacgtccatataaatttggctggacccgagcaggctgcggaggctttgagagctgtgatgcagatgcttgggccacagatgggtcaacatgagggtgcacctagaggaccaggttaagcgtgggaggtaggaaaatgtgttacgtggcgtattgtggtctgcaggagtcttatacgggacattattttgtcttctccatcctgacgaagaatggagattctcgtgcgccttattattatagcagcttatctgtgtgctacaacaattccaccgtaatggttaccggcgttcaacttatctgccctgttcatattggcgtaggtgtgtcattagctgtgctggggcctgggtcttgttttgttgagacttgtctcgtaatggctgtcggtccatcatgtgatcttaaattaaagcctttttgcccccctcccctgcttttccgctgcttgtcggttcccagttgatacttggaaaatatttgcaaggttggtgaaaaaaaactgtcactggaatgaagttcatcatcgttattggctggctggcttgctggataaatcataaatgttggaattggtaaatcatatcctcttggactggagggaagttattattacgttactaagctgggtatatctaagatgtttggttcacatgtttataatgtgatgtttataatgtgatgggtaactgataacggtaaatcatgtttgtttaaatccaacgtaatgagataccatgctaagaaatgatgttggtttattcaaatttgttaccgctg

SEQ ID NO: 102401 - DNA, 2212 bp, Zea Mays
aggcggtggagtatgccaccaacttcaactggaaactcgtaagaggaaaaaaaaacacacccgccccgccgtccacctctccgcctcctccggtgccggcgctggagcggccgacccacgcaatctatgggcaacatgacccgctcaaactcgcccgtctcccgccgcatcgtcctctccttcctcgacttccttaactccgtcgaattagctcctggtgttgatcctgaagctctggaagttgctaaggattgtctggagtccatttttagtgttaactcaacagccactggtgacgcaatacaaccaggactgttgtttgagctatttgcttctctcgaagcaaatgaaagagaccaggcaagagctgctttgctgtcacaatctgtttcaaacaagccatctcaaactgcgggtacatcaaatgtcgaagaagactcaaacaaatgcacaacatcaaatagcgacagccaggtggaggatacatttgaactaggagatgaactatttgcaaaattttatgctgcacttgatgaaatcaatttctttaagacatcacctgctggagctgaagatcctggtctactttcaaaagcaacacaatactttgatgatgcattactggcgatgcagaagttgggaaagaaaagggcaagcttagtagacattgcagagtcctttaaatcaagagggaatgaattcatgagatcaaaccaacaccttaaagcggtagagctgtacacctgtgccattgcattgaaccaacaaaatgccatttactattgcaacagggctgctgcatatacccttcttaatatgaacaacaaagctattgaggactgcctgaagtcaattgaaattgaccctcactacagcaaagcatatagccgactcggatctgcttattttgctatggggaattatcacgatgctctgtacaagggatacttgaaagccgccgagcttgatcccagtaatgaaaatgtcaggcagaatattgaggtcacaaaaaagaaactggctgaacaacgagtcccaccagaagagcagaacacacatgcaggccaagctcaaggaccacatccaatatttacaagtggtggtgttcctttcaatctgtttccaccaggtagttctccagttcaagaattcttcgctggctggtcgtccgatgttggtgcaccaccaccaggacattcgataagtataaatttgaatgatatttttggccaagcaaatgtcaatgctagcggtcaaggatcaagtcaaacagggaattcaaataaccatactccatctgcttctttctcaactggtgctgctgttcctcctccctttgccttctcgggctcaggaaatgaaggaacgcaggcacgccaagcttctaatggacttgaaggggaacatggtgaaccaggcatacacagggatgatgacgtccatataaatttggctggacccgagcaggctgcggaggctttgagagctgtgatgcagatgcttgggccacagatgggtcaacatgagggtgcacctagaggaccaggttaagcgtgggaggtaggaaaatgtgttacgtggcgtattgtggtctgcaggagtcttatacgggacattattttgtcttctccatcctgacgaagaatggagattctcgtgcgccttattattatagcagcttatctgtgtgctacaacaattccaccgtaatggttaccggcgttcaacttatctgccctgttcatattggcgtaggtgtgtcattagctgtgctggggcctgggtcttgttttgttgagacttgtctcgtaatggctgtcggtccatcatgtgatcttaaattaaagcctttttgcccccctcccctgcttttccgctgcttgtcggttcccagttgatacttggaaaatatttgcaaggttggtgaaaaaaaactgtcactggaatgaagttcatcatcgttattggctggctggcttgctggataaatcataaatgttggaattggtaaatcatatcctcttggactggagggaagttattattacgttactaagctgggtatatctaagatgtttggttcacatgtttataatgtgatgtttataatgtgatgggtaactgataacggtaaatcatgtttgtttaaatccaacgtaatgagataccatgctaagaaatgatgttggtttattcaaatttgttaccgctg

SEQ ID NO: 102402 - DNA, 2221 bp, Zea Mays
aggcggtggagtatgccaccaacttcaactggaaactcgtaagaggaaaaaaaaacacacccgccccgccgtccacctctccgcctcctccggtgccggcgctggagcggccgacccacgcaatctatgggcaacatgacccgctcaaactcgcccgtctcccgccgcatcgtcctctccttcctcgacttccttaactccgtcgaattagctcctggtgttgatcctgaagctctggaagttgctaaggattgtctggagtccatttttagtgttaactcaacagccactggtgacgcaatacaaccaggactgttgtttgagctatttgcttctctcgaagcaaatgaaagagaccaggcaagagctgctttgctgtcacaatctgtttcaaacaagccatctcaaactgcgggtacatcaaatgtcgaagaagactcaaacaaatgcacaacatcaaatagcgacagccaggtggaggatacatttgaactagatcattcaggagatgaactatttgcaaaattttatgctgcacttgatgaaatcaatttctttaagacatcacctgctggagctgaagatcctggtctactttcaaaagcaacacaatactttgatgatgcattactggcgatgcagaagttgggaaagaaaagggcaagcttagtagacattgcagagtcctttaaatcaagagggaatgaattcatgagatcaaaccaacaccttaaagcggtagagctgtacacctgtgccattgcattgaaccaacaaaatgccatttactattgcaacagggctgctgcatatacccttcttaatatgaacaacaaagctattgaggactgcctgaagtcaattgaaattgaccctcactacagcaaagcatatagccgactcggatctgcttattttgctatggggaattatcacgatgctctgtacaagggatacttgaaagccgccgagcttgatcccagtaatgaaaatgtcaggcagaatattgaggtcacaaaaaagaaactggctgaacaacgagtcccaccagaagagcagaacacacatgcaggccaagctcaaggaccacatccaatatttacaagtggtggtgttcctttcaatctgtttccaccaggtagttctccagttcaagaattcttcgctggctggtcgtccgatgttggtgcaccaccaccaggacattcgataagtataaatttgaatgatatttttggccaagcaaatgtcaatgctagcggtcaaggatcaagtcaaacagggaattcaaataaccatactccatctgcttctttctcaactggtgctgctgttcctcctccctttgccttctcgggctcaggaaatgaaggaacgcaggcacgccaagcttctaatggacttgaaggggaacatggtgaaccaggcatacacagggatgatgacgtccatataaatttggctggacccgagcaggctgcggaggctttgagagctgtgatgcagatgcttgggccacagatgggtcaacatgagggtgcacctagaggaccaggttaagcgtgggaggtaggaaaatgtgttacgtggcgtattgtggtctgcaggagtcttatacgggacattattttgtcttctccatcctgacgaagaatggagattctcgtgcgccttattattatagcagcttatctgtgtgctacaacaattccaccgtaatggttaccggcgttcaacttatctgccctgttcatattggcgtaggtgtgtcattagctgtgctggggcctgggtcttgttttgttgagacttgtctcgtaatggctgtcggtccatcatgtgatcttaaattaaagcctttttgcccccctcccctgcttttccgctgcttgtcggttcccagttgatacttggaaaatatttgcaaggttggtgaaaaaaaactgtcactggaatgaagttcatcatcgttattggctggctggcttgctggataaatcataaatgttggaattggtaaatcatatcctcttggactggagggaagttattattacgttactaagctgggtatatctaagatgtttggttcacatgtttataatgtgatgtttataatgtgatgggtaactgataacggtaaatcatgtttgtttaaatccaacgtaatgagataccatgctaagaaatgatgttggtttattcaaatttgttaccgctg

SEQ ID NO: 102403 - DNA, 1076 bp, Zea Mays
ccctcccccaagggccagggcgccaggccaaccaaaagactccttccttgcgcagatctccgtccgtcgctctccgaactctgattgaggaggagtgaagcttcttttcttcttcctccagtcatcccattgcaaaagtagaagcagggaaggaattggaagcatgaacaagcagcagcaggcgtacgggtacggaaatgggcagcaggccgacgtcccaggctactgctgtttccatccccgggaggtcggcgtcggcgtctgcgctcactgcctcaaggatcgcctcctcctcctcctcgccgctgccaacaacaataagatcgacgacgacgcccgccgcaaaagcaggagcaggagcaggagcatctccctccccaaggtcttcgcgctcggctcctccttcctccagcgcctcgactcccgccaccaccggggacgagggcgggacaacaactgctactccgacgacgacgacgccaccgcctccgtcgcaagcctcgatgattccttcatctccatcaaattcgaggacaacggcaaggcgacgtgggacagccagagccagcacaaggcggcagctcccgcgaggtcgtcgtcgacgacgaccatggtagcggtggagcacgtcaagcgtgtcggcgtcacccggtggcgcaaacaggtggtgggccgcatgctgcagctggcgcgctggaggaggtcgtccgccgctgcgggtgggctggacggcaagaaggcggcggcggcggcggctgagcggtccaaggccagagggagaggctggatccggagcctcactcggaggcgcgcgcacggggaccgggcgtggtaggtcgccgtcgtcggtaaggaggcctggtcggtcgggggcggggcagcccatgcatgcatgcatggtgtccgatggatggatggatctgcgagcttccccccttgctttggatggagacgtagtaattgcttgcttgtgctttgtaccaagtgagatgagtgagtgcctccttttacctactataggctactatacgtacagttaatagcagctagctgttggtgtggattgctatgcgtta

SEQ ID NO: 102404 - DNA, 246 bp, Zea Mays
atggatcccctgggcgcgcttgacggcggcaccatgctcagcgatggacacctgggcagcgccatgcacggcggcggcgacagtaccccgatccagaggtgcggtggcggaggctccccgatccggaagcgcggcaacgacggttccctgatccagggttgtggcatcagtggctcctcgatctggaagcgcggcagtggtggctcctcaatccagaagcacaaagacggtggttccccgatctag

SEQ ID NO: 102405 - DNA, 942 bp, Zea Mays
atggggcagttgaggcatccaaaattggtagagttgatcgtatattgctgcgaagatgaccatcggaaggtggcggtcttctgctgctgctggtttttaaggtccataacagccatccacctcgcgtgctctgcactttgtgcctatccgttcattgaagccctgtgggtgtcggccaaggagcttctcggcatcaagtctgacgacgatgaggagcagccctcggcgatgacgaagggccccacccccatccaccagttgtctcgcactagctgtgcaacaaacctctacccatctagcgagtgggagcagatgcggaaggacaactacaagacggtcaacgtggaggagagcctccacaagaagtgcttcagcgagcactttcaggacgaggaggtggtcgccgccttctgtgccgttgtcaacgcgaagcagttatctgtatactggactgcagagagaaagcaggagataaatgtgtggtccgagttccaaaatcccatgagtgacatcgtctcccgtgcgacgttcaggagcagcttcaatgaagggagaaggatcgtccagttgcaaaacagagcagacacaaaacactgtaaatacgacaaacatgatgcatatcctagtctacagatcaataaagtgcaagacacactttccactaacggtagcagacacctaaaaatactggagaatttgaaagatgacaatggatccgatagtggcattaattttgattataatgatccagacatgccaaacaacatagatgttgatccagacgtttcaacatatcctgatgagattattgctgcaactcccaaaagtactcatggcacacatgatggcatagatacacatgaaagcctcgatgatgacttttgttggttacatctgctgtttcagacacctataggatacaaaatgcaaaagtatagttag

SEQ ID NO: 102406 - DNA, 3413 bp, Zea Mays
aaacaggacctttagtcctttactcatcctcgttagtcttgactcttgcgcgtccacccctgcgcttttcactagtttggattcggacttcctgcgctccgccaattgcttcctactccacctcctcttctccctccccaagccgccgccgccgccgccgcctcatctcatccccatcacccactcccggcggatcgtcgatggcggcgccggcgatatggcagccacaggagcaggggctccacgagatctgcaccctcctggaggcgcacatctcccccaactccgaccaggcccgcatctggcagcagctccagcactacagccagttccccgacttcaataattacctaaccttcatcctggcccgcggagaggggaaatcaattgaagttagacaggcagctggtctactactgaaaaacaatctgcgaacgactttcatctctatgcaaccttcgtcccagcattatgttaagtctgagctgttaccatgtataggggcaaccaatagggctattagatccacagttggaacagtgatcagtgtacttttccaaattgtacgagtcgctggatggattgagttgtttcaggcactccataagtgtttggagagtaatgacctggatcacatggaaggtgctatggatgcgatatacaagatctgtgaggatgtccctgaagagctcgatgttgatgttcctggtttgtctgaacgaccgatcaatgtgtttatgccaaaaatactgcagttcttccagtcaccacatgcaagtttgagaaaactatcgttgggttgtataaatcagtacatagtagtgatgccatcggcactctacatgtctatggatcagtatattcagggattattcaaccttgcaaaggacccttcagcagatgttcggaaactggtttgttcagcctgggttcagctcattgaagttcgcccatctattttggagtcacatcttaaaaatgttactgaattgattctgcaagctaataaagatccagatgatgaagtcgctctggaagcttgcgagttctggtctgcatactgtgatgtgagcatgcctcctgaaggtttacgggagttcttgccacgcttaatcccgactttgttgtcgaacatggtatatgctgatgatgatgagtcccttgatgatgctgaggaagatgaatcctttccggacagggaccaggatttgaagccccgctttcatgcctctcgattgcatggatcacaaactggagatgatgatgatgatgatgatgctgtaaatgtctggaacctgcggaagtgtagtgctgctgggttggatgttctctctaatgtgtttggtgacagcatccttccaactttaatgccattgattgagcaaaacttggctcgaacagatgacaattcttggaaggagagggaaactgctgttttgtgtctaggcgctatagcagaggggtgcattggtggtctatacccacaccttcctcagattgttgccttcctaatcccacttcttgatgataaatttcctcttatacggagtattacgtgttggacgctctctcgatatagcaaattcattgttcagagccttgatcatccaaatggacgtgaacaatttgataagattctcatgggattgctaagaaggatattggatactaacaaaagagtgcaagaggctgcttgttcagcgtttgcaactcttgaagaggaagcttctgaagaattagtaccccacttggaagtaattttgcagcacctcatgtgtgcctatggaaaataccagagacgaaatcttcggatactctatgatgcccttggtaccctggctgatgctgttggagcagaattaaatcaggcaaaatatctagatatatttatgccgcctttgatcacgaagtggcagcaactttccaattctgacaaagatctatttccactccttgaatgctttacatctattgcacaggcattgggaccaggatttgctcagtttgcggaaccagtgtttcaaaggtgcatcaatcttatccaatcgcaacagttggcaaagattgatcctactgcagctggtgcggtgtatgatagagaattcattgtttgttcgttggacctactgtctggacttgcagaaggtcttggcgctggtattgaaagtcttgttgcacagagcagtttgagagatctgcttttgcaatgctgcatggatgaagcagctgatgttcgacaaagtgcccttgcccttcttggagacctttctagggtttgcccaatacatttgcatccacgtcttcaagaatttcttactgttgcagcaaagcaactgaaccctcagtctgtgaaggatgcggtatcagtagctaacaatgcctgttgggctattggagaattagcaatcaagattggcaaagaaatagcacctgtggtgatcaccgttgtttcgtgcttgattaccatcctaaaatccccagagggtttgaacaagtcacttgttgaaaatagtgcgatcactcttgggaggcttagctgggtctgtccagacatcgtggcccctcatatggagcatttcatgcaagcatggtgcagtgccttgtgcacgatcagagatgattttgagaaagaggacgcgtttcatggactgtgtgcaatggtggcagcaaaccctacaggagccgctggttcattagcttacatctgccaggcctgtgcaagttggactgagataaaaagcgaaggtcttcacaatgaggtgtgccagattctgaatggctacaagcagctgcttggaaacaacggtgggtgggaacaatgcatggccgccctgaaaccagacgttgtgcagaaattagctagatacggagtatgatgagaagcaagctcgtgtggtttattcacctcatacaccgaccatcatctttatggcggagacaagagaggagcagaaaggggtgggggtcgtcgagagtgtctctgctgctgatgcatcatctttacatgtgtggcacttgagagtcgattcggttcgttggtacgccattgtccgttcgttcattgttatactggttggtgcacagcatttccagagcgagagtaggatgtcttggtaaaccccccatgtgtattggttggttgggccagtggacttggttttggtttttttgtcattcctactggcaaacacaacaaggccaccaccctcttgctcgccccaccccggcaacattgagaaaacagaaaggttttgtagcgtgtaattctctctcttttcttggtttcttattattattaggtgtaggattgttttcgagtcttgtttggcaggaagggtttgtacgagaaatcaattgattgctcactcaccacaaaataataaaaaagatcgatcgatggggcttgtatctcc

SEQ ID NO: 102407 - DNA, 2949 bp, Zea Mays
cgacgattctatgtttatcacgcccaacaaagtagtgtagtttttcgacgccggcggatccctcgagccctagctaggaaagtagggttttcgatggattctctgagccggagggagcgggcacaccgcgccgtcgacgccatgaagcctctgggcttctcgaagaaggaggtcttcgccgtcctcaagaacctcctccagctgttcgataactcctgggagcccattgaggacgagtgctaccgcgccctcgccgatgctatcctcgaagcccgcgaccggccccagatgcattgcagcaacagtacaagaggggttcggcttccgccggagggggagggctgccggccccggccttctacttcccgtgacatccacgacggtctggatggtgggaccgaggcccttcgcatcaagaggacgaggatcagcgctagttgctctatcgatccccagtctcccgtctccgctgcggaagcccttgatgaacctataggcgtttcgtctgagctaagccatccacaaatggggacctcaacccaatgtcagcggcccactgcatatggtggcgtgccttcacatgggaatactgcacacaagaagagggcaatacaaatgatggatgaagatttccaacataccgtcttcttgagggagcctaaacctgaacctgatactgatgatctacaatgcagtgcccctgcatccagctgtcagaatgcccaacttggccgcattgcttcccacccgctcaatgccagcaccttagatgctctacctgttcaggctccgttaaagatttcaggagctaatggcaggacagtccagcattatagaagtacagcgccttcttcctttgttgaacctataaatagcaagacgaagcaacctcaaagtctggaaaatgggttggaccatgcaactatgatgcacaatgctgggacaggatctgcagctggaaaaacacaggaagcaccttgtttacacactcttgtagcttcatccactatgggtgaggtcgagatgtcgatcaaatgctgcatagacccatcaaaattccacatgcctgatttagaagctgttttcaagatggttgaggaaaaatgccttcgctcacacaagagcctcccacctgatttttccatagccggtctcatcaagcagatatgccagtgtgtcgcacgactaggcagtgatcatgctgcagaacataataaacaatcagatgcttttggcaagatcagaagctcacaggataagccaacaacgagtagtgctccatccttggaaccaattgattgcatgaacagcagaagcggggaatataaagctgtagaagaatcattgattgtggaagcttcagagaatggcccaccaaattcaactacccatcagcaggcccatttggtacttcctcccaatgggtgtacccatgatttatctgacatatcaaagggaaaagaaaggttaagtatatcagcagtaaacgaatttggtagcgagaattgtttaccttccttttattatataccaagaaatcttgtttcccaggactcctatgttaactctgttgaaacaattggcgacaaggactgttgttctgattgctctggcaactgcttgtatgcctctgaaccatgtgcctgtgcaagaaaaactggtggtgaatttgcctatacacgagacggattggttaggacaaagttccttgatgagtgcatctctatgaaccggtttccagaaaaacataatatgttcttctgtaaatcttgcccacttgagagtatcaggaacgagccttcaccagagctttgcaggggccatattattaggaattttatcaaggaatgcgggagtaaatgtggctgtaacgcgcaatgtggtaaccgtgtagttcaacgtggtataacttgcaatctgcaggtgttttcgacacgggaagggaaggggtgggggctacgcacacttgatgaacttccaaaaggagcttttgtctgtgaatatgttggagagttgctaacaaatacgaagctacatgaaatgactactcaaaacatgcacaatgctaggtactcagtgctcttagatgctggttggggtcctgatggggtgctgaaggatgaagaagctttattcctggatgcgacattttgtgggaatgttgggagattcatcaaccacaggtgttgtctgcttattctcaacctgctcattgtgatgttattttaaatgtaataaatgatggaaaatacgagccattgacctctctcatttttctttctggttgtaacactactttacctagatgctatgatgcaaatttagttgagatccccgttgaaaaggagacgccagatcatcactattatcattttgcatttttcacaaccaagaaggtggaagcatttgaggagctcacatgggattatggtattgattttgatggtgataagcatcctgtcaaatcatttgaatgcctgtgcggaagcagatactgccgtggtagaaagcattcgaggacgcgaggcaaagctgcttcgaagtgaagtgttgactgaaagcagcggtgcatggttggtttgggaaagcgaacggactaatcagttttagaatgctttgttaacctaggtagctatgcattcataaagtgcccgctgtgcttgactgcagaacgtgaaattcaattagacagactgaaatgcaatgtacgtacgctactcctaaaccctaagccatctggccatgatctactgatgatgaggtgaatttgattactgttctgtgcatcattgacagacaaaaacagcacataatcatgcatgtgtcgttaacgaccagtttagcacatttgtttgccaagtagtagtaggggtgtagtgggatacggacggatattctatattgttttcatattttctcttcggattcgaatcgggtatgaatattatt

SEQ ID NO: 102408 - DNA, 2827 bp, Zea Mays
cgacgattctatgtttatcacgcccaacaaagtagtgtagtttttcgacgccggcggatccctcgagccctagctaggaaagtagggttttcgatggattctctgagccggagggagcgggcacaccgcgccgtcgacgccatgaagcctctgggcttctcgaagaaggaggtcttcgccgtcctcaagaacctcctccagctgttcgataactcctgggagcccattgaggacgagtgctaccgcgccctcgccgatgctatcctcgaagcccgcgaccggccccagatgcattgcagcaacagtacaagaggggttcggcttccgccggagggggagggctgccggccccggccttctacttcccgtgacatccacgacggtctggatggtgggaccgaggcccttcgcatcaagaggacgaggatcagcgctagttgctctatcgatccccagtctcccgtctccgctgcggaagcccttgatgaacctataggcgtttcgtctgagctaagccatccacaaatggggacctcaacccaatgtcagcggcccactgcatatggtggcgtgccttcacatgggaatactgcacacaagaagagggcaatacaaatgatggatgaagatttccaacataccgtcttcttgagggagcctaaacctgaacctgatactgatgatctacaatgcagtgcccctgcatccagctgtcagaatgcccaacttggccgcattgcttcccacccgctcaatgccagcaccttagatgctctacctgttcaggctccgttaaagatttcaggagctaatggcaggacagtccagcattatagaagtacagcgccttcttcctttgttgaacctataaatagcaagacgaagcaacctcaaagtctggaaaatgggttggaccatgcaactatgatgcacaatgctgggacaggatctgcagctggaaaaacacaggaagcaccttgtttacacactcttgtagcttcatccactatgggtgaggtcgagatgtcgatcaaatgctgcatagacccatcaaaattccacatgcctgatttagaagctgttttcaagatggttgaggaaaaatgccttcgctcacacaagagcctcccacctgatttttccatagccggtctcatcaagcagatatgccagtgtgtcgcacgactaggcagtgatcatgctgcagaacataataaacaatcagatgcttttggcaagatcagaagctcacaggataagccaacaacgagtagtgctccatccttggaaccaattgattgcatgaacagcagaagcggggaatataaagctgtagaagaatcattgattgtggaagcttcagagaatggcccaccaaattcaactacccatcagcaggcccatttggtacttcctcccaatgggtgtacccatgatttatctgacatatcaaagggaaaagaaaggttaagtatatcagcagtaaacgaatttggtagcgagaattgtttaccttccttttattatataccaagaaatcttgtttcccaggactcctatgttaactctgttgaaacaattggcgacaaggactgttgttctgattgctctggcaactgcttgtatgcctctgaaccatgtgcctgtgcaagaaaaactggtggtgaatttgcctatacacgagacggattggttaggacaaagttccttgatgagtgcatctctatgaaccggtttccagaaaaacataatatgttcttctgtaaatcttgcccacttgagagtatcaggaacgagccttcaccagagctttgcaggggccatattattaggaattttatcaaggaatgcgggagtaaatgtggctgtaacgcgcaatgtggtaaccgtgtagttcaacgtggtataacttgcaatctgcaggtgttttcgacacgggaagggaaggggtgggggctacgcacacttgatgaacttccaaaaggagcttttgtctgtgaatatgttggagagttgctaacaaatacgaagctacatgaaatgactactcaaaacatgcacaatgctaggtactcagtgctcttagatgctggttggggtcctgatggggtgctgaaggatgaagaagctttattcctggatgcgacattttgtgggaatgttgggagattcatcaaccacagatgctatgatgcaaatttagttgagatccccgttgaaaaggagacgccagatcatcactattatcattttgcatttttcacaaccaagaaggtggaagcatttgaggagctcacatgggattatggtattgattttgatggtgataagcatcctgtcaaatcatttgaatgcctgtgcggaagcagatactgccgtggtagaaagcattcgaggacgcgaggcaaagctgcttcgaagtgaagtgttgactgaaagcagcggtgcatggttggtttgggaaagcgaacggactaatcagttttagaatgctttgttaacctaggtagctatgcattcataaagtgcccgctgtgcttgactgcagaacgtgaaattcaattagacagactgaaatgcaatgtacgtacgctactcctaaaccctaagccatctggccatgatctactgatgatgaggtgaatttgattactgttctgtgcatcattgacagacaaaaacagcacataatcatgcatgtgtcgttaacgaccagtttagcacatttgtttgccaagtagtagtaggggtgtagtgggatacggacggatattctatattgttttcatattttctcttcggattcgaatcgggtatgaatattatt

SEQ ID NO: 102409 - DNA, 1589 bp, Zea Mays
cagcgctcccgctccttgctcgcctccacccgcggccaccaccgccctgcggcccccgccgcttgctagcctccaccgcgccgcgagtcacgccgttcatgcaccggctggtcctggagcacgggaggacgagcatgtcctggttcggccccagccccaaggtgaccatcgtcgacccggacctggccaaggacgtgctgtccaacaagttcggccacttcgagaagctcaaggtcccggcgctgtccaagatgctgggctccggcgtggccagccacgagggcgagaagtgggtcaagcaccggaggatcctcaaccatgcgttccatcttgagaagctcaagcgcatgctgccggcgttttctacgtgctgcgaggagctggtgagcaggtgggcggcggagtcccttggctccgacggctcgtgcgagctggacgtctggccggagctgcagaacctgacgggagacatcatttctcgcaccgtgttcagcagcagctacagcgaagggagaaggatcttccagctacaggtcgagcaagcttcgcttgtcatgaccaacattcggaagatcatgatccccggctacatgtacttgcctaccgcgaacaacaggaagatgcgcaggaacaacagggaggtggagtcaatcctgcgagagataatcgggaagaggatccaggcgatggaacaaggcgagggcaccaaagacgacctggtgggtctactgctggagacaaacatgagagacgacatggggatgacgatcgaagacgtgatcgaggagtgcaaggtgttctacttcgtcgggatggagaccacgttggtgctgctcatgtggacgatggtggtgctcagcatgcacccggagtggcaggaccgcgcgagggaggaggtgacggctctgttcggcagggacgacaagcccgagtatgacggcctaagccgcctcaaagtcgtgaccatggtgctctacgaggtgctccgactgtacccgccggccacctccgtcgtccgacaaacgtacaaggagatggaggtcggaggcgtcacctaccccgccggcgtgatcctggagctgcccgtgctgctcatccaccacgacccggacatctggggaggcgacgcgcgcgagtttaggcccgataggttctccgagggcgtgtccagggcctccaaggaccccggcgcgttcctcccgttcggttggagcccgcgcatctgcatcggccagaacttcgcgctgctggaggccaagatggcgctctgcatgatcctccagcggtttgagttcgggctcgcgccatcctatgctcatgcgccgcataccatgataaccttgcatcctatgcacggtgcgcagcttaagctcagagcaatatgatctcgacacgatgggtgtcccatcgttgatgccattgttatgtataaccttacaattcagataggcattcggccctgttaatgtctgaaataagtatcttcgcgttggcattttgtaatgtgcttttcacgtaccattggtgctttattgccttttgtatataaacatgtggatatatgtaactcatacattacacaaacaaac

SEQ ID NO: 102410 - DNA, 1661 bp, Zea Mays
cagcgctcccgctccttgctcgcctccacccgcggccaccaccgccctgcggcccccgccgcttgctagcctccaccgcgccgcgagtcacgccgttcatgcaccggctggtcctggagcacgggaggacgagcatgtcctggttcggccccagccccaaggtgaccatcgtcgacccggacctggccaaggacgtgctgtccaacaagttcggccacttcgagaagctcaaggtcccggcgctgtccaagatgctgggctccggcgtggccagccacgagggcgagaagtgggtcaagcaccggaggatcctcaaccatgcgttccatcttgagaagctcaaggtactactaactactacatataattaattgcatataattaattgatccttggaattatctggcaatgtgcagcgcatgctgccggcgttttctacgtgctgcgaggagctggtgagcaggtgggcggcggagtcccttggctccgacggctcgtgcgagctggacgtctggccggagctgcagaacctgacgggagacatcatttctcgcaccgtgttcagcagcagctacagcgaagggagaaggatcttccagctacaggtcgagcaagcttcgcttgtcatgaccaacattcggaagatcatgatccccggctacatgtacttgcctaccgcgaacaacaggaagatgcgcaggaacaacagggaggtggagtcaatcctgcgagagataatcgggaagaggatccaggcgatggaacaaggcgagggcaccaaagacgacctggtgggtctactgctggagacaaacatgagagacgacatggggatgacgatcgaagacgtgatcgaggagtgcaaggtgttctacttcgtcgggatggagaccacgttggtgctgctcatgtggacgatggtggtgctcagcatgcacccggagtggcaggaccgcgcgagggaggaggtgacggctctgttcggcagggacgacaagcccgagtatgacggcctaagccgcctcaaagtcgtgaccatggtgctctacgaggtgctccgactgtacccgccggccacctccgtcgtccgacaaacgtacaaggagatggaggtcggaggcgtcacctaccccgccggcgtgatcctggagctgcccgtgctgctcatccaccacgacccggacatctggggaggcgacgcgcgcgagtttaggcccgataggttctccgagggcgtgtccagggcctccaaggaccccggcgcgttcctcccgttcggttggagcccgcgcatctgcatcggccagaacttcgcgctgctggaggccaagatggcgctctgcatgatcctccagcggtttgagttcgggctcgcgccatcctatgctcatgcgccgcataccatgataaccttgcatcctatgcacggtgcgcagcttaagctcagagcaatatgatctcgacacgatgggtgtcccatcgttgatgccattgttatgtataaccttacaattcagataggcattcggccctgttaatgtctgaaataagtatcttcgcgttggcattttgtaatgtgcttttcacgtaccattggtgctttattgccttttgtatataaacatgtggatatatgtaactcatacattacacaaacaaac

SEQ ID NO: 102411 - DNA, 506 bp, Zea Mays
cgcctgcagattgcaaaaacgggactgctaagcaagctaagatttcaatggcatattccttcatacataggccattgagcgacgaggcacgccgcgtcagcactcccttggtggtcacttgcaatgaccagagacgggaggtctccgttgcccagaacatcgctaacaaggaaattgaccgcaccgttgcattcgacaaggtgctaggtccaaagtctcaacagcaggacgtcttcaaccatgctgttgtgccacttgtcagcgaggttttggacggttataattgcacaatatttgcatatggccagactggaactggcaaaacatacataatggaaggaggagggggcaaagcactggtgcaatttttattatatatattcacatgctacacatgtttctgaattctgatgcggttagtttgctgcttcaactgacgccataactctactccatttctatagaatgctgacctcccgactgatgctagtgtcattccaagtgct

SEQ ID NO: 102412 - DNA, 724 bp, Zea Mays
cgcctgcagattgcaaaaacgggactgctaagcaagctaagatttcaatggcatattccttcatacataggccattgagcgacgaggcacgccgcgtcagcactcccttggtggtcacttgcaatgaccagagacgggaggtctccgttgcccagaacatcgctaacaaggaaattgaccgcaccgttgcattcgacaaggtgctaggtccaaagtctcaacagcaggacgtcttcaaccatgctgttgtgccacttgtcagcgaggttttggacggttataattgcacaatatttgcatatggccagactggaactggcaaaacatacataatggaaggaggagggggcaaagcactgaatgctgacctcccgactgatgctagtgtcattccaagtgctgttaagcgcatatttgacatcctcgaggcacagagtgcagagtacagcatgaaggtttcttttcttgagctgtacaatgtggagctcactgatcttctagctctacaatgagattgcaagaacgggactgctaagcaagctaagatttcaatggcctattccttcatacataggccattgaaccggaagattttgtcggtattcggtaactataggatcatgtggttgttggtcgagttggaccaattatgctggctcatttgttggatgttttgacaagtcgattctagcttccttatgatctatgttagatttggtaatgc

SEQ ID NO: 102413 - DNA, 4394 bp, Zea Mays
gagagatctcttaacaagataattgtttatttttatcgttaactagtacacgaaaacattgtcacatacaagtttaacgggtcctcgcggggaatgggaatgtggatagcttctctgtctccacccgtcggaggaagagttttccccgtttatattcccgtgagaaataaacttccctattcttatccctaagagcatgttcggttgtaagaggaccgaaggattaaagaagattaaatcctctacaattcaattttaaatatgaatagatttaatctcttaaattttttctaaccgaacaagctttaatagaggaattttcgatgaataacggatctatattgtcatccctagctataaatgaaaccgtagtaacccgtagggcactttgctattagctatacataaggtactacatgcgctcaacaacccaacgaattttttttcccttctccatcgaaaagataaaataaattcagaccctttttcctataataataaatatacatggaggcggcgccgacggagtagctgcagtggtgtggtgtcggacagtgaaaggagcacaagacaacactcaggcactcagctgattgatgagctagcattgtatatacagtacaggtagaggcgtatagcgagcgagcgagcgagcaagcgcgcgcgcacacagagagagagagagagagagagagagagacaagacaacagcaacagatagaccgggccaagttcgtgagtccatcgtgtacatacggccgagtggcgacgccgtcgtcttcaccacgcacgccgcgcctcttccatagtctcgctcgcctccattaattccaatcctctctcctccgctagcgctccaccagcacgcaccggcagatgaagaacatggcgtctacgacggtacggtgatcaccttcatcatcacatcactcgttcatcgcccgccggcccgccggttgttggtaggccagggtcagccactcagccgagccagccatgaagctcgtcgtcgagatctccgacgcagccgacctcgcccccaaggacggcaccgcctcctgcaacccctacgtagaggtggacttcgacgaccagcgccagcgcaccgccaccaagcccgccgaccgctccccgtactggaaccagacgctggtcttcgacgtccgcgaccccgcgcgcttcccttccctccccatcgacgtctccgtcttccacgaccgacgcctccaggaccacaacgccctccgcccacagaccttcctcggccgcgtccgcatcaacggcgcctccgtcgcgccgtcgccacaggaggcggtcctgcagaggtacccgctcgagaaacggagcttcttctcacgcgtctcgggcgacatcgcgatcaggatctacctcgtcggagatgatgtcaataatgaaagcgtacaggttcctgctcctcccaaccaccaccaccacccgcagcagcagcagcagcagcaggagtcggtcgcggctgctgccgccaccggagatcccgaaaggatggtcaggtccgccttcgcaccacagcagccgtcggcggttgagcagccagcggcagctgggaacggcggggatgagcacgaggcacgccctcctcgcatcttccgctccgtgccagcagccgagccccgccgcgcgacgctccacgctgtggccgcgcctcctcccccgcccggccagacggtcgtcatgcccaaacccgctgcctccgcccctcccggccccgccttcggcctggtcgagaccaagccgcctctgccggccaagatgggcccgcgcgcggccgccgccgccgccgccaagatcgcgtccacgtacgacatggtggagccgatgacgtacctgtacgtgagcgtggtgaaggcgcgcgacctccccaacatggacgtgaccggcgcgctggacccctacgtggaggtgaagctgggcaacttcaagggcgtgaccaagcacctggacaagaatcccaacccggtgtggcgccagaccttcgccttctcccgggagcacctgcagtccaacctgctggaggtggccatcaaggacaaggacatgatcaaggacgacttcgtcggccgcgtcctcttcgacatgaccgacatcccgcagcgcgtgccccccgacagcccgctcgcgccgcagtggtaccgcctcgccgaccgctccggcgagaagctgcggcacggcgagatcatgctggcggtgtggatcggcacgcaggccgacgaggcgttcccggaagcctggcactcggacgcgcactcgctgcccttcgagggcctctccaacaccaggtccaaggtctactactcgcccaagctcgcctacctcaaggtggtggccatcgcggcgcaggacgtggtccccgccggctcagagaagggccgcccgctggcgcccgtcatcgccaagatccagctcggctggcaggtccgccggacgcgtccggggcagccgcagggctccgccaaccccgtgtggaacgaggagttcatgttcgtggcggcagatccgttcgacgagccgctcgtggtgacggtggaggagcgcgtggcggcggggcgcgacgagcccgtgggccgggtgatcatccccgtccagttgccgtcgtacgtgccccgcaacgacgtggccaagtcggtggaggccaagtggttcaacctgtcccgcgcgctgacggcggacgaggccgcggcgggcgtgaccgccgccaaggcgctgtcggagaagacaaccttctccagcaagatccacctgcggctgagcctggagacggcgtaccacgtgctggacgagtcgacgcactacagcagcgacctgcagccgtcggccaagaagctgcgcaagtcccctatcggcatcctggagttgggcatcctgagcgcgcggaacctggtgcccatgaaggccaaggaagggcggctgacggacccctactgcgtggccaagtacgggtccaagtgggtgcgcaccaggacgctgctcaacacgctggcgccgcagtggaacgagcagtacacctgggaggtgttcgacccctgcaccatcgtcaccgtcgccgtgttcgacaacgggtacgtcctcggcggcggcgagggcagcaaggaccagaggatcggcaaggtgcgcgtgcggctatcgacgctggagatcgaccgcgtgtacacccacttctacccgctgatgacgctgacgcccggcgggctgaagaagaccggcgagctgcacctggcggtgcggttcacctgcacggcgtgggccaacatgctgggcatgtacggcaagccgctgctgccgaagatgcactacagccaccccatctccgtgctgcagctggactacctccggttccaggcgatgcagatggtggcggcgcggctggggcgcgctgagccgccgctgcggcgggaggtggtggagtacatgctggacgtggactcgcacatgttcagcctgcggcggagcaaggccaacttctaccggatcacctccctcttctcgggcgccgtggcggtggcgaagtggatggagggcatctgcaagtggaagaacccgctgacgacggtgctggtgcacgtgctgttcctgatcctggtgtgctacccggagctgatcctgcccaccgtgttcctgtacttgttcatgatcgggatgtggaactaccggcggcggccgcggaagccgccgcacatggacacggtgctgtcgcacgcggagtccgggctggtgcacccggacgagctggacgaggagttcgacacgttcccgacgagcaagcccggggacgtggtgcggatgcgctacgaccggctgcgcagcgtggccgggcgcgtgcagacggtggtgggcgacctggccacgcagggggagagagcgcaggcgctgctgagctggagggacccgagggcgacggccatcttcatcatgctgtcgctggtggtggccgtggtgctgtacgtgacgcccttccaggtggtggccgtggtgctggggctgtacctgctgcgccatccgcgcttccggagcaagcagccgtcggtgccattcaacttctacaagaggcttccggccaagtccgacatgctgctctagctgcgctgcgctgcgctgctctctgccctgcctgttggaattggaacaccaagcatgttccttagtttcttttaatttgctcccaattaattaaattatatattaccacgcacgaatctcagataaataaatgtaaatccctaccagtactactcctacataggagttgagttggatcagcagataccttacctagctacctttttgtgtgtcagaagagaagagaagagtacagtggtacagtactactactctgaataatatgaggaacagaattttca

SEQ ID NO: 102414 - DNA, 282 bp, Zea Mays
atggaggacgctatgagtgagcagcaagaaaagtttcgtgaacagctgcggcaacaacaaatgacatttctccaacatcaatcagagtacatggttgcttacaacgcacaggcgcaacaagcaatgaacggatccggggtcatgggccacaacacgccaccaccggtgataccagcaccaggaggagcttatgctgggaatccaaacccgttacacgacttcgtcaacgagtttttcgcttctggaggtagtggtcacaactccaatgaccctgatatgtga

SEQ ID NO: 102415 - DNA, 3955 bp, Zea Mays
caccagaggcccaccgtcgcgcccagccccaaatcccaaccctagctccagcctccagccgccgcagctcctctctaggctccactgctccagccgccgcgcctcctgcctggctgcctcttgcctggctgcctcctctgtcctctccacgactccacttctccagtctgagcagtctccagcgaccagaggcagcgccgcagcgcgctcggccgctcgccgttccgcgcggccgcgcctcctctccagcgtcgcgccgcgcctcctctccagcgccagcccgccaccgcggcaccgccaggcgccctgccggccagccggccagccagagccaggcgcgcaacgcgctcgaccgccgaccgccgaccgcacaccgcagcacgggactacgggagcagccgaggcccgaccgcccgagaaattcaagataaaagattttgaagcattttcaagtcttaagaactcggaagataaatttaccttgcatcatcatctcatgaacggtatgtacaagattattgtatttatagaatttgtatcgatttatttttagactacatatttcttgaatgtttaaattatatcttacttcttgtgtcatattaaacatcatttttttgttatagtcttaacttagtaacccctcttgcatcaatcctggatccgccactggcctagaaatgtatcttaggagacgattgctgccatgtgatcttgtcttagatcctacatgaagcgactaagataccgcacactgaaaaaaacaatgtctggtcgagtacctggtctcatccaccttaagcgacgagctgtccttggacaacttcaatcttgtttccatcagtgtcgctcatgggttgcaggctatcatgcatgcctgcattctccagcaccttttggagcataggctgcttgcgagagctcgatgccatgttgcccttgcatccttgtctgactttgatgctgaggtagtatgtaagctccctcaggtcactcatgcggactccctttccttcttgaaggtgtcgatttattctcttgatttccctgtaataatgaggtcgtcgacatatatgccaaccaccagtcttgattgctcgacgttgtgcgtgtatagtccatgtttgcaggtgcttcttcaagatgctcgacaaaaatgcagaagtaatgtttaggtggcttaacaccgtgccaccatacctcgaattgaatggagtcctcgcctccacgctctgagtagacgcccgatttaggatggacacagccatggtgactgcctcccccaaaaactagccggacatcgtcttcgcctcttcatgatgctcctggccatccccatggcggtctggttccacctcttcactacgtcattctgctgaggcgtgtatgacacagtgagatgctctagatcccctcctcgacgcagtagttggcgaacgtccgcacaatgaactcaccaccgcgatttgtgcgtagcgtccccagttttcttgctggatgaaccaccaagaactgtgagtagacggccactaccttccttgctggatgatccaccaagctccattgtgcggagtccagtcaccaccacgagtggcgatgctgaggtcgaggagcgtttcaatggacaacacgatctgttcaaggtcatcaggaacataatgtagcaacttcttcactacctcctcagcgatgtcaactccgactactcgaagttggttcgcgagattcgaagcctgtccggcgaagtcctccaccatctcgcctggcttgaacgcgaggtcgccgaattccctctgaagccggttggcattcgcctccttgactcgctaagtgcccacacaaacaaaattttatggagtcccatgccttccttgttgccttgcgtgcgagctaggctcgcctacatcttcggcggcaccgcgcggagtagcgccgccagtgtgtccctgtcgtcgcggaagacgttcgtccccggctcagtcgcctccaaaaggcactaagcttggagattgacttgcatcacgagtgaccactgagcactgaccactcggcctagttagtcttcctgagcatggggtagaccgccatcgtagaactccgctcgatgagacacgttccatgacgatctccgtggagttgcgccgtccgcgaggaaaaaacctgcgacagcgaccgcctcctcctttctccgcctccatcttcccgttgactgtacaccgacactggttgaacacttttgctccgatactagttgttagaaccgagggctaccccttggctgcactcttgtcaacgttgaggaagatgaacggggattctacaagaacacagtcacccgagaaacatacattagtttttggtatggcaaaaataaaccacatattctgaactctattcacaacaatgtagactgaaacttaacacacgttcacagccacgattgaccactacacatgacgagcgagttacgcctcacacctgtgtgaaccgtgtcatcccatagctcaacgtgccatgcaagacactcaaccaaccttgcatgcccatgcatacaactgactcctaaacacacgcgtgatcgctaacattctggcccaagcacactgaatgaacgaatgaaaaacaaagtaaaactgaactaaggactataacctctgaacatgccagagttattcaacaaatatcaggtggtgtaccactagagttgtaaattctgtctcttcgcctatcgcatccagagccacatgctcttccaggagagcctgaaaaacgttcatgttgtgcttgtaagtgcttgctattgctatttcctctgctctaaatacagactgggttgataaaggaaaatgctaatcacaacattgcttacatcctcagcaatgagtagcacaccatccttatcctgcacaaacatgggacaactagtcggattaaagccatctgtttagactgttgtagctataatccatagagacaaaaacactatagaagcagtagaagccgatacaaattaaagccaagcgaacaagcatgtacaaactatattgcaccagttgaacaagaaccaactaaccttgagtgcgacgaacagaaaaggatggtgtataaatcatattgtgggcaacatcctgcagatacaaagtgtcagcaatcataagcatgccaacgaagacccaagattgattacttgtaaggggtgtttggttctagggactaaagtttagtacatgtcacatcgaatgtttggatgccaaatataagtattaaatatagtctaattataaaaataattatatagataaagactaaaaaagagacaaattttaagaataattaatctatggttaacaaatatttaatgtagtatcacattagcggattttaaagcaccatctatgattaacaaatatttaatctatgattgattatatagataaagactaaaaaagaatgtatgtgattatggaaagcaccacctcttgctgtataacagaatctgaaacggagagggaaagatgcgtgtaaagagattgtgatatttagaagcaacagatggaatgctttgcttgtgttggtcgtcatcgacctaaagaaacaggtaaaaattgtgcatcaaacgtataggaaaggaaggaagcatgattcatttacattaggaaccatgggacacagaatgaataatcaggtgaagacatacaactacctagccactgaaatttgtgctcttgaggacttgcaataagcctcaaaaagtgtggttgtgaagctttagggcctgtttggtaatgcagttttaaaataatataattttaaaataacacagcttataattatacatggcacaaatgctacaatattacattaccatagtaaaaccacgctattgtttaaaatcgaaatgtatttagttacttaaaaaaccgaaatatttgcagagaaaacaaaagaaaattaa

SEQ ID NO: 102416 - DNA, 1460 bp, Zea Mays
actaaccaaatattttttggcttccaataacatgatatcattaaatactatagtattattttaaaactgtaaaaataataaacttccgatacatgttaacggggcagagaagcatgcagtcgtgtaagtcctgcgatcctaactgattatgcactccaatgggctgcggagcacaaaggggagaaaaacaaaaacgagtgggaggtggccgtgggccatgttgctgctgctgacgaggcggcgcgacccatagtaaaggcgtacaacagctcacctccctcgtccagctccagccgccgtcaggcttccgacgcaacttctaactccgttcgcctccaggcgacaccatcgcccgctggcacgccgccacagcagcaggttaacacaatttggcccggagcttagttgaatcctgcttccgccactgcggacaaccatggcgtcgtcgaagctgcagctgcctgctgacgacagcgtcctcctgctcatcacccactccaatctcaccaccttcgcagcggacatccgcgtctcgcaacagaccaccgtggaggcgctcaaggacaagctctggcgcaagaccggcaccgccgtcgcttccatgcgcctccagctccgcgacgactccggcaccaagatcgccgacctcgacgacgacgccgcgccactcgcggcctacgccccctacaacggctaccggatccatgtcgttgatctcgacccttcctcactcacctcagggggttggttggaagacacttcccttgtcgacaagtacacaatgtccgatgaaacatacgataagctcgacactaactttcgaaaattcaaagaaaagatggtcccgaaaaactctccgtcagaggataaagaagaatcagaaaagcatatggaggaactatgctccaaaatcaaggtgggtgatagatgtgaagttgagcctggtgccaagaggggcactgtaaaatttgttggtagagctgaagcccttggacgtggattctgggttggagtgcaatatgatgagccacttgggaagcatgacggcatggtgaaaggcattcgcttctttgagtgccctcaaggtcatggggcaattgtgaggccagagaaagtaaaggttggcgacttcccggagagagacccatttgaagacgaggacgatgacgagatttgagtgcgtgtgcgtttggaaaagcaaggggaatgtccttgttgaattgcattcgaaacgtgtgtaaaatgaattcggagatttgagtgtgcgcgcttgcttgcatcttcttgggcaatcatagtgatcacatttcaaggcatgctgttacatctctactatttaagcgtgagctaataaattttccctccaacgcagagtatccaaaaaatggggtggattcgaatcctgctcacttgtataaagcgcatgacttctaccactataacttatttctgtctgtgtt

SEQ ID NO: 102417 - DNA, 1369 bp, Zea Mays
atacatgttaacggggcagagaagcatgcagtcgtgtaagtcctgcgatcctaactgattatgcactccaatgggctgcggagcacaaaggggagaaaaacaaaaacgagtgggaggtggccgtgggccatgttgctgctgctgacgaggcggcgcgacccatagtaaaggcgtacaacagctcacctccctcgtccagctccagccgccgtcaggcttccgacgcaacttctaactccgttcgcctccaggcgacaccatcgcccgctggcacgccgccacagcaggttaacacaatttggcccggagcttagttgaatcctgcttccgccactgcggacaaccatggcgtcgtcgaagctgcagctgcctgctgacgacagcgtcctcctgctcatcacccactccaatctcaccaccttcgcagcggacatccgcgtctcgcaacagaccaccgtggaggcgctcaaggacaagctctggcgcaagaccggcaccgccgtcgcttccatgcgcctccagctccgcgacgactccggcaccaagatcgccgacctcgacgacgacgccgcgccactcgcggcctacgccccctacaacggctaccggatccatgtcgttgatctcgacccttcctcactcacctcagggggttggttggaagacacttcccttgtcgacaagtacacaatgtccgatgaaacatacgataagctcgacactaactttcgaaaattcaaagaaaagatggtcccgaaaaactctccgtcagaggataaagaagaatcagaaaagcatatggaggaactatgctccaaaatcaaggtgggtgatagatgtgaagttgagcctggtgccaagaggggcactgtaaaatttgttggtagagctgaagcccttggacgtggattctgggttggagtgcaatatgatgagccacttgggaagcatgacggcatggtgaaaggcattcgcttctttgagtgccctcaaggtcatggggcaattgtgaggccagagaaagtaaaggttggcgacttcccggagagagacccatttgaagacgaggacgatgacgagatttgagtgcgtgtgcgtttggaaaagcaaggggaatgtccttgttgaattgcattcgaaacgtgtgtaaaatgaattcggagatttgagtgtgcgcgcttgcttgcatcttcttgggcaatcatagtgatcacatttcaaggcatgctgttacatctctactatttaagcgtgagctaataaattttccctccaacgcagagtatccaaaaaatggggtggattcgaatcctgctcacttgtataaagcgcatgacttctaccactataacttatttctgtctgtgtt

SEQ ID NO: 102418 - DNA, 1610 bp, Zea Mays
gctaaaaaaaaaacagaccaaagaagataaaagtagaaagaaataaaatgtttgtggttgactggtccaaggaatccaagtccaattccaatctctctcacacacacattgtcgcctgccttcccttccttccccagttgagttccccccgcggccccgcccccggtccccttccaccgacccaccatgtcggcgatgaggtgaggttgaggccaggtctactctccgcgaccgtcgccgacgccatcgccaacgagcagtttgctccatcttcgccatctcgcacacgaatacaatacactagttttggtagagatggaggacggcggcaaggcgccggccggcctgggcaccctgcgcgcggtgctcgccatcctccagtggtggggcttcaacgtcaccgtcatcatcatgaacaagtggatcttccagaaactggatttcaagttccctctcaccgtgtcctgcgtccacttcatctgctcttccattggagcttacattgcaatccatgtcctcaaggcgaaacccctgattcaagttgaaccggaggaccgctggaaaaggatatttccaatgtccttcgtcttctgcataaacattgtgctgggaaatgtcagcttgcgctacatcccagtctccttcatgcagacaatcaaatctttcactcctgcaaccacagttattctgcagtggctagtctggagcaagcatttcgagtggcgcatatgggcttcgctggtccctatagttggcggaatactcctgacttcggtgacagagcttagcttcaacattttcggtttctgtgctgccatggttggctgcctggctacgtctacaaagaccatcttggcagagtccctactccatggatacaagtttgacagcattaacacggtgtactacatggcaccctttgccaccatgatactggctctaccagcgatggtgcttgaaggaggaggtgtaatgaactggttctacacacatgattccatcgttcctgcgctgactatcatcctaggttcgggggtgcttgcgttctgccttaacttctccatcttctacgtcatccattcaacaacagcagtgacgttcaacgttgcaggcaaccttaaagtcgcggtggcagtgttagtgtcgtggtcgatcttccggaatccaatctctgcaatgaatgcaatcgggtgtggaatcaccctggttggttgcactttctatggctacgtgaggcatctgatctcgcagcggcaggctgcagccccagggagtctaggaacagcgcaagcaaggaatcagacggagatgattccccttgttgtggacgagaagcaagaaaaggtttagcaatggtgctaggccttctcttcacttgttgaagagagaattatatatgtactcgtgcgtgcgtgtgtggtgagggtagtaaactggaacttcgtacaagcatcgtttcctccttccatttgtgacactattcgccagcatcagaatgtgaaattgaattaagcgcacgccaggaggattgggcttggatgctggggcttcactcccggcaactcgccggcgtgggcacaggactcccaggccaccggcggccgactctc

SEQ ID NO: 102419 - DNA, 2435 bp, Zea Mays
gctaaaaaaaaaacagaccaaagaagataaaagtagaaagaaataaaatgtttgtggttgactggtccaaggaatccaagtccaattccaatctctctcacacacacattgtcgcctgccttcccttccttccccagttgagttccccccgcggccccgcccccggtccccttccaccgacccaccatgtcggcgatgaggtgaggttgaggccaggtctactctccgcgaccgtcgccgacgccatcgccaacgagcagtttgctccatcttcgccatctcgcacacgaatacaatacactagttttggtagagatggaggacggcggcaaggcgccggccggcctgggcaccctgcgcgcggtgctcgccatcctccagtggtggggcttcaacgtcaccgtcatcatcatgaacaagtggatcttccaggtttacccgcattatattctagcttccccatccatcttccgccgcggatctggatgtcagatgcttctcctgcccggctgctacttttctcctttggaatatctaactaaattcgtccatactgcttaccattatagatcacggactagagacttggattgggtgggaaacagggtcaaatagacttatagcgtgtttggtctgagaaacgaggtagttatcatcttttcactactcactttttttgtttgtttttggaatggaatgaattgatccatcatttcaatccttgtaggccaataattagtaataatacgagaaatgagttcattccactaaatttgtggaatgaacatatgatgcacccacaccacctcatctgtaatagattggctcttcgaaccaaacaccccattagattgttactacgtactttggtttggttggtggttagtcaagcagggttcagcagctgtctagtccaggagagttgagagttgctgctcttatgcattttttatgtatttctgggtgatagcagattgtgtatatgaacgtgtaaaatactgttagactactgtttagagagtataatttgagataggagatgagatgagtaggacttctgtagatagcctaacaataagaggttacctactcatctcccatcatcttatgggtggtgtcaagactcaagagccgtgcccttttgatataataagtaagttgctctctcttctctgcagaaactggatttcaagttccctctcaccgtgtcctgcgtccacttcatctgctcttccattggagcttacattgcaatccatgtcctcaaggcgaaacccctgattcaagttgaaccggaggaccgctggaaaaggatatttccaatgtccttcgtcttctgcataaacattgtgctgggaaatgtcagcttgcgctacatcccagtctccttcatgcagacaatcaaatctttcactcctgcaaccacagttattctgcagtggctagtctggagcaagcatttcgagtggcgcatatgggcttcgctggtccctatagttggcggaatactcctgacttcggtgacagagcttagcttcaacattttcggtttctgtgctgccatggttggctgcctggctacgtctacaaagaccatcttggcagagtccctactccatggatacaagtttgacaggtactacacacctttctgtcttatggaatagaggttggaacttgtaattaatcagtaaggtctgttctatttcgtgcagcattaacacggtgtactacatggcaccctttgccaccatgatactggctctaccagcgatggtgcttgaaggaggaggtgtaatgaactggttctacacacatgattccatcgttcctgcgctgactatcatcctaggttcgggggtgcttgcgttctgccttaacttctccatcttctacgtcatccattcaacaacagcagtgacgttcaacgttgcaggcaaccttaaagtcgcggtggcagtgttagtgtcgtggtcgatcttccggaatccaatctctgcaatgaatgcaatcgggtgtggaatcaccctggttggttgcactttctatggctacgtgaggcatctgatctcgcagcggcaggctgcagccccagggagtctaggaacagcgcaagcaaggaatcagacggagatgattccccttgttgtggacgagaagcaagaaaaggtttagcaatggtgctaggccttctcttcacttgttgaagagagaattatatatgtactcgtgcgtgcgtgtgtggtgagggtagtaaactggaacttcgtacaagcatcgtttcctccttccatttgtgacactattcgccagcatcagaatgtgaaattgaattaagcgcacgccaggaggattgggcttggatgctggggcttcactcccggcaactcgccggcgtgggcacaggactcccaggccaccggcggccgactctc

SEQ ID NO: 102420 - DNA, 1484 bp, Zea Mays
tgtcgcctgccttcccttccttccccagttgagttccccccgcggccccgcccccggtccccttccaccgacccaccatgtcggcgatgaggtgaggttgaggccaggtctactctccgcgaccgtcgccgacgccatcgccaacgagcagtttgctccatcttcgccatctcgcacacgaatacaatacactagttttggtagagatggaggacggcggcaaggcgccggccggcctgggcaccctgcgcgcggtgctcgccatcctccagtggtggggcttcaacgtcaccgtcatcatcatgaacaagtggatcttccagatcacggactagagacttggattgggtgggaaacagggtcaaatagacttatagcgtgtttggtctgagaaacgagaaactggatttcaagttccctctcaccgtgtcctgcgtccacttcatctgctcttccattggagcttacattgcaatccatgtcctcaaggcgaaacccctgattcaagttgaaccggaggaccgctggaaaaggatatttccaatgtccttcgtcttctgcataaacattgtgctgggaaatgtcagcttgcgctacatcccagtctccttcatgcagacaatcaaatctttcactcctgcaaccacagttattctgcagtggctagtctggagcaagcatttcgagtggcgcatatgggcttcgctggtccctatagttggcggaatactcctgacttcggtgacagagcttagcttcaacattttcggtttctgtgctgccatggttggctgcctggctacgtctacaaagaccatcttggcagagtccctactccatggatacaagtttgacagcattaacacggtgtactacatggcaccctttgccaccatgatactggctctaccagcgatggtgcttgaaggaggaggtgtaatgaactggttctacacacatgattccatcgttcctgcgctgactatcatcctaggttcgggggtgcttgcgttctgccttaacttctccatcttctacgtcatccattcaacaacagcagtgacgttcaacgttgcaggcaaccttaaagtcgcggtggcagtgttagtgtcgtggtcgatcttccggaatccaatctctgcaatgaatgcaatcgggtgtggaatcaccctggttggttgcactttctatggctacgtgaggcatctgatctcgcagcggcaggctgcagccccagggagtctaggaacagcgcaagcaaggaatcagacggagatgattccccttgttgtggacgagaagcaagaaaaggtttagcaatggtgctaggccttctcttcacttgttgaagagagaattatatatgtactcgtgcgtgcgtgtgtggtgagggtagtaaactggaacttcgtacaagcatcgtttcctccttccatttgtgacactattcgccagcatcagaatgtgaaattgaattaagcgca

SEQ ID NO: 102421 - DNA, 4604 bp, Zea Mays
cgccaaaagacaagaccataaagattactcatagattaaagtagggtttggacgtctgcctgtccatttcggcgtctgttcttagcggccgacaagcggaatctggatcaagtcccctgcttcaacccatcccctctcatcgattcattgccacaaggcagctgattgctcacagcgttggatgtgagaattggattcggacccaccgatcgatatgccgttcggccacacgcggctcgatgtccggcgtccgccgcagtcgtcctacctctgctgctccacaaccaccgtcgccgtattcgtcgcgctctgcctggtggctgtgtggatggcgtcgtccatgctcgtcacccctgccgagttccctccatttcagtccaaagtgcgtccactgaggcctcatgactctcctcctgccaccggaagcttaaccagtgctgatcagggcgatggcatcaccacccatgatgatccaccacctgctacacaacaattgcctcctgtaacagacagcatggatggtgaaaatcagcaacaagaacttttcactacagagcgcggaccatggtcaaccaaggctgaacaatctaacaaggacgctaaagagcaaaccttgacgtccagtagcccactgagcttccgttgggcgttatgcaacgtcgatgctggagcagattatattccatgcctcgacaacgtagcagctatcaagaagctccgttccaccaagcactacgaacaccgagaaaggcattgccccgagaaatctcctacctgccttgttcctctaccagagggctacaggaatccaattaggtggccaaagagcagagatcagatatggtacaataacgttcctcatactaagctggttgaatacaagggacaccaaaactgggttaaggtttctggagaatacctcaccttccccggaggcgggactcagtttaaacatggtgcgttgcgctacattgattttattcaggaggcaaagaaggatgtagcatggggaaaacgaagccgtgtagtgttagatgttggttgtggagtagctagctttggaggatatctatttgacagagatgtgattactatgtcatttgcacctaaagatgagcacgaagctcaggttcagtttgctcttgaaagaggaatacctgctatatcagctgtcatgggtacaaaaaggctcccatttcccagtagggtgtttgatgttgttcattgtgcacgatgtagggtaccgtggcatattgaaggcggtaaactcttgcttgaactggacagactgttacgtcctggtggttactttgtgtggtctgctacacccgtataccagaagctgcctgaagatgttgagatatggcaagccatgtctgctctaaccagttcaatgtgctggaaaatggtcaacaaagtaaaggatagggtgaatagagtgggtatagcaatttacagaaagccaacagacaacagctgctacgaagcaagatctgaaacaaaccctccactctgtggagagtacgacgatcctgatgctgcctggaacatatcgttgggggcttgtatgcataagttgcctgtagatcctaccgttcgtggttcacagtggcctgagttatggccattgagactggagaaaccaccttattggctgagaggttctgaggctggagtatatgggaaacctgccccggaggattttcaagcagactatgaacactggaagcgagtcgtgagcaattcatacatgaatggtttgggtattgactggtctactgttagaaatgttatggatatgaaagccgtatatgcagggttcgcagcagctttgcgcgatctcaaggtgtgggtcatgaatgtggttccaattgattcacctgacacgcttccaattatatatgagcgcgggctgtttggactgtaccatgactggtgtgagtcgtttagcacctatccgagaacttatgatcttgtgcacgccaaccatctgttctccaaggttaagaagaggtgcgagctattacctgttatcgtggaggtggaccgggtgttgaggccacaaggccggctaattgtcagagacaacattgaaacaacaagtgaggtggagaacattctgaaatctctccactgggaggtccgcatgtcttacttccaggagaaagaaggcttgctgttggtgcagaagacgacatggcggccaaatgaaactgaagctaagctatgatgcagagcccttgccccttggaaggaggaaaggaagatctagtgtttgcaaggtcctctacttttgtgaggcatcttttatttatgtagaatttgtagagctatatgattggtagatgtggaggaatctggtggtttccagcatatccatattcatctgtggaagtggaactggttatctgattccctttttttttttgattcatccattcggaaggggaaggtaacgataaatagaaaaggaattgagaattggcggaggtcaaaggcccaacacaacccaatccggaaccccaaccccacccccaccaccaagggtccaaagccatgcgtgccgccatggcggcggcggtcctccgacccacggccgccaccctccgcttcctctccaccccaccacaccagcgccgccgcgtcttggtcggacacctcccctttgctcgccgacgccgccactcctccaccgctacggccccagcgctggaggactccagcccccgcagtggcgaaggcaaggccgtgcgccgccgccgcgcccgtgaatctccccagggcctcctccgccaccagctcgacatgtgctcccgcaacgccgacctcaccaccgcgctccgcctctacgacgacgccctctccccggacaaccccatcccgctctccctccaccactacaactgcctgctctacctctgctccaacgccgccgctaccgactctgacagccatatctccgccaccgccgctcagcgcggcttcgacatcttcgccaggatggaggccgacggcgtccagcccaacgaggccaccctcaccagcgtcgcgcgcctcgccgccgccacccgcgaccctgccatggccttctccgtcgtccgccgcatggccgctgcgggcaccccgccgcgcctccgcacctacggccccgccctcttcgcctactgcgatgccaaagatgccgacggcgccaagcaggtcgaggctcacatggacgcatctggcgtcgtgcccgaggagcccgagctcgcagcgttgctccgcgtcaacgcggacacgggcaaggccgatgaggtttacaggctcctgcacaggacgcgcgtcctcgtcaggcaggtctgcgacaccactgcccaggtcgtcgaggcctggttccggtcggacgcagcgtcccaggcgggggtggacagctgggatcccaccaaggtaaaggagggcgtcgtcaagggcggcggcggctggcatggccagggatggcttggcaagggcgcatggagcgttggctggaccgagatgggcaaggatgggacatgccaacgctgtggggagaggcttgtctgcattgacattgatccagccgagactgacaactttgcaaattcgctcaccgaactggccattaagcttgaggccagggaagatttcctcagttttcagagctggctacgccgccatggaccattcgatgctgttatagacgctgctaatgtaggcctttacaaaagtaaagatttctgtttttcacaggttaactctgttgtaaatgctatacagagagtaactaaatcaaagaagttgccactgatcgttttgcataggagccgtgtaaatgttggtcctgcaaaagccccatacaaccagaagattctggacagttggaggaatgctggagctctgtatgcaacccctcctggctccaatgacgattggtattggctgtatgcagctgtcagttgccgatcgttgcttgttacaaatgatgagatgcgagaccacttgttccaactgcttggcactagttttttccctaggtggaaagaaaaacatcaggtcagactaactttctccgggcatggccctacccttcacttgccgcctccttattcaattgttattcaggaatctgaagatggaagctggcatgtaccaacaacaacaggcgatgatattgaaaagccacggcagtggttgtgcactactagaaaatctttgaggtagatgtgatttaattttggcccagtcaagttgacacagaatggtgccaagttgccaaccttggtgggaactgggaagggtggtggcgtgacaaaccctgaaaccagcaaagcttaaatgcagcaacttgttggcccgaacgaaagaaagctgattggagtacaagtgatgaatatgagcaggccatggatatggaaagccttttgttgtaacatcgtgagctgtttattgctagcccaggttattctagagtagtttgagaaccgtggtaaggtaatttgcttcatgtgagttttacttttattaaatgacgtgccatgccagtgatttgaaggatgtggcaggcaagtaatcaaagaaagagatgaatgttatctaatttgtcatta

SEQ ID NO: 102422 - DNA, 944 bp, Zea Mays
tatgatccgatacttgtttgacacaaaggcaggcaggcagacagacagagctaatacgaccaagtttgggtcgctctctccttgtaggttaactctgttgtaaatgctatacagagagtaactaaatcaaagaagttgccactgatcgttttgcataggagccgtgtaaatgttggtcctgcaaaagccccatacaaccagaagattctggacagttggaggaatgctggagctctgtatgcaacccctcctggctccaatgacgattggtattggctgtatgcagctgtcagttgccgatcgttgcttgttacaaatgatgagatgcgagaccacttgttccaactgcttggcactagttttttccctaggtggaaagaaaaacatcaggtcagactaactttctccgggcatggccctacccttcacttgccgcctccttattcaattgttattcaggaatctgaagatggaagctggcatgtaccaacaacaacaggcgatgatattgaaaagccacggcagtggttgtgcactactagaaaatctttgaggtagatgtgatttaattttggcccagtcaagttgacacagaatggtgccaagttgccaaccttggtgggaactgggaagggtggtggcgtgacaaaccctgaaaccagcaaagcttaaatgcagcaacttgttggcccgaacgaaagaaagctgattggagtacaagtgatgaatatgagcaggccatggatatggaaagccttttgttgtaacatcgtgagctgtttattgctagcccaggttattctagagtagtttgagaaccgtggtaaggtaatttgcttcatgtgagttttacttttattaaatgacgtgccatgccagtgatttgaaggatgtggcaggcaagtaatcaaagaaagagatgaatgttatctaatttgtcatta

SEQ ID NO: 102423 - DNA, 1491 bp, Zea Mays
ggccaccttcccaagaacaatggcatcaagtggcgcgggaactctggcctgtcagacggctccgacgccaaggacgtcaagggtggcctcgtcggcggctactacgacgctggcgacaacatcaagttccacttcccgatggccttctccatgacgctgctgagctggtcggtgatcgagtacagcgccaagtacaaggccatgggggagtatgaccatgtcagggagctcatcaagtggggcaccgactatctgctactcaccttcaactcctctgcttccaccatcgacaagttatacgcccaggtgggtgctgctaagatcaacggcagccggccggacgaccattactgctggaaccggccggaggacatggcgtaccctcgcccttcactgtccgtgagctccgcccctgatctgggtggcgaggtcgccgctgcacttgcggctgcctccatcgtgttccgtgacaacgccgcctactccaagaagctcagccagggcgcggccaccgtgtacaagttcgcgcggcagtcggggcggcgcaccccctactcgctccggcagccggacatcgagtactactacaactccaccagctactgggacgagtacatgtggagcgcggggtggatgtactacgccactggcaacagcagctacatcaccttcgccaccgacccgcggctgcccaagaacgccaaggccttcttcagcatcctcgacttctccgtgttcagctgggacaacaagctcccgggcgcccagctgctgctgtcgcgcctgcgcatgttcctcaaccccggctacccgtacgaggagtcgctagccggctaccacaacgccaccagcctcaacatgtgcatgtacttcccgcgcttcgccgccttcaacttcaccaagggcgggatggcgctcttcaaccacggcagggggcagccgctgcagtacgtcgtcgccaactccttcatcgccgcgctctacgccgactacatggaggccgtcaacgtccccggctggtactgcggcccaaacttcatgaccaccaacgacctccgggagttcgccaggtctcaggtcaactacattctcggtgacaaccccaagaagatgagctacgtggttgggttcggcagcaagtacccgcggcacgtgcaccaccgtggcgcgtccacgccgcacaacggcgtcaagtactcgtgcaccggcggctacaagtggcgcgacagcaagaaggcggaccccaacctgctggcgggcgccatggtcggcgggcctgacaagaacgacggcttcaaggactcgcgcaacaccttcgggcagaacgagccgacgctggtgggcaacgccggcctcgtcgcggccctggtggctctcaccaacagcggtaggggagccggcgtcaccaccgtcgacaagaacaccatgttctccgccgtgccgccaatgttcccggccacgccgccgccgccgtcatcatggaagccgtga

SEQ ID NO: 102424 - DNA, 1050 bp, Zea Mays
gagtaagaagaaagagggcggcggcacggcagagccaaagccgaggcgagccgagcagtacatgcatcccgcttcccgcattcctcatcgaggtccggtccagcagccttttgcgccttcgtgtccctcccctccactccctcaccgggggctgggctggtggggagtggggactgggggcagtcgccacgccgcagtccattctttcgtcacccatcgcagctccaacacctctcgctagtcgtcatggcggcttccgcggcagcgttccccctcccaccgccgacgcctcctcttcgactttcacatgtcttttgatatcacagaaaaggattgcccctgccttcactgctgtgaatgccagggacgtttctgtcgccctacaatatatggacattggacttgatagttggcaaactttcttctatatactggacgttccagctttcgccaacctgctgctttaaccacatcttttccttctttcccgattttgcctctcactatcatcaattaccgctaaaagtgaaacaagtgttctccctatggccaagacatcacttcctcctggattccggtttcatccaactgatgtagaactcacagtctactatttaaagaggaaactactgggaaaacacttacgctgcaatgctatcactgagattgatctatacaagttcgccccttgggatcttccagagagagcttccttggagagtaacgatctagtgtggtatttcttttgcccgcgcgataggaaatattctagtgggttaaggactaatcgctcaactggagttggatattggaaagctaccgggaaggacaggccggtggtatataattctaggactgttgggatgaagagaactttagtgtttcatcttggcaagccaccacgaggtgatagaactgactgggtaatgtatgaatataggctggaggacgaggaaatagctgcttctggtgttaaactggcagattactctgatttggctgtatgtagttcttatatagaagcttggaaactgacaaaaccatcgaaat

SEQ ID NO: 102425 - DNA, 1825 bp, Zea Mays
gagtaagaagaaagagggcggcggcacggcagagccaaagccgaggcgagccgagcagtacatgcatcccgcttcccgcattcctcatcgaggtccggtccagcagccttttgcgccttcgtgtccctcccctccactccctcaccgggggctgggctggtggggagtggggactgggggcagtcgccacgccgcagtccattctttcgtcacccatcgcagctccaacacctctcgctagtcgtcatggcggcttccgcggcagcgttccccctcccaccgccgacgcctcctcttcgactttcacatgtcttttgatatcacagaaaaggattgcccctgccttcactgctgtgaatgccagggacgtttctgtcgccctacaatatatggacattggacttgatagttggcaaactttcttctatatactggacgttccagctttcgccaacctgctgctttaaccacatcttttccttctttcccgattttgcctctcactatcatcaattaccgctaaaagtgaaacaagtgttctccctatggccaagacatcacttcctcctggattccggtttcatccaactgatgtagaactcacagtctactatttaaagaggaaactactgggaaaacacttacgctgcaatgctatcactgagattgatctatacaagttcgccccttgggatcttccaggctggaggacgaggaaatagctgcttctggtgttaaactggatgcctgcgttctatgcaaaatctttcagaaaagtggcccagggcccaagattggcgcacagtatggtgccccattcaatgaagaagactggaacgatgccagtaatgtagagtgttctccatgtgtgccttctgtggccccttgcgcacctgaatcaagtcgtggtgggttgaattctgctggtcaacgcctggctgtgagttatgatgtcaaggtttccttgggctcctcggcagaaggtatcaacagacctgctgtcaatggagttcatcctgtcagaccttctcctgatgctcctaatgactgcatacacattcaattgctggctgaggttatgagatgttcctcaacctcaatgcatgttttacgtactgctggtgacgatggtttgctggctgattcaactgctgactacagtagtgataatagaatatctttggatgctattgaaactatattctgtgaagtggatgagcttgggccccaggctatggtgaacaatactaaccattgtgactcatgcggtgagtatttgattcaccctacgatggtggcacgaggagctgaacagtacttagagctaaatgacctgtccttttcgctcaccgatggtcctgattcctgtggcgtgcttttctctaatggtgtatctgttgagcaactaccggatcttgagctcaggtttgagcagttctctcctgaccacatctccaataccgctattgcttccacatcaacaacggttggttcatctgcttcagtgcccttattggaggatcacaggacctgattcagaattggagtcatctggcgcacatgttaattgaatctaggaggatctgcaggacaaaggcataatgctccctttttttcaattttcatgaagttagaatttttttttggatgaaggcacggattagtgaccacttggcacagaaatatgtttgtgttgcggcttgtgaatccaggaccatttctctgcctgtagttttgcatggtagaactagatgggcaacaacaaaatgtgttcagtattgaataacgcactcactgcattaactactttgcctagcttagtata

SEQ ID NO: 102426 - DNA, 2265 bp, Zea Mays
gagtaagaagaaagagggcggcggcacggcagagccaaagccgaggcgagccgagcagtacatgcatcccgcttcccgcattcctcatcgaggtccggtccagcagccttttgcgccttcgtgtccctcccctccactccctcaccgggggctgggctggtggggagtggggactgggggcagtcgccacgccgcagtccattctttcgtcacccatcgcagctccaacacctctcgctagtcgtcatggcggcttccgcggcagcgttccccctcccaccgccgacgcctcctcttcgactttcacatgtcttttgatatcacagaaaaggattgcccctgccttcactgctgtgaatgccagggacgtttctgtcgccctacaatatatggacattggacttgatagttggcaaactttcttctatatactggacgttccagctttcgccaacctgctgctttaaccacatcttttccttctttcccgattttgcctctcactatcatcaattaccgctaaaagtgaaacaagtgttctccctatggccaagacatcacttcctcctggattccggtttcatccaactgatgtagaactcacagtctactatttaaagaggaaactactgggaaaacacttacgctgcaatgctatcactgagattgatctatacaagttcgccccttgggatcttccagagagagcttccttggagagtaacgatctagtgtggtatttcttttgcccgcgcgataggaaatattctagtgggttaaggactaatcgctcaactggagttggatattggaaagctaccgggaaggacaggccggtggtatataattctaggactgttgggatgaagagaactttagtgtttcatcttggcaagccaccacgaggtgatagaactgactgggtaatgtatgaatataggctggaggacgaggaaatagctgcttctggtgttaaactggatgcctgcgttctatgcaaaatctttcagaaaagtggcccagggcccaagattggcgcacagtatggtgccccattcaatgaagaagactggaacgatgccagtaatgtagagtgttctccatgtgtgccttctgtggccccttgcgcacctgaatcaagtcgtggtgggttgaattctgctggtcaacgcctggctgtgagttatgatgtcaaggtttccttgggctcctcggcagaaggtatcaacagacctgctgtcaatggagttcatcctgtcagaccttctcctgatgctcctaatgactgcatacacattcaattgctggctgaggttatgagatgttcctcaacctcaatgcatgttttacgtactgctggtgacgatggtttgctggctgattcaactgctgactacagtagtgataatagaatatctttggatgctattgaaactatattctgtgaagtggatgagcttgggccccaggctatggtgaacaatactaaccattgtgactcatgcggtgagtatttgattcaccctacgatggtggcacgaggagctgaacagtacttagagctaaatgacctgtccttttcgctcaccgatggtcctgattcctgtggcgtgcttttctctaatggtgtatctgttgagcaactaccggatcttgagctcaggtttgagcagttctctcctgaccacatctccaataccgctattgcttccacatcaacaacggttggttcatctgcttcagtgcccttattggaggatcacaggacctgattcagaattggagtcatctggcgcacatgttaattgaatctaggaggatctgcaggacaaaggcataatgctccctttttttcaattttcatgaagttagaatttttttttggatgaaggcacggattagtgaccacttggcacagaaatatgtttgtgttgcggcttgtgaatccaggaccatttctctgcctgtagttttgcatggtagaactagatgggcaacaacaaaatgtgttcagtattgaataacgcactcactgcattaactactttgcctagcttagtatagtattctggatcttgaggcagggtagaagtgggggtgtgggacaatgtactcacagcttgttgtcatttagcagcaatatcttgtttcggtaacctgtggcaatatcttgtttggttacctggatttgctagtgcccaggcaagatgatgttttcgttgacgccataataataaatagcaatcgattttatttgcaaggacg

SEQ ID NO: 102427 - DNA, 2495 bp, Zea Mays
gagtaagaagaaagagggcggcggcacggcagagccaaagccgaggcgagccgagcagtacatgcatcccgcttcccgcattcctcatcgaggtccggtccagcagccttttgcgccttcgtgtccctcccctccactccctcaccgggggctgggctggtggggagtggggactgggggcagtcgccacgccgcagtccattctttcgtcacccatcgcagctccaacacctctcgctagtcgtcatggcggcttccgcggcagcgttccccctcccaccgccgacgcctcctcttctgaaacaagtgttctccctatggccaagacatcacttcctcctggattccggtttcatccaactgatgtagaactcacagtctactatttaaagaggaaactactgggaaaacacttacgctgcaatgctatcactgagattgatctatacaagttcgccccttgggatcttccagagagagcttccttggagagtaacgatctagtgtggtatttcttttgcccgcgcgataggaaatattctagtgggttaaggactaatcgctcaactggagttggatattggaaagctaccgggaaggacaggccggtggtatataattctaggactgttgggatgaagagaactttagtgtttcatcttggcaagccaccacgaggtgatagaactgactgggtaatgtatgaatataggctggaggacgaggaaatagctgcttctggtgttaaactggatgcctgcgttctatgcaaaatctttcagaaaagtggcccagggcccaagattggcgcacagtatggtgccccattcaatgaagaagactggaacgatgccagtaatgtagagtgttctccatgtgtgccttctgtggccccttgcgcacctgaatcaagtcgtggtgggttgaattctgctggtcaacgcctggctgtgagttatgatgtcaaggtttccttgggctcctcggcagaaggtatcaacagacctgctgtcaatggagttcatcctgtcagaccttctcctgatgctcctaatgactgcatacacattcaattgctggctgaggttatgagatgttcctcaacctcaatgcatgttttacgtactgctggtgacgatggtttgctggctgattcaactgctgactacagtagtgataatagaatatctttggatgctattgaaactatattctgtgaagtggatgagcttgggccccaggctatggtgaacaatactaaccattgtgactcatgcggtgagtatttgattcaccctacgatggtggcacgaggagctgaacagtacttagagctaaatgacctgtccttttcgctcaccgatggtcctgattcctgtggcgtgcttttctctaatggtgtatctgttgagcaactaccggatcttgagctcaggtttgagcagttctctcctgaccacatctccaataccgctattgcttccacatcaacaacggttggttcatctgcttcagtgcccttattggaggatcacaggacctgattcagaattggagtcatctggcgcacatgttaattgaatctaggaggatctgcaggacaaagctggacaagagaggtttaggaccttgaccagctcttactacagaggggcacaggggatcattatggtgtatgatgtcagtcgacgagagacgttcaccaatctttctgatatatgggccaaggaaattgacctgtattcaaccaaccaggactgtgtaaagatgcttgttggaaataaagtagacaaggaaagtgagagggctgtcacgaaaaaggagggaattgaatttgccagggaatacggttgtttgtttctagaatgcagtgcgaaaacaaaagtaaacgtagaacagtgttttgaggaactggttctaaagatcttagacacgccaagcctcctggcggatgcttcctcagcaggggtcagcaagaagaacatcttcaagcagaaggctccagaagctgacgccgccacaggcagctgctgttaacatggttttggtcctgtatattgctatatgtggtgaagacaattggcagcagctatataatgatgtatcaagttaaacttacctgacaatatgtagtcttgcctcccaaccgcagctaagtagcagaggcacgggtgggtggcatcaataccggcatgatacagtatcagacactgtcatctatataagaaacagccatacttcggttcgttggttgcctaagctcgctactccaagtatctcggtggttggccttgcgcttctactggtggacagcaatatcaacatgtctatatgtgacagaaaacagcctcacttctatttatttgtgccgtgcagtcgtgcagatgatatttcatctcaatccacaataacacatcttgtggaagcagattacgtttgagctaattgtggacgaataaagattaatggactctaaccatcaattagctattact

SEQ ID NO: 102428 - DNA, 535 bp, Zea Mays
gtgtgttgataagaaacccggctaagcaagctggttgccattttgcagattggagtcatctggcgcacatgttaattgaatctaggaggatctgcaggacaaaggcataatgctccctttttttcaattttcatgaagttagaatttttttttggatgaaggcacggattagtgaccacttggcacagaaatatgtttgtgttgcggcttgtgaatccaggaccatttctctgcctgtagttttgcatggtagaactagatgggcaacaacaaaatgtgttcagtattgaataacgcactcactgcattaactactttgcctagcttagtatagtattctggatcttgaggcagggtagaagtgggggtgtgggacaatgtactcacagcttgttgtcatttagcagcaatatcttgtttcggtaacctgtggcaatatcttgtttggttacctggatttgctagtgcccaggcaagatgatgttttcgttgacgccataataataaatagcaatcgattttatttgcaaggacg

SEQ ID NO: 102429 - DNA, 504 bp, Zea Mays
aagaaaagggaagggccccatctacgcccgccctcgtgtacctggagccgtcggcttccgccagcgcccagctggaggtctcgctgttcccttcacgatacgcccccccaaagcggatcaaaccctagatctcgtcttgtcgccccgttcctccgatcccatcctatccgatcctcatggattcctcctcgtccagcctcagccagcagcccgagttcgactacctcttcaagctactccttatcggcgactccggcgtcggcaagagcagcctcctcctccgcttcaccgccgactccttcgatgacctctcccctaccataggtgttgacttcaaggtgaagatggttagcattggtggcaaaaaactcaagcttgccatctgggacacaggtaccaaaccattgtcttaataacaccagcatggttctttttctttacatttttttagattaaggaacacaatgattccagcataccccattcattcatgaatgagtacag

SEQ ID NO: 102430 - DNA, 1282 bp, Zea Mays
aagaaaagggaagggccccatctacgcccgccctcgtgtacctggagccgtcggcttccgccagcgcccagctggaggtctcgctgttcccttcacgatacgcccccccaaagcggatcaaaccctagatctcgtcttgtcgccccgttcctccgatcccatcctatccgatcctcatggattcctcctcgtccagcctcagccagcagcccgagttcgactacctcttcaagctactccttatcggcgactccggcgtcggcaagagcagcctcctcctccgcttcaccgccgactccttcgatgacctctcccctaccataggtgttgacttcaaggtgaagatggttagcattggtggcaaaaaactcaagcttgccatctgggacacagctggacaagagaggtttaggaccttgaccagctcttactacagaggggcacaggggatcattatggtgtatgatgtcagtcgacgagagacgttcaccaatctttctgatatatgggccaaggaaattgacctgtattcaaccaaccaggactgtgtaaagatgcttgttggaaataaagtagacaaggaaagtgagagggctgtcacgaaaaaggagggaattgaatttgccagggaatacggttgtttgtttctagaatgcagtgcgaaaacaaaagtaaacgtagaacagtgttttgaggaactggttctaaagatcttagacacgccaagcctcctggcggatgcttcctcagcaggggtcagcaagaagaacatcttcaagcagaaggctccagaagctgacgccgccacaggcagctgctgttaacatggttttggtcctgtatattgctatatgtggtgaagacaattggcagcagctatataatgatgtatcaagttaaacttacctgacaatatgtagtcttgcctcccaaccgcagctaagtagcagaggcacgggtgggtggcatcaataccggcatgatacagtatcagacactgtcatctatataagaaacagccatacttcggttcgttggttgcctaagctcgctactccaagtatctcggtggttggccttgcgcttctactggtggacagcaatatcaacatgtctatatgtgacagaaaacagcctcacttctatttatttgtgccgtgcagtcgtgcagatgatatttcatctcaatccacaataacacatcttgtggaagcagattacgtttgagctaattgtggacgaataaagattaatggactctaaccatcaattagctattact

SEQ ID NO: 102431 - DNA, 1785 bp, Zea Mays
ggactgggctgcaaaaggaaaaggagccgaggaagccctcccctctcgccgcagccgcaccaccagaccgacaaccggccggcttccctcgcccccggcgaggagtgaagacaagccgacaaggcaaaaccatcgcctgtacggtatccaaccgccgtcccgccgcacaaccaaggatagggcgggagagggggatctcgctttcgctccgctgccgcatgcgcaccgcccctcctcatgacaccaactagggcaccaccagcccccttctcgtcgacctccgcgcggtgactctgctgagcatcatacccttatagggcccgacccatggatgtaacttcgaccgctgccgcctccgcctcaggcgggggtaggtggtacacgggcatgtccgcggataacatcaagggcctggtgctcgcgctctcctccagcctcttcatcggcgccagcttcattatcaagaagaagggactcaagaaggccgcatcctccggcgtcagagcgggggttggtggctattcttatttatatgagcctctttggtgggttggcatgataacaatgattgttggagaagttgcaaatttcgcagcttatgcatttgcaccggctattttggtcactcctctcggtgctcttagcattattatcagcgctgtgcttgcacatgtaatgctgcgggagaagctgcacatatttggaattcttggatgcgcgctatgtgttgtgggatccaccacaattgtccttcatgctccaccagagcgtgaaatcgagtcagtgacagaagtgtgggatctggctacggaaccagccttcatgtgttatgcagcagtggtaattgctatagctgccatacttgtttatcggtttgtcccactttatgggcagacacatgtcatggtctacataggtgtttgctctctcgttggttccatctcggtcatgagcgtgaaagctcttggtatagcattgaagctgaccttttcaggaacgaaccagcttatttacccacagacatgggcttttagtctggttgtcatctcatgtatcattacccaaatgaattacttgaacaaggcacttgacacgtttaatacagcagttgtgtcacccatttattataccatgttcacatctttaactatcttggcaagtgtcatcatgttcaagggcactaaatagtgattgagccagtgttccaaatccaatttcaaatggagatttccttggattgcattagactaaactgtaaaagaagcagtatgagcctgagcttcagctttcaggcatagcccgcgaatacttctagttggaacacatgagaagagaccacttagttccattttgtatctgtggtgcgcaggactgggacaggcaaaatcctacgcaaattgtgactgagatgtgtggctttgttacgatcctttctggaacttttcttctacataaaacaaaggacatggctgatggtgggctttcgatgtcatcctccttccgtcttcctacatcttcttcggtgcgcttctccaaacaaacagatgaagatggtgaaggaattcctctaagatcgtccgaatcattccggtcaccacattaacgcatgtttgctaatcattaatttgcacagagttaggggtgggtattatatagataatgctatcagtgagcttgtactaagggtacgatggatggaccctcttttgctttggcagaattgtatatgtatgcccaacatcttgtggaactcccaatatatttctcttggctgtcgtgtgtgat

SEQ ID NO: 102432 - DNA, 1776 bp, Zea Mays
ggactgggctgcaaaaggaaaaggagccgaggaagccctcccctctcgccgcagccgcaccaccagaccgacaaccggccggcttccctcgcccccggcgaggagtgaagacaagccgacaaggcaaaaccatcgcctgtacggtatccaaccgccgtcccgccgcacaaccaaggatagggcgggagagggggatctcgctttcgctccgctgccgcatgcgcaccgcccctcctcatgacaccaactagggcaccaccagcccccttctcgtcgacctccgcgcggtgactctgctgagcatcatacccttatagggcccgacccatggatgtaacttcgaccgctgccgcctccgcctcaggcgggggtaggtggtacacgggcatgtccgcggataacatcaagggcctggtgctcgcgctctcctccagcctcttcatcggcgccagcttcattatcaagaagaagggactcaagaaggccgcatcctccggcgtcagagcgggggttggtggctattcttatttatatgagcctctttggtgggttggcatgataacaatgattgttggagaagttgcaaatttcgcagcttatgcatttgcaccggctattttggtcactcctctcggtgctcttagcattattatcagcgctgtgcttgcacatgtaatgctgcgggagaagctgcacatatttggaattcttggatgcgcgctatgtgttgtgggatccaccacaattgtccttcatgctccaccagagcgtgaaatcgagtcagtgacagaagtgtgggatctggctacggaaccagccttcatgtgttatgcagcagtggtaattgctatagctgccatacttgtttatcggtttgtcccactttatgggcagacacatgtcatggtctacataggtgtttgctctctcgttggttccatctcggtcatgagcgtgaaagctcttggtatagcattgaagctgaccttttcaggaacgaaccagcttatttacccacagacatgggcttttagtctggttgtcatctcatgtatcattacccaaatgaattacttgaacaaggcacttgacacgtttaatacagcagttgtgtcacccatttattataccatgttcacatctttaactatcttggcaagtgtcatcatgttcaaggtatgtgtctcaattactgtagcttatcgtttcagctttcatactttggttgtgaaatttgagcagggcactaaatagtgattgagccagtgttccaaatccaatttcaaatggagatttccttggattgcattagactaaactgtaaaagaagcagtatgagcctgagcttcagctttcaggactgggacaggcaaaatcctacgcaaattgtgactgagatgtgtggctttgttacgatcctttctggaacttttcttctacataaaacaaaggacatggctgatggtgggctttcgatgtcatcctccttccgtcttcctacatcttcttcggtgcgcttctccaaacaaacagatgaagatggtgaaggaattcctctaagatcgtccgaatcattccggtcaccacattaacgcatgtttgctaatcattaatttgcacagagttaggggtgggtattatatagataatgctatcagtgagcttgtactaagggtacgatggatggaccctcttttgctttggcagaattgtatatgtatgcccaacatcttgtggaactcccaatatatttctcttggctgtcgtgtgtgataa

SEQ ID NO: 102433 - DNA, 1637 bp, Zea Mays
ggactgggctgcaaaaggaaaaggagccgaggaagccctcccctctcgccgcagccgcaccaccagaccgacaaccggccggcttccctcgcccccggcgaggagtgaagacaagccgacaaggcaaaaccatcgcctgtacggtatccaaccgccgtcccgccgcacaaccaaggatagggcgggagagggggatctcgctttcgctccgctgccgcatgcgcaccgcccctcctcatgacaccaactagggcaccaccagcccccttctcgtcgacctccgcgcggtgactctgctgagcatcatacccttatagggcccgacccatggatgtaacttcgaccgctgccgcctccgcctcaggcgggggtaggtggtacacgggcatgtccgcggataacatcaagggcctggtgctcgcgctctcctccagcctcttcatcggcgccagcttcattatcaagaagaagggactcaagaaggccgcatcctccggcgtcagagcgggggttggtggctattcttatttatatgagcctctttggtgggttggcatgataacaatgattgttggagaagttgcaaatttcgcagcttatgcatttgcaccggctattttggtcactcctctcggtgctcttagcattattatcagcgctgtgcttgcacatgtaatgctgcgggagaagctgcacatatttggaattcttggatgcgcgctatgtgttgtgggatccaccacaattgtccttcatgctccaccagagcgtgaaatcgagtcagtgacagaagtgtgggatctggctacggaaccagccttcatgtgttatgcagcagtggtaattgctatagctgccatacttgtttatcggtttgtcccactttatgggcagacacatgtcatggtctacataggtgtttgctctctcgttggttccatctcggtcatgagcgtgaaagctcttggtatagcattgaagctgaccttttcaggaacgaaccagcttatttacccacagacatgggcttttagtctggttgtcatctcatgtatcattacccaaatgaattacttgaacaaggcacttgacacgtttaatacagcagttgtgtcacccatttattataccatgttcacatctttaactatcttggcaagtgtcatcatgttcaaggactgggacaggcaaaatcctacgcaaattgtgactgagatgtgtggctttgttacgatcctttctggaacttttcttctacataaaacaaaggacatggctgatggtgggctttcgatgtcatcctccttccgtcttcctacatcttcttcggtgcgcttctccaaacaaacagatgaagatggtgaaggaattcctctaagatcgtccgaatcattccggtcaccacattaacgcatgtttgctaatcattaatttgcacagagttaggggtgggtattatatagataatgctatcagtgagcttgtactaagggtacgatggatggaccctcttttgctttggcagaattgtatatgtatgcccaacatcttgtggaactcccaatatatttctcttggctgtcgtgtgtgataactgatgaaggatgcgtaatttatggctgccatcagccatcagg

SEQ ID NO: 102434 - DNA, 1776 bp, Zea Mays
aaaaggaaaaggagccgaggaagccctcccctctcgccgcagccgcaccaccagaccgacaaccggccggcttccctcgcccccggcgaggagtgaagacaagccgacaaggcaaaaccatcgcctgtacggtatccaaccgccgtcccgccgcacaaccaaggatagggcgggagagggggatctcgctttcgctccgctgccgcatgcgcaccgcccctcctcatgacaccaactagggcaccaccagcccccttctcgtcgacctccgcgcggtgactctgctgagcatcatacccttatagggcccgacccatggatgtaacttcgaccgctgccgcctccgcctcaggcgggggtaggtggtacacgggcatgtccgcggataacatcaagggcctggtgctcgcgctctcctccagcctcttcatcggcgccagcttcattatcaagaagaagggactcaagaaggccgcatcctccggcgtcagagcggatacccacgcacatgacatctctgacttatgcccaaaatcgagaaggcttatgtcatgttatatctcggacgccccacccctcctacaggattttatatcgcaatttcaggcctcatttgtactcttaccctgaggcgtctgtctatttatactagcaaactgcagtattaatgttccatgttattgttatgacaggggttggtggctattcttatttatatgagcctctttggtgggttggcatgataacaatgattgttggagaagttgcaaatttcgcagcttatgcatttgcaccggctattttggtcactcctctcggtgctcttagcattattatcagcgctgtgcttgcacatgtaatgctgcgggagaagctgcacatatttggaattcttggatgcgcgctatgtgttgtgggatccaccacaattgtccttcatgctccaccagagcgtgaaatcgagtcagtgacagaagtgtgggatctggctacggaaccagccttcatgtgttatgcagcagtggtaattgctatagctgccatacttgtttatcggtttgtcccactttatgggcagacacatgtcatggtctacataggtgtttgctctctcgttggttccatctcggtcatgagcgtgaaagctcttggtatagcattgaagctgaccttttcaggaacgaaccagcttatttacccacagacatgggcttttagtctggttgtcatctcatgtatcattacccaaatgaattacttgaacaaggcacttgacacgtttaatacagcagttgtgtcacccatttattataccatgttcacatctttaactatcttggcaagtgtcatcatgttcaaggactgggacaggcaaaatcctacgcaaattgtgactgagatgtgtggctttgttacgatcctttctggaacttttcttctacataaaacaaaggacatggctgatggtgggctttcgatgtcatcctccttccgtcttcctacatcttcttcggtgcgcttctccaaacaaacagatgaagatggtgaaggaattcctctaagatcgtccgaatcattccggtcaccacattaacgcatgtttgctaatcattaatttgcacagagttaggggtgggtattatatagataatgctatcagtgagcttgtactaagggtacgatggatggaccctcttttgctttggcagaattgtatatgtatgcccaacatcttgtggaactcccaatatatttctcttggctgtcgtgtgtgat

SEQ ID NO: 102435 - DNA, 1379 bp, Zea Mays
aagtttttaggttgaattggttaatgcgtccactctaacacttaacatactgtctcttctgtgaaattcttttgcagtgattgttggagaagttgcaaatttcgcagcttatgcatttgcaccggctattttggtcactcctctcggtgctcttagcattattatcagcgctgtgcttgcacatgtaatgctgcgggagaagctgcacatatttggaattcttggatgcgcgctatgtgttgtgggatccaccacaattgtccttcatgctccaccagagcgtgaaatcgagtcagtgacagaagtgtgggatctggctacggaaccagccttcatgtgttatgcagcagtggtaattgctatagctgccatacttgtttatcggtttgtcccactttatgggcagacacatgtcatggtctacataggtgtttgctctctcgttggttccatctcggtcatgagcgtgaaagctcttggtatagcattgaagctgaccttttcaggaacgaaccagcttatttacccacagacatgggcttttagtctggttgtcatctcatgtatcattacccaaatgaattacttgaacaaggcacttgacacgtttaatacagcagttgtgtcacccatttattataccatgttcacatctttaactatcttggcaagtgtcatcatgttcaaggactgggacaggcaaaatcctacgcaaattgtgactgagatgtgtggctttgttacgatcctttctggaacttttcttctacataaaacaaaggacatggctgatggtgggctttcgatgtcatcctccttccgtcttcctacatcttcttcggtgcgcttctccaaacaaacagatgaagatggtgaaggaattcctctaagatcgtccgaatcattccggtcaccacattaacgcatgtttgctaatcattaatttgcacagagttaggggtgggtattatatagataatgctatcagtgagcttgtactaagggtacgatggatggaccctcttttgctttggcagaattgtatatgtatgcccaacatcttgtggaactcccaatatatttctcttggctgtcgtgtgtgataactgatgaaggatgcgtaatttatggctgccatcagccatcaggaacattgagtgctgtggaacctcttcacttgagctactgggaagtaagtaccttccaacgatatactgcatcagcaatgggaagaaaaaatggcaacaaacaggaacatgtattcagagcagagcctatgcatggtttcattcatccccaccacatgaacatgaattcggtacaaaagacagggaatgcggaaaaagatagagcgagacggggagtgactggattgacga

SEQ ID NO: 102436 - DNA, 1633 bp, Zea Mays
atgatcgagactgcagttcaagtgattgaggcccatgtctacatcattcgcaatcttgtaactgatggggttgtcgaaactactttacctgagtcggtctacacacttaagactgcgttgtttcagattggagatgtttgcgacaagcttgagaaagaacaagttgctgaagatcaagaacgtcaattagaacgtgacatcgaagcaacaaatgaggtggactcactatcgagccctgaggacatatctcaaagggaaatattggaaaaaaacatttcagaatcgagtacgatagcgaccaaacttgggggtgtcgatggaaccaaacttaagaaagcagtgacaagaagacttgcaaactacagccaggctgaggatgaggtccttgtgtcggcttacctaaacgtctccaaagatccgactattggaacaaatcaatcagggaagtcctattggcgtcgcataagtgagtactacaatgaacacaagaaaacacataagtcaagaacacaacactcattggaacacaggtcaaagatgcactacaaatgttcgaaggcatccacaacaaacaatttagcttcaatcggttgcccccgcgacccccttccatcgattgcgtggtgtccaaacgtcgtggcgccgacgcccgcgacatccgcggcggccagggggcagcccccgccggcgtctggcgtgggcggcatcttgacgtcctcgtccaaggaggacctcggaggcgacgcgttcgggtcggccgcggcagtcgcagcggcggcggccgccgccgcgggggagcagagccgactggtgttcgttgggaagggcgctgggtacagcttcaacctggaggacctgctgcgcgcgtcggcggaggtgctgggcaaaggcagcgtggggacgtcatacaaggtagtgctggaggaaggcacgacggtggtggtgaagcggctcaaggacgtggcggtgcagcggcgcgagttcgacgcgcacatggaggcactcggcagggtggagcaccggaacatgctccccatccgcgcctactacttctccaaggacgagaagctcctcgtctacgactacctccccaacggcagcctctctgccatgctccacgtattgatttctggtggaggcattgctcatggcataatatttgacatcatgcaagaaagatgcaaatacaaaatacgagatgctacaactatatcttaccgcctttgaaatattttgtggcctcggaaacattccccatgatctaactgtgggtctataaacatcttcatcttcttctgtctcaataacagttgaagggggtgctatcccagccttgtcagcttcatttggtatagtagtcgattgagatgcttcccctaactccccgttgtctaccggttggatttcagttcggcgaggagacttgtcgaatttgctcgggtctccaaatattatgtccacctcaggaaaatcgtcatctcgtaaaggctcaaaagctggagccagcccaggtggtagacctttagaacgttttttctcaaagaagtcgagacccaaaaaatcagcctcatcaaactcgtaccctcctctcttgccaaatgagacttcttcacttgtggcatccaaatggcca

SEQ ID NO: 102437 - DNA, 2804 bp, Zea Mays
atggcgtctccccctcccttcgacctctgcggcgatctcgacgacgacgacatcgatgaacccgtcaccgccgtccccaaggatcgccatctccctgccgccgcccctacgccgaacggcctcaacgaccacctcctccgcttcacccgcagcctccagcgccccacccaaaaccctaaccctagccccaatccgccaccgcctccgcccccagccgccgccgaagaacaagtcgagaaggtcaagctcgccggccgccgccgcctatgcaagcttgccaccaccaccaccgccactcagcgagtggatgaagaggaggcggagtgggacaaccaggacgacggtgaaagcatactcgacatcctagacgacctcaccacacgatttgactctctatccgtccagaagcccagcaccgccgcgaggtccaggacacaacagctcacccctttgccgtgcgccatcaccgtggacgacgacctagatgaccatagcccagatgatgtggatgctcacgccggtgcctcctcaccccttcaaatttctagctctgatgaagctagggctcccaccagacgctccgaggtcaagatcgaaactgatttagtctcctcagcctgtacccattatgcctgtgatgacgtccgtggcaaggggaagaacaaagggaccaccaaggatgttgggaggctaaatagggtatcaaaggcctcatcctttgttgattcttattccgattctgattatgacgactgcgaggaggaccaaggaacaagaacagattatgctgttaagcagctaagaagcaagggattcacaaggagaccacccaacaccccaacattcaggaaccatggtgtcagcgacgatgagctgggtcaggagaaggagaaccttggagctgtggagaacaatgctgaggatgttggatgggagaagacagaggacttcaagatggatccaactggaactgctgcaacatccaagccatacaagctcccaggaaagatattcaagatgcttttcgcccaccagcgcgagggcctccgatggctctgggttctgcactgcaggggaacaggaggaatcctaggggatgacatgggtcttggcaagacgatgcaggttgctgcatttttggctggactgtttcattctcgtctagtcaagagggtgctcattgttgctccaaagacacttctggcccattggacaaaggagctttcaattgttggccttaaagaaaagatcagagactactctggccccagcacaaatattcgcaattatgaactccaatatgccttcaaggagggtggtatcctcataaccacctatgacattgtcaggaacaactacaagctcataagaggcaactcctacaacaacagcaatgatgatgatgatgaggaaggaactttgtggaattacgtaattcttgatgagggacatctaataaaaaataataagacacaaagggcccaaagtttgtacgaaataccttgtgcccatcgcattgtgatcagtggaacacctattcaaaataacttgaaggaaatgtggactctgttcaatttctgttgcccagatgtcttgggtgataaacagcagttcaaaataaggtatgaaacggctatccttcgaggaaatgacaaaaatgctaccgctcgagagaagcacgtaggctcaaatgtagcaaaggaactaagagagcgaatcaagccatactttttgcggcgcctgaaaagtgaagttgtctttgatactggtgcatcagaagaaaaaacattagccaagaagaatgagctaattgtctggctgaagttaacaccatgccagaggaaactatatgaagcttttctaaatagtgagctggttcatttagcattgcagccaaaggcatcaccgttggctgcaatcacaatattgaagaaaatatgtgatcatccactgctattaactaagaaaggtgctgagggtgtgttggaaggaatgggtgaaatgttgaatgatcaagacattggaatggtggaaaaaatggccatgaaccttgcagatatggctcatgatgataatgcactggaagttggtcaggatgtctcatgcaagctatcattcatcatgtccttgttgcggaaccttgttggagaggggcatcatgttttaatattttcacagactcgtaaaatgctaaaccttattcaggaagctataatattagagggctatgcgtttttgcgcattgatggcaccaccaaggtttctgaccgggaaaggattgtgaaggacttccaagagggttgtggagctccagtttttctgctaaccacacaagttggtgggcttggacttacactcaccaaggcaactcgtgtcattgtagttgatcctgcatggaaccctagtacagacaatcaaagtgttgatcgtgcttaccgaattggacagactaaaaatgtgattgtataccgcttgatgacatctgcgaccattgaagaaaagatatacaaattgcaggttttgaagggcgctctgttcaggacagctacggagcaaaaagagcaaacacgttacttcagcaagagtgagattcaagagctatttagtttgccacaacaaggatttgatgtttccctcacacataagcagttgcaagaagagcatggtcaacaagttgttctgtaagagatctgttttcattaaacttcttttagttgcaggacaattaatttgatctggatggtgcagtcttatgtgtcatgttgtagatcattgatggttataataataataataaatttata

SEQ ID NO: 102438 - DNA, 2933 bp, Zea Mays
atggcgtctccccctcccttcgacctctgcggcgatctcgacgacgacgacatcgatgaacccgtcaccgccgtccccaaggatcgccatctccctgccgccgcccctacgccgaacggcctcaacgaccacctcctccgcttcacccgcagcctccagcgccccacccaaaaccctaaccctagccccaatccgccaccgcctccgcccccagccgccgccgaagaacaagtcgagaaggtcaagctcgccggccgccgccgcctatgcaagcttgccaccaccaccaccgccactcagcgagtggatgaagaggaggcggagtgggacaaccaggacgacggtgaaagcatactcgacatcctagacgacctcaccacacgatttgactctctatccgtccagaagcccagcaccgccgcgaggtccaggacacaacagctcacccctttgccgtgcgccatcaccgtggacgacgacctagatgaccatagcccagatgatgtggatgctcacgccggtgcctcctcaccccttcaaatttctagctctgatgaagctagggctcccaccagacgctccgaggtcaagatcgaaactgatttagtctcctcagcctgtacccattatgcctgtgatgacgtccgtggcaaggggaagaacaaagggaccaccaaggatgttgggaggctaaatagggtatcaaaggcctcatcctttgttgattcttattccgattctgattatgacgactgcgaggaggaccaaggaacaagaacagattatgctgttaagcagctaagaagcaagggattcacaaggagaccacccaacaccccaacattcaggaaccatggtgtcagcgacgatgagctgggtcaggagaaggagaaccttggagctgtggagaacaatgctgaggatgttggatgggagaagacagaggacttcaagatggatccaactggaactgctgcaacatccaagccatacaagctcccaggaaagatattcaagatgcttttcgcccaccagcgcgagggcctccgatggctctgggttctgcactgcaggggaacaggaggaatcctaggggatgacatgggtcttggcaagacgatgcaggttgctgcatttttggctggactgtttcattctcgtctagtcaagagggtgctcattgttgctccaaagacacttctggcccattggacaaaggagctttcaattgttggccttaaagaaaagatcagagactactctggccccagcacaaatattcgcaattatgaactccaatatgccttcaaggagggtggtatcctcataaccacctatgacattgtcaggaacaactacaagctcataagaggcaactcctacaacaacagcaatgatgatgatgatgaggaaggaactttgtggaattacgtaattcttgatgagggacatctaataaaaaataataagacacaaagggcccaaagtttgtacgaaataccttgtgcccatcgcattgtgatcagtggaacacctattcaaaataacttgaaggaaatgtggactctgttcaatttctgttgcccagatgtcttgggtgataaacagcagttcaaaataaggtatgaaacggctatccttcgaggaaatgacaaaaatgctaccgctcgagagaagcacgtaggctcaaatgtagcaaaggaactaagagagcgaatcaagccatactttttgcggcgcctgaaaagtgaagttgtctttgatactggtgcatcagaagaaaaaacattagccaagaagaatgagctaattgtctggctgaagttaacaccatgccagaggaaactatatgaagcttttctaaatagtgagctggttcatttagcattgcagccaaaggcatcaccgttggctgcaatcacaatattgaagaaaatatgtgatcatccactgctattaactaagaaaggtgctgagggtgtgttggaaggaatgggtgaaatgttgaatgatcaagacattggaatggtggaaaaaatggccatgaaccttgcagatatggctcatgatgataatgcactggaagttggtcaggatgtctcatgcaagctatcattcatcatgtccttgttgcggaaccttgttggagaggggcatcatgttttaatattttcacagactcgtaaaatgctaaaccttattcaggaagctataatattagagggctatgcgtttttgcgcattgatggcaccaccaaggtttctgaccgggaaaggattgtgaaggacttccaagagggttgtggagctccagtttttctgctaaccacacaagttggtgggcttggacttacactcaccaaggcaactcgtgtcattgtagttgatcctgcatggaaccctagtacagacaatcaaagtgttgatcgtgcttaccgaattggacagactaaaaatgtgattgtataccgcttgatgacatctgcgaccattgaagaaaagatatacaaattgcaggttttgaagggcgctctgttcaggacagctacggagcaaaaagagcaaacacgttacttcagcaagagtgagattcaagagctatttagtttgccacaacaaggatttgatgtttccctcacacataagcagttgcaagaagagcatggtcaacaagttgttctggatgagtccttgaggaagcatatacagtttctggagcaacaaggaatagccggtgtgagtcatcacagcctcctattctctaaaactgcaaccctgcccactctgagtgagaatgatgcactggacagcaaacctcggggcatgcccatgatgccccagcaatattacaagggatcctcatctgactatgtcgccaacgggtaaggatggccatgttctccttctccctgcatgattgtactgtactgttt

SEQ ID NO: 102439 - DNA, 377 bp, Zea Mays
aaaaaataaaatagttaacagaagatgttgtggtttatgtgattttagtattaaagatggcagacaatctttggtctccgcaaaatgagaagggccacatccttcaaccacaattgatggctcaatcaactctccatcagtacagcttcaggagcagatgtaacatggggactggggtgctccagcctcctatgtttttgcacacaatggagaaatatacgaaagaggtacgtcatgatgacgaagaaaaacttgattttaaaggcggaaatgttcatattataacaagcaaagagggttgggaccagaagattgcaggagcaaacagagataagaaaattagcaactccaagagcttacatataaattctagttaa

SEQ ID NO: 102440 - DNA, 930 bp, Zea Mays
gaaatagagagatgaggttgcaaaaaaagtagttttttttctagatctctcacccatttacatgtcccagtcatgcatgaggtttaagctggtaaaggtgatttctcaaaatttgagttagtagttaggcatacaaagtttgagttgtgccccggcctaataccattggtatggtcagacatattttgccaaacagacccccgagtacctttgtatgcctaactggaacctttatttataataatcaaacgtaaaatagtactgtagtatttgacatggacacgtggcgaaattaagtcgaattaccgtgccgccggagacgagcgttagcagcaacgacgcgaccacggcgccgagcatctgcgcgagccagtataccgcggcacggccgaaagagatgcgacggcccacgagcaggccgaacgtgaccgcagggttgacgtgcccacccgacgcgttgctcgctaccgccaccgcggccaccagcgccagcgtgtgcgcgatggccaccgcgagcaggccgcccggcgttgccgtgtccttgtacagcttccctgcaaaattaatcagacgaacgaaaagatcttcaagcaccgcagttcagaacagcaccgaatgcatgcgctgcgtgcatgtgaatcctgaaggtgttttgtttggatgtgtgctaaggttttcgcgcgcgcgtacagaggccgtagacggagccttcggcggcgaacacgaacatggctgtggcgacgaactccgacaccaccgcgcgagtggcgtccggcaggagcggccccgtcccggtggtgtcggcccggcgcgccgggtggcgacctggcagcatgttcgacgatactgtgcctgcctttttcccccgaagctccgaatctgatttctgcagtgttgagtgtcactctccttttcagcgccggaaatgat

SEQ ID NO: 102441 - DNA, 848 bp, Zea Mays
tttaagctggtaaaggtgatttctcaaaatttgagttagtagttaggcatacaaagtttgagttgtgccccggcctaataccattggtatggtcagacatattttgccaaacagacccccgagtacctttgtatgcctaactggaacctttatttataataatcaaacgtaaaatagtactgtagtatttgacatggacacgtggcgaaattaagtcgaattaccgtgccgccggagacgagcgttagcagcaacgacgcgaccacggcgccgagcatctgcgcgagccagtataccgcggcacggccgaaagagatgcgacggcccacgagcaggccgaacgtgaccgcagggttgacgtgcccacccgacgcgttgctcgctaccgccaccgcggccaccagcgccagcgtgtgcgcgatggccaccgcgagcaggccgcccggcgttgccgtgtccttgtacagcttccctgcaaaattaatcagacgaacgaaaagatcttcaagcaccgcagttcagaacagcaccgaatgcatgcgctgcgtgcatgtgaatcctgaaggtgttttgtttggatgtgtgctaaggttttcgcgcgcgcgtacagaggccgtagacggagccttcggcggcgaacacgaacatggctgtggcgacgaactccgacaccaccgcgcgagtggcgtccggcaggagcggccccgtcccggtggtgtcggcccggcgcgccgggtggcgacctggcagcatgttcgacgatactgtgcctgcctttttcccccgaagctccgaatctgatttctgcagtgttgagtgtcactctccttttcagcgccggaaatgat

SEQ ID NO: 102442 - DNA, 1065 bp, Zea Mays
atgcagagcgggagcgggagcgggagaaggcggcggtcacgctcgtttcttccggtaaatgctagggagaggcgaaaacgacagggcggcggagttggctcaacgctggagtcgaggcagcgaccaacctcggaaggaaacttcgacccgagttcgactagcaccggcggtccggcgcgtccccggctcccagcctgcctgccagtgccaggtgccagccatccgatcttcgcttggccacggaactctgtgggccgaacaccaatacccgaggtgggcaggtttctcaatgggccccaaattctcccgcggcttctctcttcttgtcttcccctaaacgtcgctcgccgcttttcgctatttctcggggagcgtgtgttccagttcctgccttgcaggccgccgagatggtgggaccgtgggaggcggcaaaccgatggaggacagcgtcacgcgggccacgcggctttcggtgcggcagcgatcagcgcctccgccgtcgccgtgcaccccctcgacacggttaagcactcctccagcttccaggcgagcgcactcacccacctcacctccttgtgttgctgtactgttgctttctcaaggtctaattttggtatctgcgcggtgtttccttgcatctgcagctgggctccggcagttggtggaccggctcaggccgcttctggccctgtaggtttttacagtggcattggatggtccataatgggtaaacttcctgggttgggagcacattttgtgacctatgaactgttaacagatggaagggaggacaactatgtctattattctgaggctatgttggctggcatagttgctggtgctgtagagactgttttctgcacaccatttgaacttttcaaacttcgaaagctagttagttttgtgattccttcaaaagctatgggccctgcaaatgttgttaaggatcatttccagtggttttcaactgttgctgggtatgttcttgatataacggtgtggaacaacacggcgggccttttatctgatctttctccaagcatcccgacatgttgggtgctctga

SEQ ID NO: 102443 - DNA, 1159 bp, Zea Mays
caccctcctcctcccatttggagcacggagctcgagcaactaacaacccaccagccaccacgcacagcagcagctagctagctagcaaccacctcgatcgcacagaggccggaagctcagccgcgaattcggcaagcaacaaggagaagtcttgggttcctcgccacctctcgatcggtcaggcggatccaagaagagatggagaagaaggcaggacgcgagcatgtgatcgggatcccagtgaacaacagggccttcggcatcgaggagccggatttctccagcaaaggcgccgccaggaacgcagccgccgcgggacgggctgcaaagtccggctggacgaccggggacagggtcgctcaaggcctgaaagaacacgtggctctggggccaaacctgtacgagaccgtgaggggcaagctgtcgctgggggcgaggatcctccgggcaggcggcgtggagaaggcgttccgccggtggttctccgtcgtcggcaagggcgagaggctcctcagggcctcgcagtgctacctgtccaccaccgccggcccgatcgccggcacgctcttcgtgtccacggagaggatcgcgttccggagcgaccgctcgctggcgctgacctctcccaagcgcggcacggtggtgctggtgcgggtgccgtacaaggtctccatcccgctgggcagggtcaagacggccacgccgggcgggaacaaggaccggccggaacagaagtacgtgcaggtcgtcacggacgacggcttcgtgttctggttcatgggcttcgtcaggtaccaggtgtccctgcacgaactggagaaggccatcaagcaggcgcaggcgcaatgacctgaggcgaacgttcgccgacccctgttcggcggcctcgcgttgtgcttaatttgtggtctgcatcatctgtgtgcatatgtagtagggttcagttttcttgatggattgcttggcgtttttggcatttgagcaagtccggtataccgaatgtataggagaagaagtattagattaattacgtaattggtgatgttgagtaaatcttctacggtgccaaggtaaaagcggctcgtctgaagtttacatgtggaatgaaaaacaggcacaaagtatttgtgcgacaaaataaattgtgtcaattctttta

SEQ ID NO: 102444 - DNA, 1003 bp, Zea Mays
atggcgccctcggcagctgcactccggtaccaatccgcgattattccttgcacgctaaggcacggctctagaagtgtagaactagccatgatgaagaagtcgagcagcggccatgtcatcggggtcccggtcatctccaaggcgtacgggatagaggaggaggcgtccagggatccgtcgtccttcagcaagggcggcgacgtcgacgccgatcaccttgctgtctcgttcacgcaccccagcccttacgcgtctttcggctacaagcacagcagcagcaaccactgggtgagcaagctgagcagaagggcgcaaggcttcagagagcatgtgaccttgggcccgaagctgtcggagacggtgaaggggaagctgagcctgggcgcgcggatcctgcaggccggcggggtggagcgcgtgttccgccaggccttctccgccgccgacgacgacaagcagggggagcggctgctcaaggcgctgcagtgctacatctacaccaccggcgggcccatcgccggcatgctcttcgtctccaccaggaaggtggccttccgcagcgaccgccccgtcaccgtcgtcacctcctcctcctccccggccggggtcgtgcgcggcacggcgcgggtcacctacaaggtggtcgtcccgctccggaggatccgcagggtgcggcccagcgagaacgtccaccggccggaggagaagtacgtccacgtcgccaccgtggacggcttcgagttctggttcatgggcttcgtcagcttccagaggtcgtgcaggtgcatgcagcaggccgtctcggaggtgcagacgcaatgaatgaggatgttatgggctgggctgccatgtcggcacgatgtgaagagagaggatgttatgggcttgcttcgccgtcttttgttgccaagcagccgtagctaggattgccctgtctaatttagggtcggtgcaatcgagttccttccgcgtacgatattggaccaacatccgtgttgttcca

SEQ ID NO: 102445 - DNA, 1263 bp, Zea Mays
attcgaacccagtcacagagacacacttgacactactgttctcctcatcctacgtacgcactgtttcatttcagccatgcccatgagcatcccccgcgcggcgcacctccttgtgctcctctccgttctagccatctccctctcgtcgtgcggcgccgccgcagcgttgccggtgtacgacacggacggccacgagctgagcgccgacgcggactactacgtcctcccggcaccgccccgcgggagcggcggcggcggcggcgggctcaccatggcccccaagggcctgcacccgtgcccgctcttcgtcgcgcaggagacggacccgctccgcaagggcttccccgtgcgcttcgcgccgctgcagcaggaccagggtggcagcgaccgcgccgtgcgcgtctcctccgacgtcggcgtccacttcgccgccgcgacgacgtgcgtgcagaccaccgagtggcacgtctccggcgacggcgccgcgccgcggtcgggccgtcggctcgtcctcaccggcccggtcctgtcctcgagcccgaacggacgggagaaggtgttccgcgtcgagaagcacagccgcgggtacaagctggtgtggtgcgggggctccagcgcgtcgacgtcgtgccaggacctgggcgtgttcagggacgatggggaccgccgcgcgtggctcggcaccaccgagaccgaccgggctcatgccgtcgtgttccagaaggacaccaccatgcatgcttgatgcggtgcttcgtttcgtatgcgtagtgcgtagcagttgctcttgctcaactcgactctggtttacaaatagtttgccaaaatagcttaaactccgccaacagagaccgtacgtgaagctaaaaaacagctctgccggtgaattggagctatgacaaacagagtctaatacctctgttcgcctgaggttcaaactttcagcacttctctcgcgttcgtgacacactgaactggtttcgttgtcttgcagctagacaatttaggcaattaaaaaatggccacggtggaaaaaaaaatcactacccaggctcagctgcatttgaatgtccagcaactaaagcctcatgtctgcaggtccaggacccaggatgcctttctcagggtctatgggaagcacatccgcatgcgagcgtctcccatcttccactgacgcctgctgtggctggagccactcctgctgttcagtcaaagtgttagaccaacaacatttccaatgaaacagaaaataaaaacatacaa

SEQ ID NO: 102446 - DNA, 3168 bp, Zea Mays
atgcggcatatagtaattgaccagaaatcaaatgatactccacaaccagctgttgcgatagtccacactaacaagccaacaccaataagcctgaaaggattatatctgcagagaagggatataactggttggaaaactgaactgatagcattccaaaaggttgggataggggggggagagagaagggagcatgaaacagctccgtccaggactggtgggcggaccaaacaggatcgctggcgcgcggactgtggcggatcctgcagctccgctgggagcgtccctgctggcccttccttccgcgacgtggtcctgcgctcctggccctcttctccggccagtcggactcccaggtctgagccacgggcgtcgcggtgtagggagctccgggctgcggctcttcagccgtcggtcgtggggggcactgtgaaggacgccggcgctgctgatggatggaagactgttgagtcccggcgctccaggcggctgcgcctgaaggctgccaatttccagcgcactgcacctaccaatctctccggcaggtgcttcaactgcttctcccataatcacctggtacgtgactgtcgttcaaggacaagatgcttcaagtgctgtgggcttggacataaggcatcccggtgctcggaggctccagatcgtgctcagatttccacagctgttcccaagcagtcggtgtggtcacgtcttggtggtgtcgccccaggcaaagcttctgtctggtcccgtcttcgaaagcagcaacctcctgggaacttgcagtctgtctggagcagactttcccctccgtcttctggtggtttgtgcctgacgaagcgatctattcaacctgcagcgcctcggaaggtttggcgtaggaagacttcggtggctgcaacttcaggcagccagtatttgtctccagaaatggtttctgaccttgctgggggtgctgatgccgtcaatattaggggccgctctcgccggcgtcactctcgcaagagacggaaaccacccacccctcccagagatgatgggagcaggatttgtttgcagccccatctgccttcttcaggactcgtacccccatgtttgctaggttggagccacgccatgactgttgccgaggaagatcttcgtttggcagtggttgtctcggtgatcagcaaccgtgactcagtttctgaattcgaagtggcatccctgctctcaccaagattggaaatcactgaagactcccttgttctccgtcgcttatcaccaagtagttttctgctggttctcccgtctgaagacatggctcaaaggctcgacacgaggtggtccattcagcgggctgcaactttcacagtggtctgcaagcgatggtctagatttttcaactcttctggcagaacccttcctcagctggttaacctggaattagatggcatcccagtgcacgtgtgggagacggctacggtggagcatttaataaatccatttgcttggctatttaaggtgcactcagatacctctggcctgagtgacctggtttccttcagatgttctgcctggtgcattgatacatccatgattccggagtcacgggagctctggattactgagcctctgcaggcacctactggagattcgcaaggagtcatttctctgggttatacagtgaagatcagatggtctatttcttctttagctgctgctgctcctttggtctctgcctcaccgtcgtcgccccgtgatcatgatgatggccctcggtcataccggcggttccggtcacactctccacgtgggcgaccacgggatggcatcaatgctagcaatcttgaggagctgggacagcaacgtcgttcagccaaagatagactgggtcccagatgcttggattccaaacaaacgaatcatatcccttctgatttggacaattctgtggatggcccttgctgcgatctcaacggagaacaccgtgcgggcctagagactccccacggggatgactcggctccggtgcacattgaagagcaagcccaacatgctgttttttctgatcaaatggactgcattctctttgggcagcagaatttcactggagatttgtgcttggttccaaatctcattcaccgtgcgggccttgaggctcccttcggagaggcttcggctccggtgcacattgaaaaccaatgcagcgaccacactactgaacaccgtgcgggccttgagaatccccacggggatgactcggctccggtgcacactgaagagcaagctcaacatgctgttttttctgaccagtcgaactgcaatcctagtgggcagcagagtattactagagaattgtgctcggttccaagtaccaaacaccgtgcgggcctggaggctcccttaggagaggcctcggctccggtgcattttgaggaacattcccatcagcattgtttccaaagacaggccgctgcaacatcagaaagaaggctcatagaggcaccaagcctgctcgtttatcatagaaaaaagaagcataataagccgctagttgaaattgctgaagaaacaacggaaaataatattattccagccctgcagatggaaggcacggaccctgtaacagccaaaaaagaggtattccttaaacaaattgtggaagaagtctctggtattctgccagcaccagcaattccaggcacggactctgatgaaaatgcagtgcccacggcgcgagaggtcagcctggcagttactactgatgatagtcagtcagctttacaggagacccaaacaaacagtacacagcccatgaacaaacaattcctggataaactttccaaaaagatctcaggccttcttgcaacaccaggggaccccccttttatgacgttgaaaaatgcccaaattgcagaaattatcccacgccgcagccgtcgaattgctggcgtgggagttgaatttgacaagatggacttatcttcaagaaccacaaagaaagtcatgcaggccttgaaagtgattggggaccctggggcagtcacccagcaagccagagaagactatctgaaagtgttctccactgaacttcctgtttcacatattgaggcgctggcgtccttttttggatgggtggtgccagatgatctcaagttgggaagtaccagtgttggcattagtgcctgttaa

SEQ ID NO: 102447 - DNA, 283 bp, Zea Mays
ttgaataaaattcagcagcatcctgagaatatgattacaatactaaataatcaactcagaggcagtaaccatacaacagaacagaaccaaactttcatatcaaatgctcatatgaccggaggacaggtgggaaaccaaataaccaactctccagcttccatctcgataatattgggatccaacggtcgccctgtctcagcagaatatacatgcaggcaatagaaggtacagcctacagttgacctaaactgaaaaaggtcccttccaattgcaatgtacagta

SEQ ID NO: 102448 - DNA, 1858 bp, Zea Mays
tccccgtcctcctctgtttttaaaccgagcttccctcgccccgtttcaccacggctctcccccttccacacgcgcagagcagggagcgctgccacgcccccaccaccagacgccgcggccagcgcacagcgacgaccatggctgtggctatggcctcggcattgctcatgctcgcgctggcaacggcgtcggcagcggtcagcggcgccggcgcgccctggaggagcaggaggccgaggccggaggccgacctggtgaccgggctgcccgggcagccggcggtcgggttcagccactacgccggctacgtcgacgtcacctcgggcggcggcggcggcaaggctctcttctactggttcttcgaggcggagcgggagccggacaagaagccgctcctgctctggctcaacggagggcccgggtgctcgtcggtggcctacggagccgcccaggagctgggcccgttcctggtgaggagctacggcgcgaacctcacgcgcaacgcctacgcatggaacaaagccgcgaacctgctgttcctggaagcgccggtgggcgtggggttctcgtacgcgaaccggacgtcggacctgcggcggctgggcgaccgcgtcacggcgcaggactcgtacgccttcctcctcggctggctggacaggttccccgagttcaagggccgcgacttgtacatcgccggagagagctacgccgggcactacgtcccacagctcgcggagctcatctacgaagggaacaaaggggcgagcagggacagagccatcagcatcaaaggtttcatgatcgggaacgcggtgctgaacgacgcgacggaccagctgggcatggtggagtacgcgtggagccacgccatcatctcggacgagctctactcggcggtgcggcgggactgcgactccttcaaggaggaggccgacggcgggcggcccggcaagggctgctccccggcgctccgcgcgttcctgggcgcctacgacgacatcgacatctacagcatctacacgccgacgtgcctgctgagcaacctctcctccgctagcgccgcggccggcagcgctaggccgcggccggcgaggctcgtcgcggcgccgcgcctcctctccaagcatgaggagtggcataggctgatgaagcgtgtgccggcaggatacgacccgtgcacggaggcgtacgtgaccaagtacttcaaccgcggggacgtgcagcgcgcgctgcacgccaaccggacaggcctgccctacccgtactcgccctgcagcgaggtcataaggaaatggaacgactcgccggctaccgtgctgcccatcctcaagaagctcatgggcgccgggctgcgcgtctgggtctacagcggcgacacggacgggcgggtgccggtgacgtcgacgcggtacagcatcaacacgatggggctgcggccgcggccgcggcagagggcggcgagccggtcggccgcttcggcaggcggagcggcggcggagtggggcgggtggcgggcgtggtactaccggcagcaggtggccgggtgggcggtggagtacgaggaagggctgacgctcgtcacggtgcgcggcgcgggccaccaggtgccgctcttcgcgccggaccgctcgctcgccatgctctaccatttcctccggggccaggccctgccggccgcgcgctcctccggctagctcaccgtcaccggtcacataggtggttaacctgaccctcgctgctcaagcggtagatcgttctggttagctacaagctgggtaggcgttgccaatgtgccactgcaatctgtaccgataaaacgggaaaattaatccagtggagaaattgatgcaaggtttca

SEQ ID NO: 102449 - DNA, 2575 bp, Zea Mays
aggtggtaccagatttattctatgataaaaacctccttaagtcaaccacactgaatgttgaactttttagatggcacaaagttcaaatacagaacaaatggttgtctgcacatattgaggctgagacaaacttgaacgtaataaagtgagagactgaaagaaagcaagaaccatacatcagtgatcaatcagtgtgacgaactgataagctgttgctctattactagaccaaaactttggaacaccatcacaaagtagtgtgacggagacttacagctgttcataggacagatcgataagcatcatcttccctgtaccgacaccaccgtccaccatagaggtaaagcccctccactggagcataggtagaaggctgagtaatgagacgggaccatagccatcgactccttcaatgtcaaagattaaggttaagataacgtgctatatacaaattacaaaatatatcaccttcataattcttgaattgtatcagcctgtatgaaccagtaaaaaggtgggaaaagtttttaccacaacactgatggaagctatccaggaaatgaatctttggtcaaagaccagaacaacacctgaaagctatcgccatttactagctctcctgatgttattctcctctcccattccaccatcggaccacctcttccaatatagtatcagtactacccactaacaaacacaatggcatccccacaatctgaatcaactaattcttcatcgtcggcaagcttcgaggcaaggatatccagtacggtagcaatgcctcccaactcaggccccaggtcctgcccggcgacgaactcgcgcaccacgttgtccacctcaatcatgctgcacccgggcgtcttcctcgtgctccggctccgtatctccttcctcgtactcgccacttcgccccatcggcctgcagcgccgtacacgttggccagcatgacgagattgcccacgtcccctggctccagctcgacgagccgctcggccgccaccacggctgtttcgacgtcgccatggctgcggcaagcgctgagcagcgacccccatatcttgccatctggagggaccggcatgcctcgtatggtgtcgagcgcgcgttggattcgccctgaccggccgaggaggtcgacgacgcagccatagtgctcgacgccgggttccacaccataatcttccttcatttgatccaagtagcgcaggccttcgtccacgaggcccgcgtgggagcaggccgacaagagccccacgaatgtgatgccatttggcatcacccttccttctctatccatcacctcaaacaacctgacagcctcgcgtgctctcccgtgtgccgcgaggccgccgatcgctgtgctccatgagatgacgtccttctcggacatgccgtggaacagctgcagcgcttcctcgatgcacccgcacttcgcgtacatctccatcagcgcgttgcaaatgtatacctttcccagcatgccgtgcttgctgcagtaagcatatatccaccggccaagctccagagcgccaagctgggcacaggccggcagcaccgcgacgatgctcacgtcatctggttcgaatccttccatttgcatcagcctgaacacctctactgcacctgtgaagtccccaacggcggtgtatccggacaccaaggcggtccaggaaaccacggtcttgtcgggcatcgaatagaacaactcccgtgccctcctcatctgccccattctcgcgtgcgcggagatgagcgtgttccaggagaccacgtccttctcccgcattccatcgaacgccttgcgtgcggtcgacagatccccgcagcgcgtgtacatctcgatcagggagttctgtacgacagcgtgtgactcgcacccggacctcgccacgtgcgcgtgcacctgcctgccgagccgagaagcagcgagggcgccgcaggccttgaggaggaacgggtacgtgaaccggtcgccgacggagaagccagcagtcgaagggtgcgggaggcacctaagcatgcggacgtagacctcgaccgcgtcgcggtggaggtggttctgcgcgtaggccttgatcatggcgttgtggaggtggaggttcggggcggggatctgggcgaaaacccgcgcggcgtgcgcggcgcggccgtgggcgttgcagatgtgcacgatctgggtggcaacgtagctgctctgcgagaggcacaaccgcacggcgaggccgtgcgctcggaggaggtcccggaaagtggcgcaggtgcggagcctcgcgatgatcgcgtcctccagctgccacagcgaccgcgccgccatggcatcaacagccaacagcggcgaggtgttccacgaatcggccggcgggtgtgttgtgctcaaatctatccttcggctaagtgccgcctgatagaggctttgcggtggctagttaccccgtcgatgaagccatgagcccatgaaggtacctcgagcataaatactcgtcgtgtaggtgatgcaatggcgtcgttaacgtaccgctgcattttgtaccgaacgggaaaatccaattgaaaaactgatgcatggttcca

SEQ ID NO: 102450 - DNA, 1802 bp, Zea Mays
caatcccacccagagccagagaccacggatcggagaagaaaaggaatgtaagcctcagcacacacgtatagacgacgacgtagccttcgttcacagaagctgatcgcgcgagaccccgtccgtcgtcccgcgcgcgcgcatgggggccgaggcggtggcatacccggccgtgctcctcgtgccgttcccggcacaaggccacatcacgcccatgctgcagctggcgggcgtgctcgccgcgcacggcgtggcgcccaccgtcgccttgccggacttcatccaccgacgcatcgtcgctgcctgcggtggcggcggcgtcgtcggcgtcacgctggcgtccatccccagcggcatcgatatcgtccagcaggacgccgcggctggcgacgacgacgacaccccggggttccgcgacatcgtgcattccatggagcaccacatgcccctgcacctggagcgcatgctgacgtcgccgcgcaggccgccggtcgcctgcgtcgtggtcgacgtgctggcgtcgtgggccgtccccgtcgccgcgcgctgcggcgtgcccgcggccggcttctggcccgccatgctcgcctgctaccgcgtcgtcgccgccatcccggagctcctcgagaagggtttaatctcggaatccggtacgccgatctcgtcgtcgtcgaccgacagcgatgaacaggacgcccggacggtacggggcctccacatcctgccggcgcaggtggagctccgcgtcgaggagctgccgtggctcgtcggcgactcggccacccggaggtccaggttcgccttctggctgcagaccttgcaccgcgcccggggcctccgctgggtgctcgtcaactccttcccggccgaggccgggtgtccagccgccgccgccgccgccgctggggacgaggacgaggacgacggcgcgcaccggcagcagggcccgcgtgtcatccccgtcggggcggcgctgctaccggccggcggcatcggcgagcgcacgaagcagcagcagcagtgcgtcaacattaataagagccccagcatgtggcgcgcggactcgacgtgcatcgggtggctggacgcgcagcgcgcccggtcggtggtgtacgtctcgttcggcagctgggtggggtcgatcgggccgggcaaggtgcgcgagctggcgctggggctcgaggccacgggccgcccgttcctctgggcgctcaagcgcgacccctcctggcgcgcggggctccccgacgggttcgcgggccgcgtggcgggccggggcaaactggtcgactgggcgccgcagcaggacgtgctccgccacgccgccgtcggctgctacctcacccactgcggatggaactccacgctcgaggccatccagcacggggtgcgcctgctctgctacccggtctccggggaccagttcatcaactgcgcctacatcaccggcctgtggaagatcgggctcaggctcggcggcatgatgcgcgacgacgtcagggccggcgtcgagagggtcatggacgacggcggccacctgcaggagaaggtctgggcgctgcgggagcgcgtcgtgacgccggaggcgaggcgcggggccgaccggaacgtcaggtccttcgtggacgagatcacgagagaccacccgctggtggtgcaactatacagtgtcttgtagcgatatagctagcatgcaggcctgccatcgttacattacatgcatgtacattatgtatcttcttcgttttgttttgtcttcacgactaaaatggttgtgatccgtgctagcaaaacgatcttagctc

SEQ ID NO: 102451 - DNA, 1270 bp, Zea Mays
gtggaggcaacgataagctgataaggtaacagtagtatcttcaaggcttcagcaccacagcagccagctggaccagcaggctccgctgcactgcacggccaatttccgatatcatggcgagagcttgcaaccacgcgctgagactgctgcccaattccatcgccacgcagctggcatgcagcggaggcagcaccagatgcagaaacctcagcgtccacgcgcagctttccacccaagacgatgcttacacgaccgagccgccactgaagaaagcgcaagtcacacagagcctccggaggacccgccggagggcacccggcggcgcgcggcagagcctgatctccgtcgggacgtcgtgcggcggaggtgatcagtggagcagcgacatcgcactgacgttgcggcagctgcgactagacgacctggtcgaagacgggcagagggacgctgatgtgctcgtgcaccttcttgtccagcagcatactcagtttgggatgtcgatcaaagggcgagtcctgacatccttcagaaagatatgcgattcctgctccttgccctactgcacaaacatcgatgagcacttcaatctcacggtgctgtcttcaaccaggcgagaccagagtggactgcctgatctcggtgacactgatccatcggtcatctatgtcagaccaggagacgaagtcgatctcgactcggtaatccaagagaccgtacgattaactgcgtccacgaagagttcatgttcggagacctgcgagaagtctacagttgtatggcaatatggtggtagccagaagaagaagacttccagccaaaggtggtcaaaacttcttgatctaaagaaaaccctggataaagcgcctaagtgaattacttagtatgcatcagtcaactgccaatgctgcatgcagagcaagagaatagtgctgtatcatgatgctggaatggaagtggcgacaacttgaacttgttcaaccaagatggaaggttggtggtttgtaactcattggctgttggctatccttttcttttgaacagaagagagaggattgaccatcttatctgaatggtatatacaatgcgactccatgcccagggactggtcatgttgagaacctagatacaggatcatacattataagcacatcatcagagaataaatgtgtgtgtgaacataactactatttgactgtttgtataaagcatttcatctttttttaaagttttaatataaaacatttcttgttggcacataagcattcatcat

SEQ ID NO: 102452 - DNA, 648 bp, Zea Mays
atggaatccattgatgaggtaagcagtcgcagcgccacttggataagtcagtttgtaatccacgatcataacctttctcagaggcaccagagcgaaaagaccaagaaagctgacgagaaacataaaccccatcatccatccaagatggggatccttgatatcctgaggatcgttcacctctgttttgttagcaatttttgcactcataccaaacagataactgctaaatccacctgtgaaggtgatgccgtaggcggagacgacgcaggtctggatcatggtgttctcctggcgcgtgaagggctgcctgagcaagcccatgcacccgatggccctggtccaggtgcggaggaggaagtagctgaggaggctggcgcagacgttgagcgacgggttgatgcccgtggtcaggtcgatcttcatgaggatgacgttgaacacgacggagaggagggcccccaccacgaaggcgcgcaccgtcagctgctcccgccacgacggcacgggctgatccgcgaaggcctgctccaccgacgacggggccagctccttaccggcggcggcactggcgccgacgttcctgtcgtcggcttcgtcttcgacgtcggcgccggggtggcgccggcggatcaggttgttgtggcctag

SEQ ID NO: 102453 - DNA, 270 bp, Zea Mays
ttgaatctagctttggcagtcctgcccctatgagatctagctaacaataaggttgagagcagaggatatgagtgcggaaaagaaaaggtcagtcgacataaactatggaggagtggtggtcaggtggcgcaacctatgaggaagttgggtacgacagtgaaggagaaacttgtgtcacacgcgtttgacctagctacctcattatgctagaaagtagaaaaaagagcgtactatacctggctacctcactgtacgggaaagagaaaaaaa

SEQ ID NO: 102454 - DNA, 2401 bp, Zea Mays
ccgggaagggagcacacagttcgccgcacgcgcgcacctccgcggtccgcctttctcgcgccgtccggacctgacctgatggccactgcaacgcaccacagcgacgccccgggcctgaacggggccgagggcatggagatgatggcagaggccaacgagctccgccggcggggcaagcccagcgacgaccgcacggcgtcgtatggggccggcgcggaggaggacgaggcggcggccgcggcggcgccgtcgtcgtcgtccgtggagcgcgcgttcgcggaccagcccgtgccgtcgtggcgggagcagctgacgctgcgcgccttcgtcgtcagcttcttcctggccgtcatgttcagcgtcatcgtgatgaagctcaacctcaccacggggatcattccgtcgctcaacatctccgctgggctcctcggattcttcttcgtccgcctctggaccaaggccatcgagagcgtgggcttgctccggcagcccttcacgcgccaggagaacaccgtcatccagacctgcgtcgtcgcctcctacggcctctcgttcagcgggggctttggtaactacctattagccatgagtgataaaattgctgccatggtaactgaggcaaacaatgctcaaaatataaagaatccacaacttggatggataatcggtttcctgttccttgttagcttcatcggactcttcggtcttgtgccactgagaaagattatgatcgttgactacaagctgacttatcccagtggcactgccacagcctaccttataaacggctttcatacgccccagggtgccaagctcgcacggaagcaagtaaagaagctgggcacgttcttcgtccttagcttcgtttggggtttcttccagtggttctatactgctaacccggacgaatgtggattccaaaaatttccatcactaggcctgcaagctttcgacaacaagtttttctttgatttctctcctacgtatgttggggtgggaatgatttgctcacatattgtcaacgtatccattctcctgggagctatcctctcatggggaataatgtggccgctcatagccaagaaaaagggagtttggttctccgctgatctcgacgacaacagtcttcacggaatgcaaggttaccgggtcttcatagccattgccttgattctcggggatggtctatacaacttcctgaagatattcatcctcaccgtggtctcgttaagatctcaagtaagaaaagctaacgctagcacacttcccatctctgacgatggcacagttaccagcaccgcacctacctcatacgacgaagagcggcgcaacgaacacttcctcaaagatcaaattccttggtacgctgcacttggaggctatgtcgccattgccgccatatctatcggtactgtcccacaaatattcccacagctgaagtggtaccacatcttggtggcctacatttttgctcctatactcgccttctgcaatgcctacggaaatggcctcacggactggtcgctggtcaccacctacggcaagctcgcgatcttcgcattcggtgcatgggtgggcgcctccaatggaggcgtccttgcaggcctggctgcctgtggcgtgatgatgaacattgtgggcaccgctgctgacctgatgggggacttcaaaaccgggtacctgacactagcctcaccgaggtcgatgttcatcagccaggtcatcggcacggcgatgggttgcgtcattgcgccctgcgtgttctggctcttctacaaggccttcggcaacatcggcgtcgctggcagcgagtaccctgcgccaaacgccgttgtcttccggagcatggcagtgctcggcgtggatggcttctcctcgcttcccgagaactgcctcactctctgctacgtgttcttcgctgcagcgatcgtcatcaacctgatcagggacctggtgcccaagaaggtgtcgaggttcatcccgatcccgatggcgatggcgatacctttctacatcggtgcgtacttcgccgtggacatgttcgttggtacagtgatactgttcgtgtggcaaaggctggacagagccaaagcagacacgttcgcgcctgcgattgcttccggcatgatctgtggtgatgggatatgggttctacctcagtcagtgcttgctcttgccaaggtgaagcctcccatctgcatgaagtttctgtcgagggcgatgaatgacaaagtggatgtttttcttggatcgtgatcatagaacgttcggtggaaatggaagtgtaaatgaaacggaacaattgtgacttactgtctgtaattagcaaaacgtatttcccgtggtaaataaatccgtattaaataccagttgagtgaacaattatattattcttattgat

SEQ ID NO: 102455 - DNA, 1299 bp, Zea Mays
ggaaaacgctcaaaccggcaaaccctaatccccatcccccagccgacagccgccgagcaaaccggctcctccggtcggtcatccactcatcctcatcccctggcccctgcccatccgatccgatcggtcatcccctacccctacctgatcggatcccctgctcttccgccgagcaccaccaggcagcaggctgcagccgtcgagcaccagcaggagcacggccaggaggacgacgcccgcatcctgcctcttctctgctgctggagcttctgctgccaggagcacggccagaaggacgacgcccctgctgctgccggtgagcggtgatctgctgcgcccccatcctgcctcttctcctccctctcggcctcgcctcgatctgctgctggtaatgtcctttatgaggtactacaagattagaaaatagaaaggtgtcgactgtgactcttgataattgcaccaccaatgatagtattatgagttctatgcaagataagttgcccctcttatccctcatgctagatggtaaattgttacacatgcgttgtgtggcacacatcattaatcttattgtgaaagatggaatgaccgttatggataaaggtattaaaaaggtacgcaatagtgttgcattttggtgtgccacgccaaaaagacatgagcgttcgcacaactgctcaaatgaatgttaaatatgataaaaggatagctctagattgtaaaacaagatggaattcaacttatcttattgttgaattgggaagaaatttgattaattatgttattcaattgctgaaaattgttctttgttatatccgatggatatccaatggatatccgaaacccgatgggcatggatatggatatgaatttctaaccgcgggtatagtcgcgggcagatattatctatgaccatggatatgactgcgggcggatattttcaatatccgatctgaatccgacccgttgccatccctagtgcggtccgctcgccgtacccttcttctgcttgagcagcctgaggtcctgagcggcgtgcggcgcttctccaaatctcccctcctctcgactcacgttcctgcgttcgaaaccctaattccgtccgaggcggcagcggcggaccggcagctccccgctcggcttgtattgggcggctgtcgcgctgcagcagcaggggcatcgtcgcgctcgcaccaaccgaagacggcgtcggcctccacgcggcaccgacgaccgacccacagtcccaagtccaacgaggaggccggagcgctgaacagccgtctacatcctcctccc

SEQ ID NO: 102456 - DNA, 1872 bp, Zea Mays
ggaaaacgctcaaaccggcaaaccctaatccccatcccccagccgacagccgccgagcaaaccggctcctccggtcggtcatccactcatcctcatcccctggcccctgcccatccgatccgatcggtcatcccctacccctacctgatcggatcccctgctcttccgccgagcaccaccaggcagcaggctgcagccgtcgagcaccagcaggagcacggccaggaggacgacgcccgcatcctgcctcttctctgctgctggagcttctgctgccaggagcacggccagaaggacgacgcccctgctgctgccgtgcggtccgctcgccgtacccttcttctgcttgagcagcctgaggtcctgagcggcgtgcggcgcttctccaaatctcccctcctctcgactcacgttcctgcgttcgaaaccctaattccgtccgaggcggcagcggcggaccggcagctccccgctcggcttgtattgggcggctgtcgcgctgcagcagcaggggcatcgtcgcgctcgcaccaaccgaagacggcgtcggcctccacgcggcaccgacgaccgacccacagtcccaagtccaacgaggaggccggagcgctgaacagccgtctacatcctcctcccgaaggttgctcttctatggagacttccaaagaacaggcttccaaggactatgctggtttcgagaagaaagttaagaggacaatatatattgaccacctttctcctcaagtaaaggaatcggccatcaaagctgctcttgcacaatgtgcaaatgttgtccatgtggagttcatcgtcaattacacgatcccatataaagatattgcttctgctgcattggtggaattggatgatgacgtgcaggctaaggctgctgtagaattgatgaatgatttcccgttcataattgggggaatgccaaggcctgtaaaagctatccatgccaaggctgagatgtttcgtgatcgccctccttgccctggccttcgaaaagatttctgctgggtaaaacaaggagataaggactatgaagcgatgcagaaattgaaaaaccttgcaaagaggcaggaatctgagaacatggccctcatacagaaaatcttgaaagatgagaaggaactggcgactcggcagcaggaggtgcttgatggaaactgcaagaagtacgacatgctggaagctctagtgcagaagggagacatcactaaccttgctcaacaatacggagtgaacttgaacgactgatgagtcattcgtgtctttttcccccttccccttggagcgatggcgcaactggtgtgatgatgatggaataggatagcatgccatagttttggtccggtatctggaccctccctctggtgtaaagactatcccaacttaggcttgggcttttcagccttctttggctctccaaaaaatctaaattagctggctctgagcctctgactttctgatcgatccaagctagctggctagctacaggttgtgtatatgaatcttgcaggggtgctgacgacgttgcaggaagggtgtagtggcccaaggaagaagagcagcggcagaggaggaggccgaccacgacgacaaggagcatgagtcggtggtggggtcggtgggattcttctccaacctggaagaactgctggtgttcaaccccagggccattctgtcctgctttgttgtcgtccacaaggcctagcttgagctgaactagtagtagtgtatggctacatgtaaggatgtaatatggtttgaaaaatattcgtccggatccggattcgaagatggtgaacaatgatttggatggaatttttggatatccgaatttttttggatattgaatcacacgagaaa

SEQ ID NO: 102457 - DNA, 1737 bp, Zea Mays
ggaaaacgctcaaaccggcaaaccctaatccccatcccccagccgacagccgccgagcaaaccggctcctccggtcggtcatccactcatcctcatcccctggcccctgcccatccgatccgatcggtcatcccctacccctacctgatcggatcccctgctcttccgccgagcaccaccaggcagcaggctgcagccgtcgagcaccagcaggagcacggccaggaggacgacgcccgcatcctgcctcttctctgctgctggagcttctgctgccaggagcacggccagaaggacgacgcccctgctgctgccgcggcggaccggcagctccccgctcggcttgtattgggcggctgtcgcgctgcagcagcaggggcatcgtcgcgctcgcaccaaccgaagacggcgtcggcctccacgcggcaccgacgaccgacccacagtcccaagtccaacgaggaggccggagcgctgaacagccgtctacatcctcctcccgaaggttgctcttctatggagacttccaaagaacaggcttccaaggactatgctggtttcgagaagaaagttaagaggacaatatatattgaccacctttctcctcaagtaaaggaatcggccatcaaagctgctcttgcacaatgtgcaaatgttgtccatgtggagttcatcgtcaattacacgatcccatataaagatattgcttctgctgcattggtggaattggatgatgacgtgcaggctaaggctgctgtagaattgatgaatgatttcccgttcataattgggggaatgccaaggcctgtaaaagctatccatgccaaggctgagatgtttcgtgatcgccctccttgccctggccttcgaaaagatttctgctgggtaaaacaaggagataaggactatgaagcgatgcagaaattgaaaaaccttgcaaagaggcaggaatctgagaacatggccctcatacagaaaatcttgaaagatgagaaggaactggcgactcggcagcaggaggtgcttgatggaaactgcaagaagtacgacatgctggaagctctagtgcagaagggagacatcactaaccttgctcaacaatacggagtgaacttgaacgactgatgagtcattcgtgtctttttcccccttccccttggagcgatggcgcaactggtgtgatgatgatggaataggatagcatgccatagttttggtccggtatctggaccctccctctggtgtaaagactatcccaacttaggcttgggcttttcagccttctttggctctccaaaaaatctaaattagctggctctgagcctctgactttctgatcgatccaagctagctggctagctacaggttgtgtatatgaatcttgcaggggtgctgacgacgttgcaggaagggtgtagtggcccaaggaagaagagcagcggcagaggaggaggccgaccacgacgacaaggagcatgagtcggtggtggggtcggtgggattcttctccaacctggaagaactgctggtgttcaaccccagggccattctgtcctgctttgttgtcgtccacaaggcctagcttgagctgaactagtagtagtgtatggctacatgtaaggatgtaatatggtttgaaaaatattcgtccggatccggattcgaagatggtgaacaatgatttggatggaatttttggatatccgaatttttttggatattgaatcacacgagaaa

SEQ ID NO: 102458 - DNA, 1559 bp, Zea Mays
ggaaaacgctcaaaccggcaaaccctaatccccatcccccagccgacagccgccgagcaaaccggctcctccggtcggtcatccactcatcctcatcccctggcccctgcccatccgatccgatcggtcatcccctacccctacctgatcggatcccctgctcttccgccgagcaccaccaggcagcaggctgcagccgtcgagcaccagcaggagcacggccaggaggacgacgcccgcatcctgcctcttctctgctgctggagcttctgctgccaggagcacggccagaaggacgacgcccctgctgctgccggttgctcttctatggagacttccaaagaacaggcttccaaggactatgctggtttcgagaagaaagttaagaggacaatatatattgaccacctttctcctcaagtaaaggaatcggccatcaaagctgctcttgcacaatgtgcaaatgttgtccatgtggagttcatcgtcaattacacgatcccatataaagatattgcttctgctgcattggtggaattggatgatgacgtgcaggctaaggctgctgtagaattgatgaatgatttcccgttcataattgggggaatgccaaggcctgtaaaagctatccatgccaaggctgagatgtttcgtgatcgccctccttgccctggccttcgaaaagatttctgctgggtaaaacaaggagataaggactatgaagcgatgcagaaattgaaaaaccttgcaaagaggcaggaatctgagaacatggccctcatacagaaaatcttgaaagatgagaaggaactggcgactcggcagcaggaggtgcttgatggaaactgcaagaagtacgacatgctggaagctctagtgcagaagggagacatcactaaccttgctcaacaatacggagtgaacttgaacgactgatgagtcattcgtgtctttttcccccttccccttggagcgatggcgcaactggtgtgatgatgatggaataggatagcatgccatagttttggtccggtatctggaccctccctctggtgtaaagactatcccaacttaggcttgggcttttcagccttctttggctctccaaaaaatctaaattagctggctctgagcctctgactttctgatcgatccaagctagctggctagctacaggttgtgtatatgaatcttgcaggggtgctgacgacgttgcaggaagggtgtagtggcccaaggaagaagagcagcggcagaggaggaggccgaccacgacgacaaggagcatgagtcggtggtggggtcggtgggattcttctccaacctggaagaactgctggtgttcaaccccagggccattctgtcctgctttgttgtcgtccacaaggcctagcttgagctgaactagtagtagtgtatggctacatgtaaggatgtaatatggtttgaaaaatattcgtccggatccggattcgaagatggtgaacaatgatttggatggaatttttggatatccgaatttttttggatattgaatcacacgagaaatcactttaagt

SEQ ID NO: 102459 - DNA, 1319 bp, Zea Mays
tgaagaagcgtttcccagatgcacttgattggggacaatcaaactctagcgaggggggtaatgtcaggagtgctacttgattactgggtaatcaactgtaatgaagatgtaatctgtgagttgggcctattgtggccatatttctagtgggctgtattagcctagtgttgtactataaatactggacaaatactagagaatagacaaaaaagaaagatagaaagtattccaccatacctgttgaacgcatctggaagttgttcttccttttggcaacagctcacgacggtggcttgcgttccaccgtccctgggttgtgacacaagtgcatttatcgtagtttagatttaccaatactggaggcctgtctcttatgataactgtacacacttgtgtctggccaagtactgcatttgtgcttaagctatattatcgattgttatgggggtgttcatgttgttactttgatgtttcactgagaatgttatatcatacatgacaatgcttatctggagctgtttttattatttttctgcccagaaaatcttgaaagatgagaaggaactggcgactcggcagcaggaggtgcttgatggaaactgcaagaagtacgacatgctggaagctctagtgcagaagggagacatcactaaccttgctcaacaatacggagtgaacttgaacgactgatgagtcattcgtgtctttttcccccttccccttggagcgatggcgcaactggtgtgatgatgatggaataggatagcatgccatagttttggtccggtatctggaccctccctctggtgtaaagactatcccaacttaggcttgggcttttcagccttctttggctctccaaaaaatctaaattagctggctctgagcctctgactttctgatcgatccaagctagctggctagctacaggttgtgtatatgaatcttgcaggggtgctgacgacgttgcaggaagggtgtagtggcccaaggaagaagagcagcggcagaggaggaggccgaccacgacgacaaggagcatgagtcggtggtggggtcggtgggattcttctccaacctggaagaactgctggtgttcaaccccagggccattctgtcctgctttgttgtcgtccacaaggcctagcttgagctgaactagtagtagtgtatggctacatgtaaggatgtaatatggtttgaaaaatattcgtccggatccggattcgaagatggtgaacaatgatttggatggaatttttggatatccgaatttttttggatattgaatcacacgagaaatcactttaagtatataa

SEQ ID NO: 102460 - DNA, 325 bp, Zea Mays
gacctgcagatcgaagtagcggagcaagaggacttcccggatgccggcgtccttggccgcctccagcatgtcgcccgggagcgcaacgccgcgcgccgcggcgaggtgcagcacctcgttgaagccgagcagcggaccgaagtccgcatcgtcacagtcgtcttcatcctcgccacccccgccgccgcctccatccttgcctccattcccgacgcccgatccgtccccagcggcggcgcgggggatgtgcggcgcggagcaggagagcgcatgcggtttggggaggggtaagacgggcttgagcgagaggtggagaggcctcggc

SEQ ID NO: 102461 - DNA, 1836 bp, Zea Mays
acaaagcctgatacgtaactactaggccgatcggccatccacagacccgtcttaactctacctgcctgccactatactatcagcctgtgcgagcgagaaatggacagagccgccaagcctcacttcgcgctcatcccattcacaggaaccatcagccacgtgatccccatggcagacctcggctgcctcctcgcggcccacggagccgaggtcaccatcatcactacgcccgtcaatgcagcgatagcacagagccgtgtcgaccgcgcacagtcacacggtgccacgactacgatcacggttaccgcagtcccgttcccggccgcggacgccggcctgcccgagggctgcgagaggatggacctgctccggtcccaggccgaggtgcctcgcttcttcgtggccaacaaaggcttcggtgaggcagtgtcgcggcactgcctcggcgaagcgctgcgccgtccgagctgcgtcgtctccggggcgtgccagacgtggacgctgggcctggcgcgccagcttgaagttccctgctacgtcttccacggtttcggcgccttcgctctgctctgcatcgagcacctgtacaggcacaggccgcaggaggctgccgcgttggctgacgacgagctgttcgacgtcccagcgctgccgccgcctttccggctcaggctgtcgcgtaggcagctcccgccgcatttcatgccgaccacttccgtcgccgggaaggcgctgcaggggatccgggatttcgacgtggccgcggacggcttcgtggtgcacaccttcgaggagctggagagcggctcgacggcgctactcgcggaggcgacgggcaaaaaggtgatcgccgttgggcccgtctcgctgtgctgcgcgccaagcctggatcctcggctcgtgtcgaacgatgatgcgaggcgatgcatggcgtggctggacgccaaggcgcccaagtccgtggtgtacgtgagcttcggcagtttcgggcgcatgccacccgctcagctcatgcagctcggcatggcgcttgtcgcatgccgctcacctgtgctctggctcgtcaagggcgccgactccctgcccgacgacgtcaaggattggctaagagagaataccgacgcagacggcgtcgcaggcagcaagtgtctggtggtgcgcgggtgggcgccccaggtggccatcctggcccatccggccattggcggcttcgtgacgcactgtggatggggctccatcatggaggctgttgcagccggtgtgcccatggcaacctggccctttttcgcagagcaatttatcaacgagcagctcatcgtgcacgtgcttggcgttggggtgtccgtcggtgtgacgaagccaacagaaaatgttttgaatgctactactgacgccgccggtggcagccaaggggaggctgatgccgaggtggggatggaacaggtgaagaaagccatggatacgctgatggatcaagggcctaaaggggaggagaggaggaggaaggcccatgagctgaaactgaaggcgaagagtgctttggagaagggaggatcatcctacactaatctggataatttgatcctgtcttttctttgaatgtcaccatgtcttacttttgcgtcccagcatacatgttttgtttgcctctgagtgtcatactatggagatttatttactctttatttattattactatggtcatttgtttctgtcgagtaaagttattgtattctagatcaaccggtgctcctcgatgagcatgtaattctaagtgatatacggaatatgggttcgtggataaatttaaggacaaataaattaaaggtttttctt

SEQ ID NO: 102462 - DNA, 644 bp, Zea Mays
actatcgttccaccagtacttgcatcacgtctgaagttctcccctcgccgagtagccgcttcgcgttcgtcggcggcaaccaccagtccaccaccacgatggatatgtttgctgagctgcgatccaacgtgatgaggcactcatctctggaaggatcgaataatgtgctagttaaatttgaacaaaatgagcgtgtggctgcagctaggaaaggtggagatgcaagttagttggacagcgaatcacagccgaaacgatctgaaaatgttgtttttgatgtcaatgacaatatgacctcaaacatgtccaagaaagaaaaaggtagggaccatgacgaagcagcaaactgtgagaactctgcagttagcacaagcagatatcggaatggtcatgaagattttccgcgctaagagagattggaagacaggttggaaaaatgaagattgtatcgaggacattgctgtatgtgttggttccgatgatgaagagggttcaacagaagaaggtgcaggtcgaccctaaggatcaagaagactttgacagggcactgaaagccattcaagcttggagtcacgtaagctgactactgaagcagcggacaaaagatgtgtgggaatccggtggtgttagcgaggtgtgcattc

SEQ ID NO: 102463 - DNA, 626 bp, Zea Mays
aaattcttggatacaacgaaaggtaggaagaagaagaagaactgaacggagcgttcgccaggaagtgggaacggctggtgtcaaggaggaaggactgacgagcaccctgctggtcgcgttatctgggacggcccaaacagaggtggtggtgtacagtgcagcacagcggcactacttgggttgctggtgggttcttccgtggctatggaagggaggtgagctgatgccactgcgttcatggtttggtttggtaatggtttgccccaggaaagagccacctcagtatcgttccatgaacgtatttgcatcaggagttgtgcgacgtgagaacggtttgcatcaggagttggctcgtggtatgtggaactagtttgtttatgttgctatgcttgtacacaggaccgttttcactactacctcagatcaggtaatctcgtatccactagctcctcaaccgatgccttgcagtgcaaccctggacccggcgaccttgaacagttagttgactctcatgtttgctctgtcagatgtcaggatgcttatggcgcgcatgatctgagcacgagaattttcgtacaattttcttcttcagatgtaaagtctctccttcgctgccctgcttactc

SEQ ID NO: 102464 - DNA, 249 bp, Zea Mays
atcaggagttggctcgtggtatgtggaactagtttgtttatgttgctatgcttgtacacaggaccgttttcactactacctcagatcagatgtcaggatgcttatggcgcgcatgatctgagcacgagaattttcgtacaattttcttcttcagatgtaaagtctctccttcgctgccctgcttactcatattatttacgctgcacatgctcctggtgcctcctattaccatgtttatgctttcaacac

SEQ ID NO: 102465 - DNA, 1072 bp, Zea Mays
atggaggtgagagtgtgggcactgaagaggggtgcaaagtatcgcatgaagctgaagccgaaagccgagctagaagctgaagcattacacaaaatcagaagtgctggtccgagaaaccgcaatacaatttctcaagctgagactggaagtgcaaaacagagaaaaaggagttgggattttaaaaatcatgagcgtgttgctttcatggcatgaccacacgagggagctgcaacggtaccaaccaagaagggaaaggtgcagacgagggggaacctaagctagaaaccaatagtggcaattattgttcggaggccatcgccgctggtgggcggtggcttccccttcccctgtattagcagcgaggaggcagcagctgaagctctcgtctctgcctctccggacctccggtgaactccaacagagaccacctcctccatccgtcggtcatccatctgtgattccttttgcgtgtgcaagttgttaaatcggcacacggcctccgcttttggagtggagaggggcatatacggtttactggtgcgcccggggccgccgcttttcccgctggcctctccccggccgtcccattggagcgcgcaaagctgggcggcaccatttaaagaagcaaactgcactccaccattagcagcaccaaggcaccaccaccaagcgcaccgccacgccacacgatctataacgcgcaggcaggcgaggatcagaccggccggagcttgccttctccgttggggttcctgcttgccgcggcgcgagaacagatatattggatcggatttgtgccgggtaagtttgttgagaaggattattcgtgccgcccgtgcttctagctggttgatcctggcccggcaggatctggaccggcatccctttgccccgcgttcttttggattgcttctttcgccggaatcgcgtgcgtagtttaactaggttttggatttggtatatgaactctcgtgtgaaaattcagttccttgccagcgccttgcatgcagattgtacggccacagttgattggcggtgtctgactttctgtagtactttactaatcattgtc

SEQ ID NO: 102466 - DNA, 2357 bp, Zea Mays
atggaggtgagagtgtgggcactgaagaggggtgcaaagtatcgcatgaagctgaagccgaaagccgagctagaagctgaagcattacacaaaatcagaagtgctggtccgagaaaccgcaatacaatttctcaagctgagactggaagtgcaaaacagagaaaaaggagttgggattttaaaaatcatgagcgtgttgctttcatggcatgaccacacgagggagctgcaacggtaccaaccaagaagggaaaggtgcagacgagggggaacctaagctagaaaccaatagtggcaattattgttcggaggccatcgccgctggtgggcggtggcttccccttcccctgtattagcagcgaggaggcagcagctgaagctctcgtctctgcctctccggacctccggtgaactccaacagagaccacctcctccatccgtcggtcatccatctgtgattccttttgcgtgtgcaagttgttaaatcggcacacggcctccgcttttggagtggagaggggcatatacggtttactggtgcgcccggggccgccgcttttcccgctggcctctccccggccgtcccattggagcgcgcaaagctgggcggcaccatttaaagaagcaaactgcactccaccattagcagcaccaaggcaccaccaccaagcgcaccgccacgccacacgatctataacgcgcaggcaggcgaggatcagaccggccggagcttgccttctccgttggggttcctgcttgccgcggcgcgagaacagatatattggatcggatttgtgccgggttcttggagcagtaggcaccaaactggtccaggttgggcaaaaatgcagtttaaccagtagctaacggagctctctcatcttgtactgtggcatttcttaagttgtctggaagctgaatctccaaggctggaagatccaacatctgttcttgaaaatttactgtacctgcaaatggcagacgatcctaacatgaattttggggcattctcccagtcactctgcaaccagcatgtagtttcatttcagacaagcgtagccactagcggctcaggaggcatgccaacatacctggattgttccactgggatggatgccagcgtggggatgctgaccacaccttcagtggttgtttccactggttcatctaatatgccagcagattccgggcagagcctcaaatatggagggccactggctgcggattggacacaggtcgagcttgaaattctgagagatggcatggagaaatatgttcatgaacaaggcatcatgaagtatataaagatagcagcatcgttaccgaacaagacagtaagagatgtcgcaatgaggtgccagtgggtagggaagaaagtaaatacaagacgaaggaaaccccaagaacaccatactgggagaaatacaaaagaaagaaaggataaatttgtagagcctgcgctgtggggaacaaatcatcctcttcaaacaggcatgacagcctcttcatttgtgccgcataatggccaaaacgctatgtttatatctggagcctcagagatagatcgtccagtgctgcatctgctggaggaaaataataggcttcttaatcaaatcgaaacaaatattcagagatttcagcctcataacaacatcgatctcttccatcgggcaagaaggaacattaatgatcttgtacaaatcacgacccaactgcctgggctgaggaccaagatgcctccacttactgtggcaatagatgaaaatcttgctagcttcgtgcttcctggcattacaatggatcaagttcttggaagcaacgatttgaaggaggagccaagaggatggtagatccactgccagcatgtttcagtttattggtagatggatggaccatatggagaactactgcttcattttgcacaccaagtggcggtgaatagggtcaccattcaccaaggaccccctgctttctctatctgaaagcgaaaggagaggtggatgaaaccgttcagctgccctgcagctacccttagacgttggtggctacacagcgagggttttaggaactgcagtttttgtggccttgctgcacctgtaaaaaactgtgattctttctggtttccccttcagacagtagggtaaatagatgtagcggaggaagctcacaagaactagctaaatagttctctctagaagaaaaaaaatgtcgctacatagcaagaaggatcctttttgcctgtcgccatttgctgctagttcttccttcatgtgaacgtgatctaagttcctagttctctcttatccgtgctccgcctttgtatccacgaactggaaatatagatttctgagtatcct

SEQ ID NO: 102467 - DNA, 1303 bp, Zea Mays
aacggtaccaaccaagaagggaaaggtgcagacgagggggaacctaagctagaaaccaatagtggcaattattgttcggaggccatcgccgctggtgggcggtggcttccccttcccctgtattagcagcgaggaggcagcagctgaagctctcgtctctgcctctccggacctccggtgaactccaacagagaccacctcctccatccgtcggtcatccatctgtgattccttttgcgtgtgcaagttgttaaatcggcacacggcctccgcttttggagtggagaggggcatatacggtttactggtgcgcccggggccgccgcttttcccgctggcctctccccggccgtcccattggagcgcgcaaagctgggcggcaccatttaaagaagcaaactgcactccaccattagcagcaccaaggcaccaccaccaagcgcaccgccacgccacacgatctataacgcgcaggcaggcgaggatcagaccggccggagcttgccttctccgttggggttcctgcttgccgcggcgcgagaacagatatattggatcggatttgtgccgggttcttggagcagtaggcaccaaactggtccaggttgggcaaaaatgcagtttaaccagtagctaacggagctctctcatcttgtactgtggcatttcttaagttgtctggaagctgaatctccaaggctggaagatccaacatctgttcttgaaaatttactgtacctgcaaatggcagacgatcctaacatgaattttggggcattctcccagtcactctgcaaccagcatgtagtttcatttcagacaagcgtagccactagcggctcaggaggcatgccaacatacctggattgttccactgggatggatgccagcgtggggatgctgaccacaccttcagtggttgtttccactggttcatctaatatgccagcagattccgggcagagcctcaaatatggagggccactggctgcggattggacacaggtcgagcttgaaattctgagagatggcatggagaaatatgttcatgaacaaggcatcatgaagtatataaagatagcagcatcgttaccgaacaagacagtaagagatgtcgcaatgaggtgccagtgggtaggggtaagcagtctctagcccgtacatgctgctgtacaatgatatttattctttaaataaggatccattttgtcccatttctgactacaaggatactatccgcttaagatgcataatacggaagaacactgaatgtatgcaacttgtgcaaaaatgttcatgaata

SEQ ID NO: 102468 - DNA, 1566 bp, Zea Mays
tgagccagccagtgctagcgcatcgagaccagcaagtgtgcaccaagctgcgtgctacgtgtagtagctatagctagagagtagtgtgatcacgcagacacacacgcacacgcaaatatcttacatgcgttacgtagctgccactccgaccatgccgtcccttgtcgcggagagcgccgccgaaccgcctctggtggacagctacctggagctgctccggcgcggcggcggcggcggcggcattgcggcggcgaccgagggctgcgtgcaggagcgcgagctgcccttgatcgacctgacgtgcctgcagggcagcgcgggcgaggcggcgaggacgacgtgcgcggacgccatggcgagggcggcctcggagtggggctttttccaggtgaccgggcacggcgtgagccgggcgctgttggagcggctgcgggcggagcaggcgcggctgttccggctgccgttcgaaaccaaggccaaggccgggcttctcaacggctcctaccgctggggcgcccccacggccacgtcgctccgccacctctcgtggtcggaggcgttccacgtcccgctcgccagcatctccggcactgcctgcgacttcggagagctcagctccttgagggacgtggtgcaggaggtggcggacgcgatgtcgcgggtggccaagaccgtggcggtggcgctggcggggagccttctgggccacgacgaggcggcggcgttcccggcggggtgcggcgagaccacctgctacctgcggctcaatcggtacccggcgtgcccgttcgcggcgaacaccttcgggctggtgccccacacggacagcgacttcctgacggtgctgtcccaggaccaggtcgggggcctgcagctcatgacggacgccggctgggtggccgtcaagccccgccccgacgcgctcatcgtcaacatcggcgatctgtttcaggcctggagcaacaacctgtacaagagcgtggagcacaaggtggtggccaacgccgcggcggagcgcttctcggcggcctacttcctgtgcccgtcctacgactcgctcgtcggcacgtgcggcgagccgtcaccgtacagagacttcaccttcggggagtacaggaggaaggtgcaggaggacgtcaagaggaccggaagaaagattgggctccccaactttctcaaacaccggccaccccctcaatcacggcccgcctaaaattgacaagtcaaagcacctgccgttttgctctcgagaaatgacgagagcacctttttctcctgtaacttcacggtggatgcgagcacgacctcactgtgtacaagaaatatatatatatataatatgaaccctttgaggcgcttgcttctttttctttttctttgcttagctcatatatagtagaggtcactgtacaagaaagtgaacgaggacgacgcgtgcctgtgcctgtgcgcttatcaagctatcctcattatataatttcagcgatttccgatggaagaaaacgtttatctacatatattgtactacccctcttgcacagaaaaaactactttactttctagtaa

SEQ ID NO: 102469 - DNA, 308 bp, Zea Mays
ttttttttagataatgggaacaaatcccgacctacatcaactgatgacggccgtccacacaccacaacataaagtaccgaaacaacgccacatttggccacaaaacccaaacgcagttgggagaatagacaaacatcacatagttaatctattactgaaggtccaaccatgcgtcgagaagacttgtatcatcgatgtctccaaaagtctgcaggcctccctcatgcttctagtgtcctctttatgcctttgaagcatcccccaaaaacgacaccagtaagttcctcggaagagtacctgtaaataag

SEQ ID NO: 102470 - DNA, 978 bp, Zea Mays
atggctagaggcaaccaacgacgacacgctgtccttgtccagcctctggtatatctacagttcacgcctccggctgtccttgtccggcgggaggccatcgatctagcggctgaaggaggcagacgatcccagcttggcggcgctggccctcagcacgtactggtggtacgccgcggcgatggcggcgccgatgaatggacccacccagaagatccagtggtcatcccaggccttgtcgttgttgtagatgacagcagcgcccaagctcctggccgggttgatgccggtgccggtgatggggatcgtggccagatggaccatgaacaccgcaaacccgatggggagaggggcaagcacggggacatgagagtcacgggcgttgcgcttggggtcggtggcggagaagacggtgtagacgagcacgaaggtgccgatgatctccgcggcgaggccggtgcccttggagtagccggcgctgagctcgttggcgccgccgccgtagcgcacgtagaaggcgctctggaagcccttgacgagcccgacgccgcagatggcgccgaggcactgcgccacgatgtagagcagcgcgcgcaccagcgagaccttgcgcgccaggaagaggccgaaggtgacggccgggttgatgtgcccacccgacacccccgcggtgcagtagacgaggatgaagatcatgccgccgaaggcccaggcgatgccgagcacgccgacgccgccgcacgccgcgtcggggcccgacgccgccgcgtccgtctggtgcttgtacccgatcaccgtggccaccgtgatgtagaggaagagcagcgtggccacgaactcggcgatcaccgcgcggtacagcgaccacttggtcagctcctccgcgtccaccagcggcgccgggggcgggtccgagtagtccttgccctcgtgcgccgccgcggcctcgatgtccttggccattctcgcgctagccgctag

SEQ ID NO: 102471 - DNA, 372 bp, Zea Mays
atggaggacgcggatggaaggagggtgtgtttatttcctgacattgttgatctttcaagaactttctcgaagaaattcaagcacataatgagggaactacagggggctatacttgttggttcagtattccagataatattaggatacactggtcttatttcactgtttctgaggttaataaatccagtagtggtggcaccaactattgctgcagtgggtttggcattttttagttatggtttccctcaggcttgcagctgtgtagaaatcagcatgcccctcattctgttggttcttctgtgcactctgtacatgagaaaaatatccttgtttggcaaccatatcttccttgtctatgcggtacttctctaa

SEQ ID NO: 102472 - DNA, 1117 bp, Zea Mays
ccaaataccatagccctcctagtcctggcagcaccacactctcgcgctcctctcgggcagggaaaaaaaaaggatcggtgtggttgcgcctagcttcccgcgaagcgagacgtcacgggcgtagcgtagtagagctagcaagccataccatacatatcccaccgattccgatcggcatggccgggagcgcgaggtcggcggccgcgaagcacgcgtaccggatgttcgtcgcgccgtccaggggcggcgccgcggcgaggggccccggcgccggcgccgcggaggagttcgacgagtcggacgtctggggctcgttcggcgcggactcccagtactccagccccggggccgagctgggcgccggctgggcgcgcccgatccccggctccggcgccaggcggaagaagcccgtggacggcggcggcggcggcggcgcggcggggtcgctgccgatgaacataccggactggcagaagatcctcggggtggagtaccgggaccaccaccgcgcgggcgagtgggagcctggcgcggacgacgacgacgacgacgacggcagcagctacggcagggcgcgcggcggggcggagatggtgccgccgcacgagctggcgtggcgcagccgggcggcgtcgctgtcggtgcacgaggggatcggcaggacgctcaaggggcgcgacctcagccgggtccgggacgccgtctggaagaagaccggattcgaggactgagctagcgctgatccaccgccatgatcgggtgtaggtatcggtaggttagaaaaacgagcagtgctgctaagtgctactaattgctttatctctcgatcgacttctctttttttttcttgctatcacttttcctttttcccccttttgcgttgcatgcttaaaaggggagaaagtcgaggtagtaagcttttttttcttcttcctgtttttcgttcgtgttggtgcgagctggagggtgggggtgtgtgttcattcatggtgtgacagttttaagggcacctggaaaagagagagagagagaggacgaacagtacgatcgatcagatggttgatccattatattatgtttttttcttctttcgataatggaaaaattttcaattcta

SEQ ID NO: 102473 - DNA, 1132 bp, Zea Mays
acagcagcgcagccagtagcccattactccttgctccacgccgccgctcgaaaccggcagaagtttagaagaacggggagggaagcacgcccccaaacgttccgaggtttcgcctctcggagcgcaccaacgccacccggagcgactcgccaccggcgcggagaaggtacaaaaccagagctatactgccgatctgggcggtctaggggcgcgtctttcggagggcggaggctaggcgatggcggacgagaatgaggctgggaagaaagaggaagaggaatttagcacaggccctctgtcagtactaatgatgagtgttaagaacaacacccaggttctcatcaattgccgcaacaacaagaagctgcttggccgggttcgtgcttttgatcgccactgtaacatggtgctcgagaacgtgcgggagatgtggacagaggtccccaagactggcaagggcaaaaagaaggctctgcctgtgaacaaggatagattcatcagcaagatgttcctcaggggcgactcggtcatcatcgtgctgaggaaccccaagtgacagcccaaccggaagccaggtctctgttgaaaactgtagcttatgatgtatgttggggatgattaaggccttgttcgtttacgtcggattgcaaccggaatcattccagctaatcaaagtttatataaattagagaagtaatccggctaggaatcgttccaacccaccaatccgatagaaacgaacaaggcctaactggttatcttgaactgacgttcatgtggcatcgcaatggcacatgaacatacggcgttccatgagtttgttaaccggaatatgaacctaccacctgcggtatttgatccctgagtgttgagtttgcacttctgcttattattgccttgccccaccgtgttcattaatcgttacattggcgtggaatattttctggtcctgataaagtgctaatgacttgtatgtccgtggtgcgctgtcgacgggaagttccaacttacagcaaagggtttctattttgcttcaagccttcaatggcggtggcggatccatgagaaacctaacgttctttgatgggacgtgctcgcaacagacagtcagctatgactgatgtgatgcact

SEQ ID NO: 102474 - DNA, 1113 bp, Zea Mays
acagcagcgcagccagtagcccattactccttgctccacgccgccgctcgaaaccggcagaagtttagaagaacggggagggaagcacgcccccaaacgttccgaggtttcgcctctcggagcgcaccaacgccacccggagcgactcgccaccggcgcggagaaggagggcggaggctaggcgatggcggacgagaatgtaagttcctccctcagtgcaattcgaagatgcaggaggctgggaagaaagaggaagaggaatttagcacaggccctctgtcagtactaatgatgagtgttaagaacaacacccaggttctcatcaattgccgcaacaacaagaagctgcttggccgggttcgtgcttttgatcgccactgtaacatggtgctcgagaacgtgcgggagatgtggacagaggtccccaagactggcaagggcaaaaagaaggctctgcctgtgaacaaggatagattcatcagcaagatgttcctcaggggcgactcggtcatcatcgtgctgaggaaccccaagtgacagcccaaccggaagccaggtctctgttgaaaactgtagcttatgatgtatgttggggatgattaaggccttgttcgtttacgtcggattgcaaccggaatcattccagctaatcaaagtttatataaattagagaagtaatccggctaggaatcgttccaacccaccaatccgatagaaacgaacaaggcctaactggttatcttgaactgacgttcatgtggcatcgcaatggcacatgaacatacggcgttccatgagtttgttaaccggaatatgaacctaccacctgcggtatttgatccctgagtgttgagtttgcacttctgcttattattgccttgccccaccgtgttcattaatcgttacattggcgtggaatattttctggtcctgataaagtgctaatgacttgtatgtccgtggtgcgctgtcgacgggaagttccaacttacagcaaagggtttctattttgcttcaagccttcaatggcggtggcggatccatgagaaacctaacgttctttgatgggacgtgctcgcaacagacagtcagctatgactgatgtgatgcact

SEQ ID NO: 102475 - DNA, 1092 bp, Zea Mays
acagcagcgcagccagtagcccattactccttgctccacgccgccgctcgaaaccggcagaagtttagaagaacggggagggaagcacgcccccaaacgttccgaggtttcgcctctcggagcgcaccaacgccacccggagcgactcgccaccggcgcggagaaggagggcggaggctaggcgatggcggacgagaatgaggctgggaagaaagaggaagaggaatttagcacaggccctctgtcagtactaatgatgagtgttaagaacaacacccaggttctcatcaattgccgcaacaacaagaagctgcttggccgggttcgtgcttttgatcgccactgtaacatggtgctcgagaacgtgcgggagatgtggacagaggactttctttccaggtccccaagactggcaagggcaaaaagaaggctctgcctgtgaacaaggatagattcatcagcaagatgttcctcaggggcgactcggtcatcatcgtgctgaggaaccccaagtgacagcccaaccggaagccaggtctctgttgaaaactgtagcttatgatgtatgttggggatgattaaggccttgttcgtttacgtcggattgcaaccggaatcattccagctaatcaaagtttatataaattagagaagtaatccggctaggaatcgttccaacccaccaatccgatagaaacgaacaaggcctaactggttatcttgaactgacgttcatgtggcatcgcaatggcacatgaacatacggcgttccatgagtttgttaaccggaatatgaacctaccacctgcggtatttgatccctgagtgttgagtttgcacttctgcttattattgccttgccccaccgtgttcattaatcgttacattggcgtggaatattttctggtcctgataaagtgctaatgacttgtatgtccgtggtgcgctgtcgacgggaagttccaacttacagcaaagggtttctattttgcttcaagccttcaatggcggtggcggatccatgagaaacctaacgttctttgatgggacgtgctcgcaacagacagtcagctatgactgatgtgatgcact

SEQ ID NO: 102476 - DNA, 2934 bp, Zea Mays
accaacccccgtccacccgcgcggcgctcacctatcagtccgacgacggcggcggtcggttgccgcaaagtcgccagctctggcgtagccggcagccaccgtatggtcagcagtagtccgctccccctccacggctccacctcccggcctccccactccgacttgggagcaccagtcccagtggtcaactctgccccaccttccccacgtccacaccaacccccttcccccacccaccctgcggcctgcgcttgcctatttaaatgccgccccccccccccccccctgctccattcccttccaagaagagcctccgcctccgctggtactcgagctcttctccactccacgtctcctccagacgctcaccacaagtccacaactaccaagtcccctaaacacaatcagaacttcccagctcacccgcgctagttcgtcgcccgtctcgacatggagtgcgagaacggacacctcgccgccagcggcaatggtggcgtctgcctggccacgcccgcgccgcgggctgaccccctgaactgggcgaaggcggccgaggacctggccgggagccaccttgatgccgtgaagcggatggtggaggagtacaggaggccgctggtgaagatcgagggcgccagcctgaccgtcgcccaggtggcggccgtggccgcggccggcgaggcccgcgtggagctcgacgagtccgcgcgcggccgcgtcaaggccagcagcgattgggtcatggacagcatgatgaacggcaccgacagctacggcgtcaccaccggcttcggcgccacctcccaccggaggaccaaggagggcggcgccctccagagggagctcatccgattcctcaatgccggagcgttcgggaccggcgacgacggccacgttctgccggcggcggccacgcgcgccgcgatgctcgtccgcatcaacaccctgctgcaggggtactccggcatccgcttcgagatccttgaggcgatcgccgcgctgctcaacaccaacgtgacgccgtgcctgccgctcaggggcaccatcaccgcgtcgggcgacctggtcccgctctcctacatcgcggggctcgtcaccggccggccgaactccacggcggtggcgcccgacggcaggaaggtcggcgccgcggaggcgttcgagatcgccggcatccagcacggcttcttcgagctgcagcccaaggaagggctcgccatggtcaacggcacggccgtgggctcggggctcgcgtcgatggtgctgttcgaggcgaacgtcctcgccgtcctcgccgaggtcatgtccgccgtgttctgcgaggtgatgaacggcaagcccgagtacacggaccacctgacccacaagctgaagcaccacccggggcagatcgagtctgcggccatcatggagcacatcctggagggcagctcctacatggcgcttgccaagaagctgggcgagctggacccgctgatgaagccaaagcaggacaggtacgcgctccgcacgtcgccgcagtggttgggcccccagatcgaggtcatccgttccgccactaagtccatcgagcgcgagatcaactccgtcaacgacaacccgctcatcgacgtgtcccgtggcaaggcgctccacggcggcaacttccagggcacgcccatcggcgtgtccatggacaacaccaggctcgccgtcgcggcgatcggcaagctcatgttcgcgcagttctcggagctcgtgaacgacttctacaacaatggcctgccgtccaacctgtccggagggcgcaacccgagcctggactacggcttcaagggcgccgagattgccatggcctcctactgctccgagctccagttcctggccaaccccgtgaccaaccacgtccagagcgcggagcagcacaaccaggacgtgaactccctcggcctcatctcgtccaggaagacggccgaggccgtcgacgtgctgaagctcatgtcgtcgacgttcctggtcgcgctgtgccaggccatcgacctgcgccacctcgaggagaacctgaggagcgccgtgaaaaggtgcgtgacggtggtggccaggaagaccctgagcaccggcgccacgggagccctccacgacgcgcgcttctgcgagaaggacctgctgacggcgatcgagcgcgaggcggtgttcgcgtacgcggacgacccctgcagcgccacctacccgctgatgcagaagatgcggtcggtcctcgtcgagcacgccctggccaacggcgaggccgagcgcgacccggacacctcggtgttcgccaaggtcgccacgttcgaggaggagctccgcgcggcgctgcctcgggaggtggacgcggcccgggcggccgtggagagcggcaccgccgcgatccggaacaggatcgccgagtgccggtcgtacccgctgtacaggttcgtgcgcgaggagctcggcacggagtacctgaccggggagaaggcgaggtcgcccggcgaggaggtggacaaggtgttcgtggcaatgaacctgggcaagcacatcgacgccgtgctcgagtgcctcaaggagtggaacggtgagcccctgcccatctgctgagcggagggccgtggccgtgccccctgaccctgatcccggggagatgaagtgaagtgaagacagtacagtctacagagataacgagtttcagattgttgatgtcttgatggggcccgtggtcttcaaggtgctcactgttcctttgttttatgtcctgtgtgtaatttactgtttgcaaagctctttgtgggctgcaacaccattgcccgtgtttgcaattcgcaagcgcttggttgtggcaacccctggaactagtgttgatgtaagttaaggagtctctaagttaaaagggtactgcgtcacacaaatttcgtttcgaaagctttatatcttctg

SEQ ID NO: 102477 - DNA, 2519 bp, Zea Mays
aagagctccaaagtccatccaccaccacagctgcctcccgagctcttcttctgccacaccgcatcagcatcatcacacacatcccctcccggcccaaatggcgagcaacacggccatcctcgagagcgacccgctcaactggggcaaggcggccgcggagctgacggggagccacctcgacgaggtcaagcgcatggtggcgcagttccgcgaccccgtcgtcaagatcgagggctccagcctccgcgtcggccaggtggcggccgtggccgcggccaaggacgcgtccggcgtggccgtcgagctggacgaggaggcgcgcccccgcgtcaaggccagcagcgagtggatcctcgactgcatcgcccacggcggcgacatctacggcgtcaccaccggcttcggcggcacctcgcaccgccgcaccaaggacggggccgcgctccaggtcgagctgctcaggcatctcaatgccgggatcttcggcaacggctccgacggccacacgctcccgtccgaggtttcgcgtgcggccatgctcgtccgcatcaacaccctcctccagggctactccggcatccgcttcgagatcctcgaggccatcaccaagctcatcaacaccggcgtcagcccgtgcctgccgctgcggggcaccatcaccgcgtcgggcgacctcgtcccgctgtcctacatcaccggcctcatcacggggcgtcccaacgcgaaggccgtcacggttgacggcaggaaggtggacaccgccgaggcgttcaaggcggccggcatcgagggcggcttcttcaagctcaaccccaaggagggcctggccatcgtcaacggcacgtccgtggggtcggcgctcgccgccatggtgtgcttcgacgccaacgtcctcgccgtcctgtccgaggtcctgtccgccgtcttctgcgaggtgatgaacggcaagcccgagtacacggaccaccttacccacaagctcaagcaccacccggggtccatcgaggccgctgccatcatggagcacatcctggatggcagctccttcatgaagcacgccaaggaggtgaacgccatggacccgctgctgaagccgaagcaggacaggtacgcgctccgcacgtcgccgcagtggctcggcccccagatcgaggtcatccgcgccgccaccaagtccatcgagcgagaggtcaactcggtcaacgacaaccctgtcatcgacgtccaccgtggcaaggcgctgcacggcggcaacttccagggcaccccgatcggcgtgtccatggacaacgcccgcctcgccgtcgccaacatcggcaagctcatgttcgcccagttctccgagctggtcaacgagttctacaacaacgggctgacctccaacctggcgggcagccgcaacccgagcctggactacgggttcaagggcaccgagatcgccatggcgtcctactgctccgagctccagtacctggccaaccccatcaccaaccacgtccagagcgcggagcagcacaaccaggacgtgaactccctcggcctcgtctccgccaggaagaccgccgaggcggtggacatcctcaagctcatgtcgtccacgtacatggtcgcgctgtgccaggccgtggacctgcgccacctcgaggagaacctcaagagcgccgtcaagagctgcgtgatggcggtggccaggaaggtgctgaccaccagcctcggcggcgacctccacagcgcgcgcttcagcgagaaggccctgctcaccgccatcgaccgcgaggcggtgtacgggtactacgacgacccctgcagcgccaactcgcccctgatgaagaagatccgggccgtgctggtggaccacgccctcgccagcggcgaggccgagaaggacgccagcgcgtccgtgttctccaagatcaacaggttcgaggaggagctgcgcgaggcgctgcccagggagatggaggccgcccgcgtggccttcgagaccggcgccgcgccgatcgccaacaggatcaaggagagccggtcgtacccgctgtaccgcttcatccgccaggacctcggcgccgtgtacctgaccggcgagaagctcaagtcccccggcgaggagtgcaacaaggtgttcctggccctcagcgagggcaagctcatcgaccccatgctcgactgcctcaaggagtgggacggcaagcccctgcccatctgctgaggagtgaggaggaggacgccaccggtgccaagaggcaagacccgcaagaggaggagatgacaccgtacgcgcgcgaggaagaaataaagaagggagtatttcggtattctcaagcaggcttcatatcgtttgcgatctgaagatcattatatgttgttcctctgtactcatcttttttgtttggagcttgtagcagtgatcgtgtaaacgtgtattctgtctgttgttcttggctttctcatctgcaatatgttttggaattaaaatatactactactactactatattgagtacatggtctcctcgctc

SEQ ID NO: 102478 - DNA, 2137 bp, Zea Mays
ccgtccatcgtttctaaattctaaccgcggatcttacaccgcgctgacattattacaactgagtagtaactgacattagctccatctgttctattctctgcgacaacccaggcatctcaatgccgggatcttcggcaacggctccgacggccacacgctcccgtccgaggtttcgcgtgcggccatgctcgtccgcatcaacaccctcctccagggctactccggcatccgcttcgagatcctcgaggccatcaccaagctcatcaacaccggcgtcagcccgtgcctgccgctgcggggcaccatcaccgcgtcgggcgacctcgtcccgctgtcctacatcaccggcctcatcacggggcgtcccaacgcgaaggccgtcacggttgacggcaggaaggtggacaccgccgaggcgttcaaggcggccggcatcgagggcggcttcttcaagctcaaccccaaggagggcctggccatcgtcaacggcacgtccgtggggtcggcgctcgccgccatggtgtgcttcgacgccaacgtcctcgccgtcctgtccgaggtcctgtccgccgtcttctgcgaggtgatgaacggcaagcccgagtacacggaccaccttacccacaagctcaagcaccacccggggtccatcgaggccgctgccatcatggagcacatcctggatggcagctccttcatgaagcacgccaaggaggtgaacgccatggacccgctgctgaagccgaagcaggacaggtacgcgctccgcacgtcgccgcagtggctcggcccccagatcgaggtcatccgcgccgccaccaagtccatcgagcgagaggtcaactcggtcaacgacaaccctgtcatcgacgtccaccgtggcaaggcgctgcacggcggcaacttccagggcaccccgatcggcgtgtccatggacaacgcccgcctcgccgtcgccaacatcggcaagctcatgttcgcccagttctccgagctggtcaacgagttctacaacaacgggctgacctccaacctggcgggcagccgcaacccgagcctggactacgggttcaagggcaccgagatcgccatggcgtcctactgctccgagctccagtacctggccaaccccatcaccaaccacgtccagagcgcggagcagcacaaccaggacgtgaactccctcggcctcgtctccgccaggaagaccgccgaggcggtggacatcctcaagctcatgtcgtccacgtacatggtcgcgctgtgccaggccgtggacctgcgccacctcgaggagaacctcaagagcgccgtcaagagctgcgtgatggcggtggccaggaaggtgctgaccaccagcctcggcggcgacctccacagcgcgcgcttcagcgagaaggccctgctcaccgccatcgaccgcgaggcggtgtacgggtactacgacgacccctgcagcgccaactcgcccctgatgaagaagatccgggccgtgctggtggaccacgccctcgccagcggcgaggccgagaaggacgccagcgcgtccgtgttctccaagatcaacaggttcgaggaggagctgcgcgaggcgctgcccagggagatggaggccgcccgcgtggccttcgagaccggcgccgcgccgatcgccaacaggatcaaggagagccggtcgtacccgctgtaccgcttcatccgccaggacctcggcgccgtgtacctgaccggcgagaagctcaagtcccccggcgaggagtgcaacaaggtgttcctggccctcagcgagggcaagctcatcgaccccatgctcgactgcctcaaggagtgggacggcaagcccctgcccatctgctgaggagtgaggaggaggacgccaccggtgccaagaggcaagacccgcaagaggaggagatgacaccgtacgcgcgcgaggaagaaataaagaagggagtatttcggtattctcaagcaggcttcatatcgtttgcgatctgaagatcattatatgttgttcctctgtactcatcttttttgtttggagcttgtagcagtgatcgtgtaaacgtgtattctgtctgttgttcttggctttctcatctgcaatatgttttggaattaaaatatactactacta

SEQ ID NO: 102479 - DNA, 297 bp, Zea Mays
gaattctccggccggcgccgccccgtccgtccgtccgtccgtccgttcattccgataccgaactcgccagtcgccacagcgatctctctcgctcgctccgccgacgcagcgctcggcttcagctcgagaggaggaaatggccagcagcggctacgaagggatcctcctgggaatggggaaccccctcctcgacatctccgctgtcgtcgacgagggcttcctcgccaagtatgatgtgaagccgggcaatgccattcttgcagaggacaagcatttgccaatgtaagtctcgttgcc

SEQ ID NO: 102480 - DNA, 1449 bp, Zea Mays
gttaatctcccacagcaccctcactcttttccattatactttaccactttacaaatagacccttcaacttgttcataatacaccaacagttagtaattagtggagtatctgaaactgcccattcctgatgtcataacaaaaaaaatccctatatgaatatgactgtaagctgaaatcgaataacaaaagtagctcaaatatacaaatggtgacctgtattttcatgttctgctaggtatgacgaattggctagcaagagcaatgttgaatacattgctggaggagccactcaaaactctatcagggttgcccaatggatgcttcaaattcctggtgcatcaagttacattggttgcatcgggaaggataagtttggtgaggagatgaaaaaaaatgcacaagctgctggtattaatgcccattatcatgaggatgagaatgctccaacgggcacatgtgctgtttgtgttgttggtggagaaaggtcacttattgctaacttgtctgcggcaaactgctataagtctgaacatctgaagaaacctgagaattgggcacttgttgagaaggcaaaatatatttacattgctggatttttccttacggtatccccggattctattcaacttgttgctgagcatgccgctgcaactaacaaggtgtttatgatgaacctttctgctccctttatatgcgaggttttccgtgatgcccaagagaaagctcttccgtacgtggattacatctttggaaatgaaactgaggcgaggacctttgctaaagttcgcggttgggagaccgagaatgttgaggagatcgctttgaagatctcccaattaccgaaggcttcaggaacacacaagaagattactgttatcactcaaggttgcgatccggtagttgtggccgatgatggaaaggtgaaaactttccctgtgatcctcttgcctaaggagaagcttgttgacaccaatggtgcaggtgatgcgttcgttggtggcttcctgtcccagttggtacaagagaagaacatcgatgagtgtgtcagagctgcctgttacgccgccaatgttgtcatccaacgttctggctgcacttaccctgagaagcctgacttcaactagagccatttcagaatttagaatctattggcatctggtctgtataattagtcgggttcgccttggtctgtttgcggcacattctagtgccaccgtacaggtcaaatgttcatgcgtgtaaggcgtgtcatggcactctacaaaagtgcattcgtgcgtcacctcttgcaagggaaaccagctggttgtaagttcagccatgggcacactcttgaggccacaatatgtgccagaaatggcagtgtaccccggcctgccccggcactcggatgcgtgcatgcctctcccggttacggactctttacagttgcatctaaaacaattcaaa

SEQ ID NO: 102481 - DNA, 2546 bp, Zea Mays
caataattgaagcaatctccagtggttcagacttcagaggtgctctaggcttcaaggggcggctgggtgagggcagtgctcataactaaatgcccaaagttaggatatatccagcaaaggacagaatgaaagtggtctctgtacaccttgctgctgctgttgctgttctacttctgttggcggcgaagcgcacccccgctattgcggttcctagccctcagtgccaacggcaatgtggcggcgttgacattgcgtttccgttcggcatcggtgacaactgctcgctatcacgaggattcaacctcagctgccaggaggtccaaaatggcgtctacaggccattcctaggtaatattgaggtgctcaacatctccttgataaatggcacggtccgggggctgaaccccgtctcgacatactgctacgactcctcctctggttccatggagcccagtacctggtcattcgacgtgagcagaaccccgtaccggttttcggacgtccagaacaagttcaccgtcatagggtgccagaccctcgtctacatcaaggacaacaccgacaagagctaccagagtgggtgcgtctcgacgtgccagagcctgtcggacgtggtggacggcggctcctgctccggcaggggctgttgccagacggccatacccaaggggatggactactacaacgtgagcttcgacgcaagcttcaacacgagccggatttggagcttcagccgctgcagctacgccgtgctgatggaggcggcggcgttccgtttcagcaccgcgtacatcaagacgacccgattcaacgacacgagcgctgggcaggtgcccgtggtgatggactgggcgatcagggagagggaggcggcgtcgtgtgtggtcgccaaacagaacgggacgggctcttacgcatgcgtcagtagcaacagcgagtgcgtggattcacaaaatgggccagggtacctgtgcaactgcacccaggggtacgaaggcaacccataccttccaggcggatgccatgatgttgatgaatgtaaatacagcccatgtcctacgggtgccgtctgccacaacacggtaggaggatacagatgctcatgccgagcaggactcaagttttctgaacaaagcaatagttgtggccctaatatcaacctaataattggtcttgcactaagtagtgccggtgccattctgattgtcgctgcagctgttgctatctttacacggaggtggcagagaatcgttcagaaaaggcttagaaagaggcactttcacaagaacaagggtattctcctagagcaactgttctcgtcatcagcagataacaacgctagtgacggtacgaagatattctctctggacgacctacagaaggccaccaacaacttcgaccgcacacgtgtggtcggcaacggcggccatggcacggtctacaagggcatactggctgatcagcgcgtggtggcaattaagaaatcgaaactcgtagagagcaccgaaatcgagcagttcatcaacgaggtggccatactctcacagatcaaccatcgcaacgtggtgaagctccatgggtgctgcctcgagtccgaggtccctctgctcgtctacgagttcatctccaatggcacgctgtacgatctcttgcaccaccgcgaccgcgagcaagacggacgacgacgaaccttgctgcagcagctgccctgggaggcacgcctgaggattgcagctgaggtcgccggcgcgcttacgtatctccactcagcagcatccgtgtccattcttcatagagacgtcaagtccatgaacgtgcttttgaatgacagctacacggccaaagtctccgattttggcgcgtccaggtctataccgattgaccagacacatctggtcactgctgtgcagggcacatttgggtatctagatccagagtacttccacacaggccaactcaacgagaagagcgacgtctacagtttcggtgtcattcttctcgagttattgacaaggaagaaaccgatcgtcgatggtgacagcggttacaaggtaaacttgtccagttatttcttatgggaaatggagaggaggccgcttgaagagatagtcgacgtcggaattataggggaagcaagtacggaagcgattctaggcatggctcaactggcagaggagtgcctcagcctaacaagggaggacaggcctaccatgaaggatgtggagatgaggctacaaatgttaaggtgtcagcaagatgttgctccaagggcacatccagcaaagagaacaaatatgattagtcatgctattccgatgcctgctagccagcacggctcacgccaatacagccaagagcaggagtttgtcttgtcctcgcgtgtaccacgatagattgttggcagaaaatatgtgtttttattggctagaatataaaacataaaaatatgtgtttttattggctaggtggatatgaatgagagtttataaccaacaaccatggttcaaaatgtttggatgttaactatgtctatgtcgttgtctgtg

SEQ ID NO: 102482 - DNA, 2568 bp, Zea Mays
caataattgaagtaatctccaaaggttcagacttcagaggtgctcttggcttcaaggggcggctgggtgagggcagagctctcaactaaatgcccaaaggatatatccagcaaaggacagaatgaaagtggtctctatacaccttgctgctgctgttgttgctgttctacttctgttggcggcaaagcgcacccctgctattgcggttcctagccctcaatgccaatggcaatgcggcggcgttgacattgcgtttccgttcggcatcggtgacaactgctcgctatcagcaggattcaacctcagctgtcaggaggtccaaagtggcgtctacaggccattccaaggtaatattgaggtgctcaacatctccttgataaatggcacggtccgggagctgaaccccgtctcgacatactgctacgactcctcctctggttccatggagtccagtacctggtatttcgacgcgagcggaaccccgtaccggttttcggacgtccagaacaagttcaccgtcatagggtgccagaccctcgcctacatcacggacaacaccgacaagagctaccagagtgggtgcgtctcgacgtgccagaatgtgtcagacctaacggacggatcctgctccggcatgggatgctgccagacaaacatacccaagaagatgggcttctacaacgtgagcttcgaccctgcctccgacacaagccaaatctcacggctgggcctcggcagctgcagctatgccgtgctgatggaggcggaggagttcagcttcagcaccacgtacatcaccaacacgacagctttcaacgacaccaacagtgggagggtgccggtggtgatggactgggcgataagagatgatggcgcgccgtcgtgtgagctcgccacaaggaacgagacgggcacttacgcgtgccgcagcggcaacagcaagtgtgtggaatcccccaatgggccagggtatctgtgcaactgctccggtgggtacgaaggcaacccatatcttccagatggatgccatgatgtcgacgagtgcaagaagaacagtccatgcccttcagtaggaggtgtatgccacaacacggtcggagcgtacaggtgttcttgtcgagcaggaagaaggcttaacaagcaaaacaatacgtgtgaccctgataccacattaataacaggggttacaatcggcttccttgttctcgtaatcttctcctccttcggatacatgatcctccagaagagaaaactgaaccaggttaagcaagatcattttcggcagcacggaggcatgattttgttcgagaggatgagatcagaaaatggccttgctttcacggtgttcagtgaagctgagcttgtaaaagctacagacagctacgacaagagcagaataattgggaagggaggccatgggacagtctacaaagggatagtcaagggcaacgtgccgatcgcgattaagcgatgtgcgcttattgacgacaggcagaagaaagagtttggtcaggagatgctgatactctcccagatcaaccacaagaacatcgtcaagctcgagggctgttgcctcgaggtggaagttccaatgctggtctacgagttcgttccaaatggcaccctctacgaactcatccatggcaagaaccaagcgctacagatccccttcagcaccctactgaggatcgcccatgaggcagcagagggcctcagttttctgcactcgtacgcgtctcctccgatcatccatggcgacgtgaagagcgccaacatccttcttgatggcaactacatggccaaagtgtcagattttggggcctccatactagcgccgtccgacaaagagcagtatgtcacgatggttcaaggtacctgtggatacctcgaccctgaatacatgcagacatgccaactgactgagaagagtgacgtctacagcttcggcgtcatccttcttgaggtcctcaccggccaagagcctctcaagttggatgggcctgagacgcagagaagcttgtcatcgaagttcctgtccgctatgaaggagaacaatcttgatgtgatcttgccgagccacgtgaatggtggacaagggagcaatgaactgatcagagggctcgcagagctagccaagcagtgcctggacatgtgtggctgcaacagaccatccatgaaggaggttgccgatgagcttggtagattgaggaagctttcgctgcatccttgggtacagatcgatgcagagatgatagagtctcaaagccttcttagtgggacaacgactgctagctttgaaatagaagttggtacaactgggtatcctacacaggaagctgagaacctgcccatgaacccaagaagttcgtactatgcgaggtaggtgattagcgtatgttgttgtgtactccgttgaaatttctactgctaggataacagcaagctagcagttctgttatcaaagatatactgcatattgacacaaatctctgcctatctttagccattcaaaagtatgtatatgtgtttctgcgcagcacgtctgcaacatatataatccggtttttt

SEQ ID NO: 102483 - DNA, 2659 bp, Zea Mays
caataattgaagtaatctccaaaggttcagacttcagaggtgctcttggcttcaaggggcggctgggtgagggcagagctctcaactaaatgcccaaaggatatatccagcaaaggacagaatgaaagtggtctctatacaccttgctgctgctgttgttgctgttctacttctgttggcggcaaagcgcacccctgctattgcggttcctagccctcaatgccaatggcaatgcggcggcgttgacattgcgtttccgttcggcatcggtgacaactgctcgctatcagcaggattcaacctcagctgtcaggaggtccaaagtggcgtctacaggccattccaaggtaatattgaggtgctcaacatctccttgataaatggcacggtccgggagctgaaccccgtctcgacatactgctacgactcctcctctggttccatggagtccagtacctggtatttcgacgcgagcggaaccccgtaccggttttcggacgtccagaacaagttcaccgtcatagggtgccagaccctcgcctacatcacggacaacaccgacaagagctaccagagtgggtgcgtctcgacgtgccagaatgtgtcagacctaacggacggatcctgctccggcatgggatgctgccagacaaacatacccaagaagatgggcttctacaacgtgagcttcgaccctgcctccgacacaagccaaatctcacggctgggcctcggcagctgcagctatgccgtgctgatggaggcggaggagttcagcttcagcaccacgtacatcaccaacacgacagctttcaacgacaccaacagtgggagggtgccggtggtgatggactgggcgataagagatgatggcgcgccgtcgtgtgagctcgccacaaggaacgagacgggcacttacgcgtgccgcagcggcaacagcaagtgtgtggaatcccccaatgggccagggtatctgtgcaactgctccggtgggtacgaaggcaacccatatcttccagatggatgccatgatgtcgacgagtgcaagaagaacagtccatgcccttcagtaggaggtgtatgccacaacacggtcggagcgtacaggtgttcttgtcgagcaggaagaaagcttaacaagcaaaacaatacgtgtgaccctgataccacattaataacaggggttacaatcggcttccttgttctcgtaatcttctcctccttcggatacatgatcctccagaagagaaaactgaaccaggttaagcaagatcattttcggcagcacggaggcatgattttgttcgagaggatgagatcagaaaatggccttgctttcacggtgttcagtgaagctgagcttgtaaaagctacagacagctacgacaagagcagaataattgggaagggaggccatgggacagtctacaaagggatagtcaagggcaacgtgccgatcgcgattaagcgatgtgcgcttattgacgagaggcagaagaaagagtttggtcaggagatgctgatactctcccagatcaaccacaagaacatcgtcaagctcgagggctgttgcctcgaggtggaagttccaatgctggtctacgagttcgttccaaatggcaccctctacgaactcatccatgtcaagaaccaagcgctacagatccccttcagcaccctactgaggatcgcccatgaggcagcagagggcctcagttttctgcactcgtacgcgtctcctccgatcatccatggcgacgtgaagagcgccaacatccttcttgatggcaactacatggccaaagtgtcagattttggggcctccatactagcgccgtcggacaaagagcagtatgtcacgatggttcaaggtacctgtggatacctcgaccctgaatacatgcagacatgccaactgactgagaagagtgacgtctacagcttcggcgtcatccttcttgaggtcctcaccggccaagagcctctcaagttggatgggcctgagacgcagagaagcttgtcatcgaagttcctgtccgctatgaaggagaacaatcttgatgcgatcttgccgagccacgtgaatggtggacaagagagcaatgaattgatcagagggctcgcacagctagccaagcagtgcttggacatgtgtggctgcaacagaccatccatgaaggaggttgccgatgagcttggtagattgaggaagctttcgctgcatccttgggtacagatcaatgcagagatgatagagtctcaaagccttcttagtgggacaacgactgctagctttgaaatagaagttggtacaactgggtatcctacacaggaagctgagaacctgcccatgaacccaagaagttcgtactatgcgaggtaggtgattagcgtatgttgttgtgtactccgttgaaatttctgctgctaggataactgcaagctagcagttctgctatcaaagatatactgcatattgacacaaagctctgccgcctatctttagccattcaagtatgtatatgtgtttctgcggagcacgtctgcaacatatataatacggtctttttttaatgtggtgctcttagttaatactccttgacaataaattatatagcttatttctttagataagtttatacacctgaaacattatcag

SEQ ID NO: 102484 - DNA, 336 bp, Zea Mays
atggggacggcttcaacaagcccagacaccatggaggcggcaaggctccccggtctctccatcaccgtcgagaagaacccgccggaggcgcgcttgcttcaactcggcgtcaagtcctggcccaaatggggatgtccgccggggaggttcccgctcaagttcgacgcggcgctgacgtgctacctagtgaagggcagggtgagggccgccgtgaagggctcccgcgagtgcgtggagttcggcgccggcgacctcgtcgtcttccccaagggcctcagctgcacctgggacgtcgtcgtcggcgtcgacaagcactacaacttcgacccctcctaa

SEQ ID NO: 102485 - DNA, 1812 bp, Zea Mays
cacccatatcccacgccacaccctcacgccgccatacctttccaacgctacgccggccggagggacagagagccagccaagggaagatggcgacgtgcgcgacggacctggcgccgctgctgggcccggcggcggcgaacgccacgggctacctctgcagccagttcgcggacacggcctccgcggtggacgccacgtacctgctcttctcggcctacctcgtcttcgccatgcagctcggcttcgccatgctgtgcgccggctccgtccgcgccaagaacaccatgaacatcatgctgaccaacgtgctggacgccgccgccggggcgctcttctactacctcttcggcttcgccttcgccttcggcacgccgtccaacggcttcatcggcaggcacttcttcgggctccagcgcctgcccaggaccggcttcgactacgacttcttcctataccagtgggccttcgccatcgccgccgcgggcatcacgtcgggctccatcgccgagaggacccagttcgtcgcctacctcatctactccgcgttcctgacggggttcgtgtaccccgtggcgtcccactggttctggtccgccgacgggtgggccgccgccggccgcacgtccggcccgctgctcttcgggtccggcgccatcgacttcgccggctccggcgtggtccacatggtcggcggcatcgcggggttctggggcgcgctcgtcgagggcccccgtatcgggcgcttcgaccacgccggccgctccgtagcgctcaggggccacagcgcgtcgctcgtggtgctcggcaccttcctgctgtggttcggctggtacgggttcaaccccgggtcgttcaccaccatcctcaagtcgtacggccccgccgggaccgtccacgggcagtggtcggccgtgggccgcaccgccgtcaccaccaccctcgccggcagcgtcgccgcgctgaccacgctgttcgggaagcggctccaggcgggccactggaacgtggtggacgtctgcaacgggctcctcggcgggttcgcggccatcacggccgggtgcagcgtggtggagccgtgggcggccgtcgtgtgcgggttcgtgtccgcgtgggtgctcatcggcgccaacgccctcgccgcgcgcctcaggttcgacgacccgctggaggcggcgcagctgcacggcgggtgcggcgcgtggggcgtcctcttcacggggctcttcgcgaggcaagagtacgtggaggagatctacggtgccgggaggccctacgggctgttgatgggcggcggcgggaagctcctggccgcgcagatcgtccagatcgtggtgatcgccgggtgggtgagctgcaccatgggcccgctcttctacgcgctcaagaggctggatctgctgcgcatctcggccgacgacgagatgtccggcatggacctgacgcggcacggtgggttcgcttacgaggaccctggcgacaatgcaggggttggtgagttcacgctcaagtcggcgcagaaccgtgtcgagccgccggcgagcagcaaccgggtgtaaaattcaggaacgaattaaaaccgagatgaagctacgtgcttgccttttttctcagtgtgatatcgcgtaccatatttgatctcgatcgtatctgccgccactgtttgggcaatacttcgccactttggagtcgcaatcgcaagagtttgtgtaaactatagaagagcgtggcgacgaagcacgaacgtatgtgtgtgtgttttggttggggtttttgtgttacatgcgtgtgttttaaggtgcgtttggttgaatg

SEQ ID NO: 102486 - DNA, 704 bp, Zea Mays
gactgagcaactctaacaaatagtgtaaatcaaccccaaaagcattagcaggagagaaaaaatgtgttttgtcccctccaacaggcccccttcttctcctcaatctcttcgtgtcccgcatccggtggcgttggtcatgcaaatatgcgcgccctgtgatttcccctatcgctgcagtgcccgctcccgtggctgctttcccgcgctttttgcctcgcgcgccgtagtggtggtgtgtggaacttggaaggcgcgagcgcgcaagcctctgtgggctgccgcagaggtttctgcgtccgaggagcaagacgctcgatctgaagtgcacgaggtggcgacagagtcttctgtggtgctggacgaggtggggggacatcgatccgcagtggaggcacgcggttgtaacttctgcgctgttagccggggcagggggctccatccgcgatgaatgtgcgcgcccgtggcttctgcggtggtggccgaggcagggggaagctcgatccgcggtgaaggcgcgcgtccgtggcttctgcgctggtggccaaggcgggggaagatgccgatcgcacgtgctggttcttcaattccgccgtcgccttgcaccggaggtcggattccccaaaggcatatggtcggcgacggatccatcacctgcgatggtggagaagctttgcgaccaagaaaccaaggtggaggaccatcgc

SEQ ID NO: 102487 - DNA, 795 bp, Zea Mays
attgcgcattcacttagttgtaccacttgtatgttgcttcattcaaaaacttgttattatgttgacttgtgaccgaactttgatttatgcactgaacacctaacctatatctagcttatgtacccttttttagatgtagttctaggcaatggatacttttcaaacttgactatggatgacaatagtcaaggggatgttcatgctaataagcaacacatgtcctgatattcagtctcagtcaatgcaagctggagcaacagcccccacgacgaggccaaatcataagagataaaaaaaaatcagtggtcaggatgatgaagtttaggtgttagcttggttatatattagtttagatcatgtggttggcaaatataaaaaagtaggaaggtattggtctcgtatctacgagtacttaaatgaacataaaccatgtcaatcacagcgtacctttaattctcttatgcaccgatgggagacaattcagaaatgtgttaacaagttttgtggttgtttatcaaggattgagttaagacgacagagtggtagtacaatgcaagacatggttgcacaggcatgttcgttgtgcaaaactctggacaggttgcaaaactctggacaggatgcaaaatcactatttgctgtcacggctaccagtttgcatttgtgacttcggttcctgtaatggtgggcgagagaaagtaggtgtcagtaactgtgtggtaattattagtatgaacttatctcagtaatttgtgtggtaattgttagtatgaatgtatatcagtttggttccaa

SEQ ID NO: 102488 - DNA, 952 bp, Zea Mays
attgcgcattcacttagttgtaccacttgtatgttgcttcattcaaaaacttgttattatgttgacttgtgaccgaactttgatttatgcactgaacacctaacctatatctagcttatgtacccttttttagatgtagttctaggcaatggatacttttcaaacttgactatggatgacaatagtcaaggggatgttcatgctaataagcaacacatgtcctgatattcagtctcagtcaatgcaagctggagcaacagcccccacgacgaggccaaatcataagagataaaaaaaaatcagtggtcaggatgatgaagtttaggtgttagcttggttatatattagtttagatcatgtggttggcaaatataaaaaagtaggaaggtattggtctcgtatctacgagtacttaaatgaacataaaccatgtcaatcacagcgtacctttaattctcttatgcaccgatgggagacaattcagaaatgtgttaacaagttttgtggttgtttatcaaggattgagttaagacgacagagtggtagtacaatgcaagacatggtaataactaatcattatgaagtatcatatttgtagtattttttacttgttcctaacatatgcaaaactctggacaggttgcacaggcatgttcgttgtgcaaaactctggacaggttgcaaaactctggacaggatgcaaaatcactatttgctgtcacggctaccagtttgcatttgtgacttcggttcctgtaatggtgggcgagagaaagtaggtgtcagtaactgtgtggtaattattagtatgaacttatctcagtaatttgtgtggtaattgttagtatgaatgtatatcagtttggttccaattgctacttgtcttagcacatgttctctgtcaaattgttatttgtctcattaattgttctgtcaaattattacttgtcaa

SEQ ID NO: 102489 - DNA, 195 bp, Zea Mays
gtctggaaggcacgcgcagaaccaaaatgcaaaatttttgcttggattctcctgcaggaaaaactactcacggccaacaatctcgccacccgtgggtggcctcatcagtcgtcttgtgccttctgcaacggaacccttgagactagtattcacatgtgtctacattgtcctttcgcccgtgcggtgtggagacaa

SEQ ID NO: 102490 - DNA, 1315 bp, Zea Mays
aagcagaatgcagtgaaaggctgccattttaaaaccttgctctccggtataaaaaaaccttgctctccttctccgctcgatccccaacccacccgcacggcaccaccaccaatccatccatccttacgcattagctacactccccggcgtcgagcccccgcgaaccctagaccgccgccctcgcatctccgctcgtcgccgcggggtactccctccacccgtctagtgggagtcgcggcgggacgtccccgatccgagctctctccgccttagggtttttggggccggccatggactccatggagcagccggagcccaaaaccgcgggccactactacgcccttcaggttggctccgttttcctgacgggctactacaacgtcctgacgaaccagccgcacctggcgaaccagttctacacggacaacagcagtgttgttagactggactgcgagacgggtcggtggtcgtttggagagacggtggaggttatcaatgatatgatgatgtccatgaaactaagcaaggttgaggttaaaacagcgaatttcttagagtcatgggctggggcgattacgctgttggttactggcctagtgaaattgaagcactaccctgttcgcaagcgatttgctcagaatattgttcttgctccaaaggaagatggatattttatattcagtgacatctttaagctcatttgtgatgagtatgatgatcagtacccttttgctgattacaattgtgctgacaacatgccccaagtggaagcgtcttacacaatggctgaaatagggtctgattatttggatggagaacctgaggcacaggagactgttgatcctgctgaaaatcatgtgcagcaccaagattatttggaatataaggctggcaatgtgattgatgatgaaactcatttggaagagcatattcccccattccccagttcaacggatgttaaaagggattcacctcttgctcttccccaccctccatcacctaccctcgaagaacctgtggaagaagcacccaagacatatgcttcagtgttgcgaacgaaatcaaaggcaacgctggcgattacagagtcacagcaggctcaacagctggcccagcagccacagtctgcctcagtgcatgaaaagtctaacctggacaaccaccgggatgttagcgtccctgaggatgaaggtctttttccttttttgttcactgtttcactcatgcttctgatgagtttttattggacctatgtttaaaatgtcttgtcattaaaacaatttataggtaatgaacatggctaaaaatccattcg

SEQ ID NO: 102491 - DNA, 2117 bp, Zea Mays
aagcagaatgcagtgaaaggctgccattttaaaaccttgctctccggtataaaaaaaccttgctctccttctccgctcgatccccaacccacccgcacggcaccaccaccaatccatccatccttacgcattagctacactccccggcgtcgagcccccgcgaaccctagaccgccgccctcgcatctccgctcgtcgccgcggggtactccctccacccgtctagtgggagtcgcggcgggacgtccccgatccgagctctctccgccttagggtttttggggccggccatggactccatggagcagccggagcccaaaaccgcgggccactactacgcccttcaggttggctccgttttcctgacgggctactacaacgtcctgacgaaccagccgcacctggcgaaccagttctacacggacaacagcagtgttgttagactggactgcgagacgggtcggtggtcgtttggagagacggtggaggttatcaatgatatgatgatgtccatgaaactaagcaaggttgaggttaaaacagcgaatttcttagagtcatgggctggggcgattacgctgttggttactggcctagtgaaattgaagcactaccctgttcgcaagcgatttgctcagaatattgttcttgctccaaaggaagatggatattttatattcagtgacatctttaagctcatttgtgatgagtatgatgatcagtacccttttgctgattacaattgtgctgacaacatgccccaagtggaagcgtcttacacaatggctgaaatagggtctgattatttggatggagaacctgaggcacaggagactgttgatcctgctgaaaatcatgtgcagcaccaagattatttggaatataaggctggcaatgtgattgatgatgaaactcatttggaagagcatattcccccattccccagttcaacggatgttaaaagggattcacctcttgctcttccccaccctccatcacctaccctcgaagaacctgtggaagaagcacccaagacatatgcttcagtgttgcgaacgaaatcaaaggcaacgctggcgattacagagtcacagcaggctcaacagctggcccagcagccacagtctgcctcagtgcatgaaaagtctaacctggacaaccaccgggatgttagcgtccctgaggatgaagaagagtttctttcggtttatgttgggaatctttcgccatctacttcggtctttgatcttgagaaagtgttccaggcttttggaagaattaaacctgatggagttgctatccgaagccgcaaggaggctggagtattctttggctttgttgagttcgaagacatgtctggtattcagaatgctttaagtgcatctccagtagagttaaatggccgttttgttcatgttgaagagaggaggcctaactgcggattccctcgtggaagaagaggccgtggaagagctgatttctcaagggaccaagctggtgggagatacgacggggagtatgctactcgatcgaaaggaattgggcaccagaaaaaaactggacgccagtatgacagttactactagttatgtaccgctctgctggtaaatggccgtgtaccattggtgttctctacttggtgctgttctggccataattttgctaaaagtcacaatgatgtcgggactagtatttctgctttgttgacattcggcggagtcttttttgggggatgggcatctgttaccattttgttgcgtcacagtagtttttggttctcagttaccgtgaccagttacaaatggatcatgctaccgtcggtgtcaaactttttaagcaatacctaggttgtacttgtaccgatgttaatagttggggaaatttggatccataccattcaaagatcaccactttggatccataccattactatctcacttacatgtgggtccacatgagtcaatgactacatgtgggtccacatgagtcaatgacatgtggggtccatggtatatatctaaagtttggatcttttaatgatatagatccaattgttcctaatagttggtattcttagattgacatagtttgcatacgtcggtattcacgttggtgtt

SEQ ID NO: 102492 - DNA, 950 bp, Zea Mays
ataatatatatgtacagttatgcccacaaaatgtttttggacatagatcgattctcttctgttgtacatttttatgtagccttaactgtttggtttcgtttttcagaagagtttctttcggtttatgttgggaatctttcgccatctacttcggtctttgatcttgagaaagtgttccaggcttttggaagaattaaacctgatggagttgctatccgaagccgcaaggaggctggagtattctttggctttgttgagttcgaagacatgtctggtattcagaatgctttaagtgcatctccagtagagttaaatggccgttttgttcatgttgaagagaggaggcctaactgcggattccctcgtggaagaagaggccgtggaagagctgatttctcaagggaccaagctggtgggagatacgacggggagtatgctactcgatcgaaaggaattgggcaccagaaaaaaactggacgccagtatgacagttactactagttatgtaccgctctgctggtaaatggccgtgtaccattggtgttctctacttggtgctgttctggccataattttgctaaaagtcacaatgatgtcgggactagtatttctgctttgttgacattcggcggagtcttttttgggggatgggcatctgttaccattttgttgcgtcacagtagtttttggttctcagttaccgtgaccagttacaaatggatcatgctaccgtcggtgtcaaactttttaagcaatacctaggttgtacttgtaccgatgttaatagttggggaaatttggatccataccattcaaagatcaccactttggatccataccattactatctcacttacatgtgggtccacatgagtcaatgactacatgtgggtccacatgagtcaatgacatgtggggtccatggtatatatctaaagtttggatctttt

SEQ ID NO: 102493 - DNA, 1457 bp, Zea Mays
atatacacagtgtctcggagttgctcttacaacccgtagacagtcgcgcaaatgttgcgagcggccgcgtcgaggtgcgcccgcggcgccgtccggcggctgtcgtcgtctgcggtgatggaggcttcaccagtcgccgtggggtcgcggtggcagtctctccttgacgagggtgactggtcgtaccatcgggagtggtggggcgaggaggacggccccggcgagggcgtgcagaccgtcttccgccgccactccgagtgcggcaacggcgtcgtctccgtctccgcctaccctgcttcccttccggctagtgagcattggccagccatggagagatggcttcaagagagtaattcaagactatacccagaatcagccagctctgaccagtttaaggtactaggctaccagtggcgagtgatgcgttttaatgaccatacacggcaaagcactgcaaaagtgatgacatgttataggacttcgggtcagagatcattattcttgatgcagcaaccacatgttttagctgttccttatgtcaagagtatggtatcagcaggattgacagcgctctcatgttcttcgtatgatctaccacaagcagcatctggacagaacaccatgaaaattctgtgcatcggccatggtggcggcagcttaccattgtttttggctagcaagttcagaggtgctaccatccacattgtggaaatcgatccggtggttgtttcagcatcagttgaatccatgggtttccccgcgtcacccgttaaaggcttatcgcccgagtccatgctaccttccgacgccgacgacctattatggggaggcatacacgaccgcgtcttcctgcacacagcagacgccgaggatttcattggcagcgacggcaacgagtatgacatcgtcttcatcgacgcctacgacggagacgacgtgttccctcgcaagctctgggacgtggacggggcgttcatgaagagcctagagaagagagtgcaccccgtccacggcaccgtggtcgtgaacctgcactccgactcagactccgaggccgcggaaggcaacgccgacttccagagcgcgcttcccatgggcaggcacgtctcccaggtctgcagggcttacatgcagcacttcggggtggccttcacggccgcggtcccgtggctctgcaacatcacgctcgtcgcctgccgcgccggcgggatggcgggcggcgcgcgccgggggctgagccgcagggatctcgtccttggcaagcttctgtccaagtccgacacggtggagcgcgcgctgggcctgccgttcccgtgtctgccctacatcaagaacggcttcacgatggttcactgacatgcatggggtttatgtggaatttggttattttgaatggtatgttttggcctggaaaccgccttgttttgtgctctaaaatgaatttggggtgatgatgc

SEQ ID NO: 102494 - DNA, 1332 bp, Zea Mays
atatacacagtgtctcggagttgctcttacaacccgtagacagtcgcgcaaatgttgcgagcggccgcgtcgaggtgcgcccgcggcgccgtccggcggctgtcgtcgtctgcggtgatggaggcttcaccagtcgccgtggggtcgcggtggcagtctctccttgacgagggtgactggtcgtaccatcgggagtggtggggcgaggaggacggccccggcgagggcgtgcagaccgtcttccgccgccactccgagtgcggcaacggcgtcgtctccgtctccgcctaccctgcttcccttccggctagtgagcattggccagccatggagagatggcttcaagagagtaattcaagactatacccagaatcagccagctctgaccagtttaagatgtcaagagtatggtatcagcaggattgacagcgctctcatgttcttcgtatgatctaccacaagcagcatctggacagaacaccatgaaaattctgtgcatcggccatggtggcggcagcttaccattgtttttggctagcaagttcagaggtgctaccatccacattgtggaaatcgatccggtggttgtttcagcatcagttgaatccatgggtttccccgcgtcacccgttaaaggcttatcgcccgagtccatgctaccttccgacgccgacgacctattatggggaggcatacacgaccgcgtcttcctgcacacagcagacgccgaggatttcattggcagcgacggcaacgagtatgacatcgtcttcatcgacgcctacgacggagacgacgtgttccctcgcaagctctgggacgtggacggggcgttcatgaagagcctagagaagagagtgcaccccgtccacggcaccgtggtcgtgaacctgcactccgactcagactccgaggccgcggaaggcaacgccgacttccagagcgcgcttcccatgggcaggcacgtctcccaggtctgcagggcttacatgcagcacttcggggtggccttcacggccgcggtcccgtggctctgcaacatcacgctcgtcgcctgccgcgccggcgggatggcgggcggcgcgcgccgggggctgagccgcagggatctcgtccttggcaagcttctgtccaagtccgacacggtggagcgcgcgctgggcctgccgttcccgtgtctgccctacatcaagaacggcttcacgatggttcactgacatgcatggggtttatgtggaatttggttattttgaatggtatgttttggcctggaaaccgccttgttttgtgctctaaaatgaatttggggtgatgatgcagccgactgatatc

SEQ ID NO: 102495 - DNA, 1560 bp, Zea Mays
acccgtagacagtcgcgcaaatgttgcgagcggccgcgtcgaggtgcgcccgcggcgccgtccggcggctgtcgtcgtctgcggtgatggaggcttcaccagtcgccgtggggtcgcggtggcagtctctccttgacgagggtgactggtcgtaccatcgggagtggtggggcgaggaggacggccccggcgagggcgtgcagaccgtcttccgccgccactccgagtgcggcaacggcgtcgtctccgtctccgcctaccctgcttcccttccggctagtgagcattggccagccatggagagatggcttcaagagagtaattcaagactatacccagaatcagccagctctgaccagtttaaggtactaggctaccagtggcgagtgatgcgttttaatgaccatacacggcaaagcactgcaaaagtgatgacatgttataggacttcgggtcagagatcattattcttgatgcagcaaccacatgttttagctgttccttatgtcaagagtatggtatcagcaggattgacagcgctctcatgttcttcgtatgatctaccacaagcagcatctggacagaacaccatgaaaattctgtgcatcggccatggtggcggcagcttaccattgtttttggctagcaagttcagaggtgctaccatccacattgtggaaatcgatccggtggttgtttcagcatcagttgaatccatgggtttccccgcgtcacccgttaaaggcttatcgcccgagtccatgctaccttccgacgccgacgacctattatggggaggcatacacgaccgcgtcttcctgcacacagcagacgccgaggatttcattggcagcgacggcaacgagtatgacatcgtcttcatcgacgcctacgacggagacgacgtgttccctcgcaagctctgggacgtggacggggcgttcatgaagagcctagagaagagagtgcaccccgtccacggcaccgtggtcgtgaacctgcactccgactcagactccgaggccgcggaaggcaacgccgacttccagagcgcgcttcccatgggcaggcacgtctcccaggtctgcagggcttacatgcagcacttcggggtggccttcacggccgcggtcccgtggctctgcaacatcacgctcgtcgcctgccgcgccggcgggatggcgggcggcgcgcgccgggggctgagccgcagggatctcgtccttggcaagcttctgtccaagtccgacacggtggagcgcgcgctgggcctgccgttcccgtgtctgccctacatcaagaacggcttcacgatgccgactgatatcaaagactacgcttgctgcacaaaggaaatggccggaaacatcctgcaggcccgggttggagcggctgttgcggtgcacaaaagactcgactactgtgattccggcaaccgtatgagagaagtcgtggccgccgccgccgcaggctcaggggcgcgcacgtgaggtacattaaactggacgcatggcaggccacgagatgcttgcggttgccgatagaggcctttaccctcaa

SEQ ID NO: 102496 - DNA, 1154 bp, Zea Mays
aggccaggcctccctcgacgaagaaacatccccgccttttcctctgcctcatgtgagtgagaacagagaagccgagggagatcggaggatgctgctgaggagctcgtccacgccgttcccgctccccttcctctcctcctccctgcacctccgccgcgccttctccgacgcccacctcccctccctccacccgccgtcatccacccccaacgacgccggcaggaccagcaaccccggacgcggcggcctccacacggagctctccttctccgtctacaacaccttcggcaagggcgaggccgtactcgccccgctggcgtcgccaccccgctcccagggacaggaagggggtcggcagcctccgccgactgtggtggtgcagccggagcacccggaggtgccgctgttcctcgccaggggcctcgggatcgaccgcatcgcctccggcttcttcaccgcgggcgccgacttgaaaggctgcggagccagcatggaggagcagcaggacgaggctgtggccgcgctggacgcgcagtacaagaccatggtcgacgagcagcccggcaacgcgctgttcctgcgcaactacgcgcagttcctccacgaggcgaagggcgacaccgcaagggccgaggagtactactcgcgcgccatgctcgcggatcccagcgacggcgagatcatgtcgcagtacgccaggctggtctgggaggtgcaccacgacccggagaggtgcctcggctacttccagcagtcggtgcaggcggccccgttggacagccacgtcctcgctgcgtacgccagcttcttgtgggagcaggacgacgacgactgcggagaccaagggacggcgggtggagcggcggcacaggagcgcgccgcgggaacagggcaagccatggagctggcgtccgcggccgtctgatcctttccactcctgacaggggacagcgcaggcgcgctatagcaaaatgcagtataaaatgcatggcgtatcaacggttataaagtatgaaatataaactgaataataagaataaaagaactcatgcggatatatacaaggtggagtggtgcggtgtaaaagtgtgttttctccctgaagaacaagccaattattctaattatctatgtcaattgtcaaattatatgtt

SEQ ID NO: 102497 - DNA, 683 bp, Zea Mays
atttcctttcgcctcttgcagttgcagatctccgccgtgccgctggagccgtccacccatggaggtggccgccgccggtcgctactcgctaccttctctcccgtctgtgggtccactgcggcgcggagagggggaacctgggaggttggcgaggccggctgcgaggtgggaccgtgggagggcatccgggccagccggacaggatgttgagggccggccgactcctgcagtcccgtcgccgtcggtgagttccgggaatacatggatttgtagagcgttcgcggcaggaggaaggaggcgagctcggcgacggcttcggggagcttgttgtagatggaccatggacctgtggagcgcaggcgcggaggcggccgagaggagcacgcgcggagcgtgtactaccgactgcgtggcgggcgaacggcgcgtggttgatgacggactggaacgacggagcgatgacaatgaggccgccatgggcgctgaagggtcaggggtgtgccgaccggggagagcagcagtagccgaggcttagcgctagcgccgtagcgcgtcccggtaggaccggtgactgtgtgttttgcctcgttggccgtgcagcgccgccgggtcggcgcccagcaccaccgccgtgccacccgcgcccgcgggtccatggggcacggaatgacgcgggccgaggg

SEQ ID NO: 102498 - DNA, 747 bp, Zea Mays
atgggtcatggctccaggttacctggtccaaatcatcgttcaggttcagttgataataatgttaaattttgggaccttgaaacttttgagttgatcggttcttctggacctgagggtatggggcctctatcccacaattatcttctcagagtagcgcacctcagtaatcctcttatggtggatatcagggttggtgttatcattggaaaagctggggaaactattaggtatatccaacttcaatcaggatcaaagattcaagtcacaagagaccatgaagctgaacctggtgcactgacaaggcaagttgagctttctggcaaacctgagcagataagcaaagctgaacagttgatcaaagaagttctggcagaggccgatgttgggtcatccggtgttggatctggaggccggaaatacaatgcaacacagcaaggtgctgagacgttccagatgaaaattgctaataacaaggtgggactgattattgggaagggtggtgagactataaagtccatgcagaccaattctggagcccgtattcagtcttcaatcagtgatggtggtctttctcaggatgctaagcaatgcaggaacctgaagttcctccataccgaagggtgcttgtccatcactaaggcgtcactaagagcccttgtgcagtatgccaagagactcgagtctcttactctgggaagctaccctcaaattgagcaacatgacatcttttccttactgatgaactaa

SEQ ID NO: 102499 - DNA, 132 bp, Zea Mays
atggagcgagtcgagtcggtagtgggcgaggtattcaacatcgtcaggcagtggcaaactcagcagcagaagcaggtccaggagttccaggcactacacgacacacacttggctccagatgagcattcatag

SEQ ID NO: 102500 - DNA, 499 bp, Zea Mays
tgaattaatgttctttttgtatcaaatgccatatgcagaggtattgtttcattgaggacttccattcttctagtgacaatatgtatgtgtactggattgtgcaagcaattgctgattactttgatgtgtggattcatgcttacactttgcatcattcatggttctgtcatattgtctcccaagttgattcctatatgtcactatgtaatgcatgatttaatgtagatggccactagttatgtgtgcaaattctagttgatgaagtggcaatgtgttctcacttatcagtccctgataagctaaaatttcaccaaaacctggtcatatagaccaagtgcaggtaaccatatcataaaaaatgcaattatattatttttgttgtcgtgttattgaaatgttggaaatatattttgggctagaaggaggatggccagactatgtactctactactctgcttcttccttttcagtaaactccctttagatacatatttgaaaa

SEQ ID NO: 102501 - DNA, 513 bp, Zea Mays
agacatggcaccacctactgcttccctatcccctgcctgctgtgttcactaacccacctccgacccccgttgcgggtccccctcccccgtcagaaggttccccagatttatagcccatagtagcggcggcgacggggcatgcgctcggagccaaaccagcttacagcgagagcaaggccatccttgacgccgtcttccttgagaaggcctccgcgtaggcgttcacggagcgagtcgagtcggtaatgggcaagttattcaacgtcgtcaggcagtggcagactgagcagcggaagcaggtccaagagttcttggtactgcacgacacacacctggatctagatgagcattcataatatttcgttttccatgtcaattcactaataaactctttaataattgatgtctcgatgatgtgttatcatccatgtttaacttaaatgtgttctagttctgaaataccaaagtttataaaacaaaagatatgcaacaaggaatcaacattgaactgta

SEQ ID NO: 102502 - DNA, 104 bp, Zea Mays
ttgccctcgtcgttagtttgtgtatattaaaggcatccagtttaggaactaagatgtttgttgtagtatatattgcaacttctactttttatgaaaaaataaaa

SEQ ID NO: 102503 - DNA, 677 bp, Zea Mays
acgcctctctctactttaggagtatacttccaaagcgccgaaccagaggcaggcacctcgatcgccgacggctccagtcaaggggctggttggcaattagcatggagggcgagaagaaggcggccgccgtagcggaggatgaggttgtggttgtggctgctggcgatgtgagcctgaaggacctgtcaaagaagctcaacgacttcgccagggagagggactgggagcagttccatagccccaggaacctactgctcgccatgatcgccgaagtcggggagctgtcagagctgttcatgtggagaggggaggtgcggaagggcctcgtgggctgggacgaggccgagaaggagcacctgggcgaggagctctccgacgtgctgctctacctggtccaactctccgacatgtgcggcgtcgacctcggcgacgccgccgtcaggaagatcgccaagaacgccgtcaagtacccggcgccgcggccgtcgaagaaggaagaagaagaaggcgcctgatagctttttttttttcttctgctgtgcatgtttgaaggccaatactacttgatgcagaaattgctcgtctgatagcttttgccttttgaaactggacccgccgggtagcttttctcttgaacttgctatgtccgaaattggatctacttattatgaatgagc

SEQ ID NO: 102504 - DNA, 1353 bp, Zea Mays
gtctcagtcacttctcatctctcctttttaggccaaacaccacccccaccagtccctgcgctccccccctaaaaatagaagcagcagcatgcaattccccacaccctcaaacagatcctgaagctggtgctctccctgcagatccccaatcaccagacgatgggcttatgagagtgagccagcaccccagcacagcaactgtgttaccggcatcactaccactgcgagagagctcaagaagccagcaggctccaactcccacagtacttgtgagaaccaaagctcagctgctcatccatggacatgtcgccgaaccccgacagcccctcgtcaggagggggcaacggcatcgggccgagcagcggaggcgcatcgccgtcggttggttccatgacgccgcagtcgccgagccggtacgaggcgcagaagcggcgcgactggaacacgttcgggcagtacctgcggaaccaccggccgccgctgagcctggcgcagtgcagcggggctcacgtcctggagttcctccgctacctggaccagttcggcaagaccaaggtgcacggcccggcgtgccccttcttcggccatccgaacccgccggcgccgtgcccctgcccgctccgccaggcctggggcagcctggacgccctggtgggccgcctccgcgccgccttcgaggagaacgggggccgcccggagtccaaccccttcgcggcgcgcgccgtgcgcctctacctccgcgaggtccgcgagcaccaggcccgcgcccgcggcgtcagctacgagaagaagaagcgcaagaagccgcagcagctgcagggcgacagcagcggcggccttcacggccacgcgcaccagccgccgccgccgcccccgccgcccgccggcgccgcctgctgagcctgagatgttccatcgtcgcctcgacggctcgtagcctcgtacgtacgtacgtacgctctcccatttggccggtatgatgccagattgagcttgagcatacatattttatgtatcatctcgcgcgcgtatgcgtgcatgcatgtgcatggcagcagtagtgtatgatgatccgtgtactctacccgtgagaagcactactatctagtacgtgtgtgtactgcattgctggtcctgtgttttcgattcgctttggtgttgtcggatctatttgcattgcttgtaggagtgagcaagtgtgtttgctgtactttggactgaggagtagtatgtccgtcgtccgtacgtcctttgaggtctagctagggacagggagatacatatatggtgatctctctttgctgcagcttctgtttgtgggaaattcaaaagcctgtgtcgtgtgtgtgtcca

SEQ ID NO: 102505 - DNA, 1443 bp, Zea Mays
cctaaaaatagaagcagcagcatgcaattccccacaccctcaaacagatcctgaagctggtgctctccctgcagatccccaatcaccagacgatgggcttatgagagtgagccagcaccccagcacagcaactgtgttaccggcatcactaccactgcgagagagtaagaagcaacagatgggatgaaccagggagctatatactctccctactattccaatgcttaatccttaacactatatatcttctacttatgcgatcatttgcttcgttcttgatctgattattatgctccatgctgctggatcttatgcaggctcaagaagccagcaggctccaactcccacagtacttgtgagaaccaaagctcagctgctcatccatggacatgtcgccgaaccccgacagcccctcgtcaggagggggcaacggcatcgggccgagcagcggaggcgcatcgccgtcggttggttccatgacgccgcagtcgccgagccggtacgaggcgcagaagcggcgcgactggaacacgttcgggcagtacctgcggaaccaccggccgccgctgagcctggcgcagtgcagcggggctcacgtcctggagttcctccgctacctggaccagttcggcaagaccaaggtgcacggcccggcgtgccccttcttcggccatccgaacccgccggcgccgtgcccctgcccgctccgccaggcctggggcagcctggacgccctggtgggccgcctccgcgccgccttcgaggagaacgggggccgcccggagtccaaccccttcgcggcgcgcgccgtgcgcctctacctccgcgaggtccgcgagcaccaggcccgcgcccgcggcgtcagctacgagaagaagaagcgcaagaagccgcagcagctgcagggcgacagcagcggcggccttcacggccacgcgcaccagccgccgccgccgcccccgccgcccgccggcgccgcctgctgagcctgagatgttccatcgtcgcctcgacggctcgtagcctcgtacgtacgtacgtacgctctcccatttggccggtatgatgccagattgagcttgagcatacatattttatgtatcatctcgcgcgcgtatgcgtgcatgcatgtgcatggcagcagtagtgtatgatgatccgtgtactctacccgtgagaagcactactatctagtacgtgtgtgtactgcattgctggtcctgtgttttcgattcgctttggtgttgtcggatctatttgcattgcttgtaggagtgagcaagtgtgtttgctgtactttggactgaggagtagtatgtccgtcgtccgtacgtcctttgaggtctagctagggacagggagatacatatatggtgatctctctttgctgcagcttctgtttgtgggaaattcaaaagcctgtgtcgtgtgtgtgtccatcta

SEQ ID NO: 102506 - DNA, 109 bp, Zea Mays
ccgtggagatttttttctttcttccaccgctcaccgttctcctctgattttctttcactgcgtacggccaatggcctcatttcttcgctgctatttctgcagactgacc

SEQ ID NO: 102507 - DNA, 831 bp, Zea Mays
ccttccaaaaggagccgatctcaaaaacagaacagtgtccgcatttcaaactgggctccataaagttctgtcgcctcgcctgtgacctgtagggtgtagggtagcagcaggcagcggaggggagagagagagaggggggatggattctcaagcgccgcttcgtcctcctctagctttcgcctgcttcatcttcctttgctcatccttctgcgcagcaaatgggatgtacgacagggttggtgcggcggcgtcagatggggagagcaggaggatgcggctgcacaccgacgggagccgcggcgacgcgcacgcgtggcctgggtacctctacacccgagcagttgggagatgcacaccccagtaagcaactcaaaccactcccagtcccgttcttggaatcaaatgtagtgccttccttaggtcgatgttaagagggtctagctttcagttggttagtccagcaacttttgttgctcattgtgtcgagcacatatgtcgagcacatatcctgtgcaatcactcattttggtgcaagcgtgcaatcaaactatccagagcatccaatctagatcctacggtttcatatggaagaggttaaaagtaaaataggcactatgttttaggaagacattgaatctatcctggtcaaggaagtaaatgaataagaggctgcatcttgggatgttcctgcgtgtaatctttcctggtcaaggaagtcggtggttttagatacctccagagtacacactgacactgtaggagctggatgctctgtagcgtactaaaccgaaccttttaagttcaggatgcagagaatgagaaggcatgaaa

SEQ ID NO: 102508 - DNA, 947 bp, Zea Mays
ccttccaaaaggagccgatctcaaaaacagaacagtgtccgcatttcaaactgggctccataaagttctgtcgcctcgcctgtgacctgtagggtgtagggtagcagcaggcagcggaggggagagagagagaggggggatggattctcaagcgccgcttcgtcctcctctagctttcgcctgcttcatcttcctttgctcatccttctgcgcagcaaatgggatgtacgacagggttggtgcggcggcgtcagatggggagagcaggaggatgcggctgcacaccgacgggagccgcggcgacgcgcacgcgtggcctgggtacctctacacccgagcagttgggagatgcacaccccaattctggagcagcggagccgagccctggcccaacatcgtcccacaggaagcggcggtggcgaaggtgttcgggtctaggtccgtggagcgctacgggccgcgcctcaccctgctggaagctaccatgaggaccgacgatgccggtggcagcgccttcgtgaagctcgtgaagcaagggagcgccgccctcctcaacgcctacgcgaggagagggttccctttcgactcctgggaggtgaaggccctgctgctggaggcgctggtgtccgaggatgccgctgtggtccaggcggagcggtttgagcaggccaacgagtcctgcgtttgatcttcgatggatgaagatgcaacgatggtgccgctgtagtatcgtgttcctggttggtcaccacttctgtgactttggcgttgaggtttctgaagccgcaactctgtccaagtcggcatgtttctctagatgccgggctttgtgtaatgctgtgtgcactgatgtgtagtaggttgtaatctacggaccgtgattttttttttactatttcaatggtaatggaagttctatgttgtcgcacgcaccgtcgtgttcgtca

SEQ ID NO: 102509 - DNA, 833 bp, Zea Mays
cttatgggtactgacaaccagctaattgctaaacaatatcgagtccaaaagagtccttccatgaatctagggaaggaaaaacacatctagggaataaaaagagttcttgatcagttttatacatctggcaatcaaataaaacttgggaacacgttccttttcctttacatcatagtagttattagctgttggcctactgatgctctttctgtatggaacacaacttcctttttggattgtttttcctcagtactaacatctatttattctggagcagcggagccgagccctggcccaacatcgtcccacaggaagcggcggtggcgaaggtgttcgggtctaggtccgtggagcgctacgggccgcgcctcaccctgctggaagctaccatgaggaccgacgatgccggtggcagcgccttcgtgaagctcgtgaagcaagggagcgccgccctcctcaacgcctacgcgaggagagggttccctttcgactcctgggaggtgaaggccctgctgctggaggcgctggtgtccgaggatgccgctgtggtccaggcggagcggtttgagcaggccaacgagtcctgcgtttgatcttcgatggatgaagatgcaacgatggtgccgctgtagtatcgtgttcctggttggtcaccacttctgtgactttggcgttgaggtttctgaagccgcaactctgtccaagtcggcatgtttctctagatgccgggctttgtgtaatgctgtgtgcactgatgtgtagtaggttgtaatctacggaccgtgattttttttttactatttcaatggtaatggaagttctatgttgtcgca

SEQ ID NO: 102510 - DNA, 924 bp, Zea Mays
cttatgggtactgacaaccagctaattgctaaacaatatcgagtccaaaagagtccttccatgaatctagggaaggaaaaacacatctagggaataaaaagagttcttgatcagttttatacatctggcaatcaaataaaacttgggaacacgttccttttcctttacatcatagtagttattagctgttggcctactgatgctctttctgtatggaacacaacttcctttttggattgtttttcctcagtactaacatctatttgtgagtgtctgccaaacactataactgtttattaagatgttggcgagatcctcgtatcaatatcacattaccgtctgcaaacacactgcagattctggagcagcggagccgagccctggcccaacatcgtcccacaggaagcggcggtggcgaaggtgttcgggtctaggtccgtggagcgctacgggccgcgcctcaccctgctggaagctaccatgaggaccgacgatgccggtggcagcgccttcgtgaagctcgtgaagcaagggagcgccgccctcctcaacgcctacgcgaggagagggttccctttcgactcctgggaggtgaaggccctgctgctggaggcgctggtgtccgaggatgccgctgtggtccaggcggagcggtttgagcaggccaacgagtcctgcgtttgatcttcgatggatgaagatgcaacgatggtgccgctgtagtatcgtgttcctggttggtcaccacttctgtgactttggcgttgaggtttctgaagccgcaactctgtccaagtcggcatgtttctctagatgccgggctttgtgtaatgctgtgtgcactgatgtgtagtaggttgtaatctacggaccgtgattttttttttactatttcaatggtaatggaagttctatgttgtcgca

SEQ ID NO: 102511 - DNA, 1347 bp, Zea Mays
ccccatccccccatatcccttcgacccttccgccgagctcggcctcgggcggcgtcccggtctcaccgcgaccgggcggtgagaggtagaacggccaccagacatcaaccgtgaaggggtggcgtcaaggcagcgctgaagcggcggcgacgtcgaggctcgagctcccgtgccgcgctccgagctaacctagatgaacatactcgaaaggatacgtggaggtggcgacagggcggctgccacggagcgccccccgcggccggagtgctgggtggagatttcggagtccgtctcacggctctgcagcttcgacgccgccggcagcggtagccgcagcatctctgtaaaagttattcaggattctagacctatacatgacaaacttgttgattctttcttgaacaaaatttttccatcaggttatccatacagtgtgaatgaaggttacttaacttataccaaattccgtgtgctacagcatttctcgagtgctatgctacatgtgctatcaacacagtccttgctgtttgctgcaggtttgcgacctaccccggcgcaagcaactgctgtaagttggattctaaaagatggaatgcagcacgcaggaaagctcatttgtagcagcatgggtgcaagaatggattctgaaccaaagagttggaggatacttgctgatgttctctacgatctcggtactgcattggaagttgtttcgccgctgtgcccacaacttttccttgaagtagcaggcttgggaaattttgcgaagggaatggccgttgttgcagcaagagcaacgaggcttccaatttactcttctttcgccaaagaaggcaatcttagtgatttatttgctaaaggggaagccatatcaacacttttcaatgtcatgggaattggagctggaattggattggcatctactgtttgttcaacaactcaagggaagttaattgcaggcccgttactttccgcagtgcatatatggggtcatccaagagatgagagcaactcctgtaaacacactcaacccacaaagaacagcaatgatcgtggctgattttatcaaggtttggtatctctgatctattaacgcaacctttttatccagtccagctacgacagtaacatttgtctattatttactataccaataaacacgacatttttaagttgatctctacaatatatttgaggtaataatcttacttctattttatactgcttacgtctttctgtggtacatcaagtataattagttgatatatatatatataataataataataataataataataataataataataataataataataataataataataataaacagtt

SEQ ID NO: 102512 - DNA, 1400 bp, Zea Mays
ccccatccccccatatcccttcgacccttccgccgagctcggcctcgggcggcgtcccggtctcaccgcgaccgggcggtgagaggtagaacggccaccagacatcaaccgtgaaggggtggcgtcaaggcagcgctgaagcggcggcgacgtcgaggctcgagctcccgtgccgcgctccgagctaacctagatgaacatactcgaaaggatacgtggaggtggcgacagggcggctgccacggagcgccccccgcggccggagtgctgggtggagatttcggagtccgtctcacggctctgcagcttcgacgccgccggcagcggtagccgcagcatctctgtaaaagttattcaggattctagacctatacatgacaaacttgttgattctttcttgaacaaaatttttccatcaggttatccatacagtgtgaatgaaggttacttaacttataccaaattccgtgtgctacagcatttctcgagtgctatgctacatgtgctatcaacacaggtttgcgacctaccccggcgcaagcaactgctgtaagttggattctaaaagatggaatgcagcacgcaggaaagctcatttgtagcagcatgggtgcaagaatggattctgaaccaaagagttggaggatacttgctgatgttctctacgatctcggtactgcattggaagttgtttcgccgctgtgcccacaacttttccttgaagtagcaggcttgggaaattttgcgaagggaatggccgttgttgcagcaagagcaacgaggcttccaatttactcttctttcgccaaagaaggcaatcttagtgatttatttgctaaaggggaagccatatcaacacttttcaatgtcatgggaattggagctggaattggattggcatctactgtttgttcaacaactcaagggaagttaattgcaggcccgttactttccgcagtgcatatatggggtcatccaagagatgagagcaactcctgtaaacacactcaacccacaaagaacagcaatgatcgtggctgattttatcaagctgaaaggagcttctcaaagcttaagttattgaagaattatttaagatctacaatgtctcaagaaaggttaaacgagctagcaactttatgtattgagaagaaattattagatgatgtcaatattgaagccatctgatgattttgcatctagaaatgttagacgacatttttaagttgatctctacaatatatttgaggtaataatcttacttctattttatactgcttacgtctttctgtggtacatcaagtataattagttgatatatatatatataataataataataataataataataataataataataataataataataataataataataataaacagtt

SEQ ID NO: 102513 - DNA, 1573 bp, Zea Mays
ccccatccccccatatcccttcgacccttccgccgagctcggcctcgggcggcgtcccggtctcaccgcgaccgggcggtgagaggtagaacggccaccagacatcaaccgtgaaggggtggcgtcaaggcagcgctgaagcggcggcgacgtcgaggctcgagctcccgtgccgcgctccgagctaacctagatgaacatactcgaaaggatacgtggaggtggcgacagggcggctgccacggagcgccccccgcggccggagtgctgggtggagatttcggagtccgtctcacggctctgcagcttcgacgccgccggcagcggtagccgcagcatctctgtaaaagttattcaggattctagacctatacatgacaaacttgttgattctttcttgaacaaatttttcccatcaggttatccatacagtgtgaatgaaggttacttaacttataccaaattccgtgtgctacagcatttctcgagtgctatgctacatgtgctatcaacacaggtttgcgacctaccccggcgcaagcaactgctgtaagttggattctaaaagatggaatgcagcacgcaggaaagctcatttgtagcagcatgggtgcaagaatggattctgaaccaaagagttggaggatacttgctgatgttctctacgatcttggtactgcattggaagttgtttcgccgctgtgtccacaacttttccttgaagtagcaggcttgggaaattttgcgaagggaatggccgttgttgcagcaagagcaacgaggcttccaatttactcttctttcgccaaagaaggcaatcttagtgatttatttgctaaaggggaagccatatcaacacttttcaatgtcatgggaattggagctggaattggattggcatctactgtttgttcaacaactcaaggcaagttaattgcaggcccgttactttccgcagtgcatatatatggggtcatccaagagatgagagcaactcctgtaaacacactcaacccacaaagaacagcaatgatcgtggctgattttatcaagagtggaaaggtttctagccccgccgagctaaggtacaaggaagacctcctgtttcccaaccgagttatagaagaagccggcagtgtgaaaatcggtcagccacttcgcaaagtgttcagtccccggcttgttgagcagctgagggcgactttcccaggcgagaaatttctgctcagccagaaaagcaacaggacgtacatggttctggagcgaagcgcgagcggagaggacgcgctgagggggtggctggtcgccgcgttcgcttcggagatggagaggtcaggcgccggctcacgcgatgacgcggttctgagcgaggcctacgagaagatggagcgggtcttccccaccttcgtgtcagaagttaggagtagggggtggtacaccgatcagtttttggacgggaactgtagtcgagtctcgtttgccaagtttcggtagtcgcagagactgtatatggtctatgttttttggaggggagatgcggaaccatgaactcatgcatgcagggcagtgtagt

SEQ ID NO: 102514 - DNA, 1649 bp, Zea Mays
ccccatccccccatatcccttcgacccttccgccgagctcggcctcgggcggcgtcccggtctcaccgcgaccgggcggtgagaggtagaacggccaccagacatcaaccgtgaaggggtggcgtcaaggcagcgctgaagcggcggcgacgtcgaggctcgagctcccgtgccgcgctccgagctaacctagatgaacatactcgaaaggatacgtggaggtggcgacagggcggctgccacggagcgccccccgcggccggagtgctgggtggagatttcggagtccgtctcacggctctgcagcttcgacgccgccggcagcggtagccgcagcatctctgtaaaagttattcaggattctagacctatacatgacaaacttgttgattctttcttgaacaaatttttcccatcaggttatccatacagtgtgaatgaaggttacttaacttataccaaattccgtgtgctacagcatttctcgagtgctatgctacatgtgctatcaacacaggtttgcgacctaccccggcgcaagcaactgctgtaagttggattctaaaagatggaatgcagcacgcaggaaagctcatttgtagcagcatgggtgcaagaatggattctgaaccaaagagttggaggatacttgctgatgttctctacgatcttggtactgcattggaagttgtttcgccgctgtgtccacaacttttccttgaagtagcaggcttgggaaattttgcgaagggaatggccgttgttgcagcaagagcaacgaggcttccaatttactcttctttcgccaaagaaggcaatcttagtgatttatttgctaaaggggaagccatatcaacacttttcaatgtcatgggaattggagctggaattggattggcatctactgtttgttcaacaactcaaggcaagttaattgcaggcccgttactttccgcagtgcatatatatggggtcatccaagagatgagagcaactcctgtaaacacactcaacccacaaagaacagcaatgatcgtggctgattttatcaaggttcggtatctctgatctattaacgcaacctatttatccagtccagctacggcagtaacacttgtctgcagtacagagtggaaaggtttctagccccgccgagctaaggtacaaggaagacctcctgtttcccaaccgagttatagaagaagccggcagtgtgaaaatcggtcagccacttcgcaaagtgttcagtccccggcttgttgagcagctgagggcgactttcccaggcgagaaatttctgctcagccagaaaagcaacaggacgtacatggttctggagcgaagcgcgagcggagaggacgcgctgagggggtggctggtcgccgcgttcgcttcggagatggagaggtcaggcgccggctcacgcgatgacgcggttctgagcgaggcctacgagaagatggagcgggtcttccccaccttcgtgtcagaagttaggagtagggggtggtacaccgatcagtttttggacgggaactgtagtcgagtctcgtttgccaagtttcggtagtcgcagagactgtatatggtctatgttttttggaggggagatgcggaaccatgaactcatgcatgcagggcagtgtagt

SEQ ID NO: 102515 - DNA, 734 bp, Zea Mays
ttcttgcatatcatctgaacctgctataatgctgaagaaccctataatgatgcaagtttgtctgctatcggaattaagaacctgatacaagcttctaatgacattgccatcttcatcagttaattgcaggcccgttactttccgcagtgcatatatatggggtcatccaagagatgagagcaactcctgtaaacacactcaacccacaaagaacagcaatgatcgtggctgattttatcaaggttcggtatctctgatctattaacgcaacctatttatccagtccagctacggcagtaacacttgtctgcagtacagagtggaaaggtttctagccccgccgagctaaggtacaaggaagacctcctgtttcccaaccgagttatagaagaagccggcagtgtgaaaatcggtcagccacttcgcaaagtgttcagtccccggcttgttgagcagctgagggcgactttcccaggcgagaaatttctgctcagccagaaaagcaacaggacgtacatggttctggagcgaagcgcgagcggagaggacgcgctgagggggtggctggtcgccgcgttcgcttcggagatggagaggtcaggcgccggctcacgcgatgacgcggttctgagcgaggcctacgagaagatggagcgggtcttccccaccttcgtgtcagaagttaggagtagggggtggtacaccgatcagtttttggacgggaactgtagtcg

SEQ ID NO: 102516 - DNA, 782 bp, Zea Mays
acacaagacattggtttaggcggaaactgcctgcgtgcatattcacttacaagttaaaagggcacacttagtgttgcaaaggctaagccttcaaaggagacattgctaggtggttcacgcattagagtaatggagcgccacggtgaaccgatgacctatagacaggcattagtgtgtcagcaatttaaaaagaagagagtactatataacacctgatctaccccaaacttagctgatgcacctatggatctatatccttgctcagcgagccaaaaaaaacaactctacgattttgttagcaagcctattcactacatggactaaacaaactgaggtcatccattaaccatctatagaaggccttatgaaagattaagcaaacaaatgagcatattcattgataacgcatcgaccgctgctcagtaaggggagtagtcatccttttgtttgttgtcacaagaagtaccaacataagatcatgacactatataaccaaaagagcgatgattactacattcaattctcagcttgtttattatatttcgcaaaaaaaaacttcatcttgtttataggaacgtccatcgcaatttgtttatgatatgtaatacgtgtaatgctcattactctagctagtttgttactgtatggcagttttctgtaagaaaataaattgatactccctccgtttctttttatttgtcgctggatagtgcaattttacactattcagcgacaaataaaaagaaacggagggagtagttggttaagtagaattttgcaat

SEQ ID NO: 102517 - DNA, 1278 bp, Zea Mays
atcacgaaacggaacgccaaaccaaatccatgactgaacaactgaaccgggagtacgacatcggcgacgagatcggccgcgggcgtttcggcgtggtccggcgctgtgtctcccgcgccacgggtgacgccttcgccgtgaagtccgtggaccggtccctcctcggcgacgacctggaccgcgcgctggcggagctggagccgaagctggcgcggctcgcggggggcgagggcgacgggaacccgggcgtcttgcaggtgcgcgccgtctacgaggacgacgcctggacgcacacggtcatggacctctgcacggggcccgacctgctggactggatccgcctccggcgcggcgcgcccgtgcccgagcccgacgccgcgcgcgtcgtcgcgcagctggccgaggcgctcgcgggctgccaccgccgcggcgtcgtccaccgcgacgtcaagcccgacaacgtgctcctggacgtggaccccgccggcgaggcgcccccgcgggtccggctcgcggacttcggctccgccgcgtggctcggcgagggcgcgcggggccgcgccgaggggctcgtgggcaccccgcactacgtcgcgcccgaggtggtggccggcggcgagtacggcgagaaggtggacgtctggagcgccggggtggtgatgtacgcgctgctctccggcggcgcgctgcccttcggcggcgagacggccgcggacgtgttcgcggccgtgctacgcggcagcctcaggttcccgcccgctctgttcgccggggtctcgccggcggcgaaggatctgatgcggcggatgatgtgccgcgacgtctcgcgaaggttctccgccgagcaagtcctcaggcacccgtggatccagagcggaggcggaggccgagagctggtgcggccaacctgagcagccatatatcgaacgagacctgaaccgatcgagtatcatcgtagcagtccggtgggtgtgtactcccccgatgagtgttgtgcagacgtctctgtatatccagtaagcaggcggcggcggcggcggcgagtgtgagactggagatcgtcgtttcgccgcacctcgcccgtgtgtgtgtgtgtgtgatggtgacctgggccgttttcctcttttgccttgtgggccttttttcgggccgccctctttgcttgggagttaaacgtcgtgcgacgatgatctgttatgtccaaccgtccatgtacaaatgaagtttgagctttctcgatgatctgatcaaatcctgatgatactacttatccactga

SEQ ID NO: 102518 - DNA, 1423 bp, Zea Mays
cacgaaacggaacgccaaaccaaatccatgactgaacaactgaaccgggagtacgacatcggcgacgagatcggccgcgggcgtttcggcgtggtccggcgctgtgtctcccgcgccacgggtgacgccttcgccgtgaagtccgtggaccggtccctcctcggcgacgacctggaccgcgcgctggcggagctggagccgaagctggcgcggctcgcggggggcgagggcgacgggaacccgggcgtcttgcaggtgcgcgccgtctacgaggacgacgcctggacgcacacggtcatggacctctgcacggggcccgacctgctggactggatccgcctccggcgcggcgcgcccgtgcccgagcccgacgccgcgcgcgtcgtcgcgcagctggccgaggcgctcgcgggctgccaccgccgcggcgtcgtccaccgcgacgtcaagcccgacaacgtgctcctggacgtggaccccgccggcgaggcgcccccgcgggtccggctcgcggacttcggctccgccgcgtggctcggcgagggcgcgcggggccgcgccgaggggctcgtgggcaccccgcactacgtcgcgcccgaggtggtggccggcggcgagtacggcgagaaggtggacgtctggagcgccggggtggtgatgtacgcgctgctctccggcggcgcgctgcccttcggcggcgagacggccgcggacgtgttcgcggccgtgctacgcggcagcctcaggttcccgcccgctctgttcgccggggtctcgccggcggcgaaggatctgatgcggcggatgatgtgccgcgacgtctcgcgaaggttctccgccgagcaagtcctcagtaagccgtcggatctactatgcgttatctcgatttcgtcttgttccctagtagattattttattgaatcttaatccaattggacgcgagcacagatcacgcgcgttatctgccctcccgacatcttatctaacatcctcggcttaaaataaaataaatgcagggcacccgtggatccagagcggaggcggaggccgagagctggtgcggccaacctgagcagccatatatcgaacgagacctgaaccgatcgagtatcatcgtagcagtccggtgggtgtgtactcccccgatgagtgttgtgcagacgtctctgtatatccagtaagcaggcggcggcggcggcggcgagtgtgagactggagatcgtcgtttcgccgcacctcgcccgtgtgtgtgtgtgtgtgatggtgacctgggccgttttcctcttttgccttgtgggccttttttcgggccgccctctttgcttgggagttaaacgtcgtgcgacgatgatctgttatgtccaaccgtccatgtacaaatgaagtttgagctttctcgatgatctgatcaaatcctgatgat

SEQ ID NO: 102519 - DNA, 110 bp, Zea Mays
gctttgtttgcctttgaaaacaaagcactagtttatttgaaaacaaagcacatttgtttggaaatagagtacgtactagcatgttgctagcatattcaggttaataaatg

SEQ ID NO: 102520 - DNA, 1863 bp, Zea Mays
ctcattcgcgaaaagaaaaacacaaggcgaccgcagagggcaggacaggacagagacgccgaggctaggcagtccatctgttggggtggccagtggggatctcgccggccgggaggtctggggggcgggggctgccaaacttcgccatattggtgaatcactgaatccgcccctgccagcaaccgttctgacgtggcggggtggggcaggatccaaatggcggcggcaatagaggaactgcggctcctgggatccatccctgtactggaaggtccgggagaggtcgacggcgtggtgggtgaggaagggcgaccgcgaggcggcggcgacgacgaggagatcctgcgattcatggactcggtggacagctacctgctcctcatggactccctatcctccgctcttcgtcagggctggcttgacctggcaagtgctcgccattctatgggcacatcacgcgtttcgagtacactgtttgatcacaaggagcagtctgctgccactaagcttcaagttgttgatcatgatggcctgaaatcatcagagtcaataccacactttgctctatcaaagtggtctttgcaagaagaatgtcactccacctatgatctcagtgagagagattttactgagccaaagatgaggcatcgaggatcagttactaccccagaaaagggaaaccatgaaagtgcaaacaccacaacactgtctacaggtgctgatgctagcaatcgtgttcaaagagcgagatcaaaagcattatcagtctttgggggattggtatccccaaaactaagaaccgcccaactttcatttgaaacagcacttgacttgattgtggagctagcaaattcaaggtcgaatatgttagctagtttctcccacttaaaagagtgaagacattatgttatgagattttgtaccttgggcaccatctattcagcactcatgagatcgcagcaactgtaaactaagttttgagatccagtatattttaagaacgactaaatagcatataatgcttgctatgctgattactcgctgcgaaggtgttgctaacatatctgtgaatgcgagaacacatgctggaagcagtcagaaattatggtttgattataaacctcctcattttctactatgaaaacatgattctcgtccatgacgatccgaccaatgtagctctgatatgtgattcaattcgacatacgcaaattctgaacatctcttgaccaaactgcatcggatacgtccgatgtccagaacgatgtattcttcgcaacaggcaccaaaatctcgtcaagcagcagctatacaattctagacagacaaaagaaacgcgaggtatgcctgccgcggcaatctgctgcgcacggtcgtcgggccgccggctacatcaagtaaccttcgacgctaccgtcgtccgaggggcgaccgtgctcgctcatgctccccctcagcctgtagaagctgcccctccccttggtgcgcagcgggccggaccagtcgtacatcgccagggactcgatcttgtccagcaccgcgctcgacgccgaccgtggcctgcgctcgtcggcgccggcagggtccgagccgtatcccagggggagcgccgggcccggagtggccggcgggtcgtcgttccacgagctcctgctgacgtcgttccacggggactcctctgttgcgccgcccacgaaggagccgctgcaggtctcgtcgccgcctccgccgctgtggatcagcttcagcgcctgcacgacctcgcccatgaacggccggtgcgacgcctcgacgtgcacgcacatggacgcgatggccgccgccttggccagcttctcgaagtcgtaaccggccgggagcgac

SEQ ID NO: 102521 - DNA, 1302 bp, Zea Mays
aatgatgaggtcaccgtcgagagtgccgaggctacattgaagtataatgttgctgttaagtgtgcaacaattacgcctgacgagactcgagtaaaagagtttaaactcaagtctatgtggcggagtccaaatggcacaataaggaatattctaaatgggactgtttttcgtgagcccatcttgtgtaaaaacatcccaagaatcctttctggttggaagaaacctatttgcataggaaggcacgcctttggtgaccagtatcgagctactgatatgattattaatggtccaggaaagctcaagatggtatttgtgcctgatggagctgaccctatggagctggatgtttatgattttaagggacctggtgtggcattatcaatgtacaatgtcgacgagtctattagggctttcgctgagtcctccatggctatggctctttcaaaaaagtggcctctttatctcagcaccaagaatacaatcctcaagaagtatgacggcaggttcaaagacatcttccaggaggtatatgaagagcaatggaaggagaagtttgaagaaaactcaatatggtatgagcacaggttgattgatgacatggtggcctatgctgtgaaaagtgatggtgggtatgtttgggcttgcaaaaactatgacggagatgtacagagcgattttcttgcccaaggttttggttctctgggtttgatgacttctgtgctgttgtcttctgacgggaaaacattagaggctgaggctgctcatgggactgtcactagacatttcaggctacatcagaaaggacaggagacaagtaccaacagtattgcctccatattcgcttggacccgtggacttgaacacagggcaaagctggataaaaatgatagtctgctggatttcacacacaaacttgaatctgcatgtgttgaaacggtggaatctgggaaaatgactaaggaccttgcgcttcttatccatggccccaaggtaacaagggagttctacctgagcaccgaggagttcatcgatgcagtcgcgcagcaactgcgaggaaagattcaactaccaactactgtgtaatcctgaacctgaagcctgaaaccgaacgaactggttcattgtgcattcggcgcacattttgatagggatggcgagatggatcagatctcaaaacattcttttttttttgcttcagccaaacatttcatggttgggtatataatgacccgttgatcaatgtattcagagcgatattgagttaaattattactagtcggtcgtcgtatttttcattttcca

SEQ ID NO: 102522 - DNA, 476 bp, Zea Mays
tttgttttgtctttttaatgataagcaacaattcatttatagcagcttgtttctggagactggagtacacatgagacaaacattgtctcaccaatgtatacgtatataatccatcacacatgaatacttaggttatttgtcttctagcttccgcctgacacaatcacagaactagaatgtaaaaaggggtaaagaaataaaaaaggacgactcctaatggagtccgccattgccgtattgtgacttgccggtttgtgcgcacctcagctgaccaccaaggaggtcaggaaaggcaccacgaaaacgaatgcttcttgagaagctctgtttccactatccatcgtcgtgcagctttaactctcaagaaccatgcagatgctcaagccatgcatcttccatggtctacgggggctgtggacaaggggaggggagaaggaggagcacgtctgtaccctggtgaggacgatgatgtctgc

SEQ ID NO: 102523 - DNA, 555 bp, Zea Mays
caaatatgccatcaacaatacaagctcatttttttactcctagcatgcatgagaaaacaatctgtagacactagcgggggcaaagacaagcagatgataagcaacaattcatttatagcagcttgtttctggagactggagtacacatgagacaaacattgtctcaccaatgtatacgtatataatccatcacacatgaatacttaggttatttgtcttctagcttccgcctgacacaatcacagaactagaatgtaaaaaggggtaaagaaataaaaaaggacgactcctaatggagtccgccattgccgtattgtgacttgccggtttgtgcgcacctcagctgaccaccaaggaggtcaggaaaggcaccacgaaaacgaatgcttcttgagaagctctgtttccactatccatcgtcgtgcagctttaactctcaagaaccatgcagatgctcaagccatgcatcttccatggtctacgggggctgtggacaaggggaggggagaaggaggagcacgtctgtaccctggtgaggacgatgatgtctgcagg

SEQ ID NO: 102524 - DNA, 969 bp, Zea Mays
tgtactactctttggaagccctacacgaaggtatttttactcataacttctatctttttactacttatcagaaggtatttttagtcatcttctctctttttaggtagtgtggctataggagatttgaatttcacatccactcagcaaatgccaccaccttctttcattcctgttcgtcctcttactgcccctcctagtggccctcttgctatagctttcgcttctgctactgctcattcgaataggagtacctctgaacaaagccactctcccttgcacccccacacaaacccattctccatggaatggcaagaaatatcaaatgaagctcaatcaagacatgtaggtggaaatgggagaaagcgcaagcaaagctaaattggagcagccattgaaagttttgtggattttaagaggagtgccacatccaaaacgctcgaaggtattgaagaagtgtttatggaaaagtgtctagacaagttggatataaattgatgggttcactgatgaggatagatcatatgcaatagaggtctttgaatttgcgataaatagagaggtgtttatgaagtcaaaaaaccacaatgctagattactttggttgaagaggaaaattagttcttgtagagcgctcactactatcatgtgatgtgagatgaatgtggcaatgaagagatgggcttatagtgtgttaagtggaagcaacacatgaagcggacatggagaaggaagctggcatgaaactaaaacacattaagttgacatgtgacgttcatgttttagatgtcttattctactgccaaacttcctaatactccatttttatattatattgtctatctatacgcgtggatggagatgatgatattatgtgatgtgatgatggatggattagcttcattgaatattagatgatattatgtgatgatgatattaagcgagcattgtggtattgatacatgcttcata

SEQ ID NO: 102525 - DNA, 602 bp, Zea Mays
atggctagtgaaggtgaagcttcacctccacggaagtgtatgttgttggagttgctagtgaacatcaaagtcaaaacttgacatcgccacctcatgcaaatacgagtcaaccttttggtgtgtccgcatcatcgtcaacacctgccgcaacatctcatgaacaaggtgcaaatccagaagaaggaattaatttggatgaggatgatccttcaaagttgaagcaagcaaagaagtccacttcaaatgtttggcagtattttgagaagtatgaggttgtcgtagaggagaatggcaaatctgtgaagcaagtttgggccaaatgcaagtatccgggatgcaaaaacaagactagcaaagctagggctgaaagtagtagaggaacaactgcattttggtctcatttgaaaaattatcataagattgtgaaggggcaacaggagctcaaggcagaaaaggatcatggcacaggtatatgcattgttcagccatataaatatgatgaagaaaccagtttgagaaagttttatacaactattatcatgcatgagtatccatttaacattgctgagcatgaatactttgtggaattcattaaatcattg

SEQ ID NO: 102526 - DNA, 1274 bp, Zea Mays
cgaacacgaggaagcttaattagcttggtagccgggcacgagtacgtacgtgtgcttccaatatgaagaggcggtggagccacccgtcgtcggtcttgctcctgctgctgctggtcgccgtcttcctactcctcacgttgctgcgatgtcccctgcgccacgcgcagcaggcctgcgctgacgacgacgcgggaagctacgccgtggacgccacgctcgcggagctcgcggccgcggacccggccgcgtcggcagtgctgcgggccgccgagaggttgctggaggggaacctgacgagggctcccccggagcgccgggacgccgcggtgcgcggcctccgcgagtggctcggcaggcagcggttcgagccccaggtgatggccgagctcgtggacctcatcaagcgccccctcgaccggtggcactacggcgtcggcgccggggcgacggacagcgacgacgggcggcggccgtacgcgtcgtgcgccgtggtcggcaacagcggcatcctgctggcgcgggagcacggcgcgctcatcgacggccacgacctggtgatccgcctcaacaacgcgcccgcgggcgcgggcaggtacgcgcgccaagtcggcgccaggaccggcctcgccttcctcaacagcaacgtgctgagccgctgcacgaccgccggctgccggcactgccgcgcctacggcgaccgcgtgcccatcctcacctacatgtgcaacgccgcgcacttcgtggagcacgcggtgtgcagcgcaggcgcgtcggcgccggtgatcgtgacggacccgcggctggactcgctgtgcgcgcggctcgccaagtactactcgctgcgccggttcgtgcgcgagacgggccggccggcggaggagtggggcacgcggcacgaggagggcatgttccactactcgtcggggatgcaggccgtggtggctgcggcgggcgtgtgcggccgggtgtccgtcttcggcttcggcaaggaccccggcgcgcgccaccactaccacacgctgcagcggggcgagctggacctgcacgactacgaggccgagtacgagttctaccgggacctcgaggcgcggccggaggcgataccgttcctgcgggactccggcttcaggctgccgccggtcgtggtctaccggtgactattcattcaaattaatcaacggccgtgtcagtcagtgccgacgtacatacacatacgccattggtttttgacaaattttgctactcaatcaatcaaaacacgttgtacaaaagct

SEQ ID NO: 102527 - DNA, 138 bp, Zea Mays
gcccaagttattggatgagaagcagaccactatctacaaaagggctgtagacaagaattataacttgaagatgaaagcatcaaggtttattttcagggaaatcagccagaagttcccaatcatgcccttcactgctag

SEQ ID NO: 102528 - DNA, 211 bp, Zea Mays
attttggatgcgacgagaagttccccatcatagatgatttggttagccacttggtacctgcatacgaggatagaattgtgaggatctatgccaagaagcctgagttggttaaaatactggaatcgaggttgatgtatctccagatgagaatgtatggtgagaagacttaagtcatgagatgcccaagagaaagaggattagatctaactag

SEQ ID NO: 102529 - DNA, 1517 bp, Zea Mays
cgctgcgcccggctttaaaaggcgcaaaagcgaacgaggcaggcgctcctccgcaccaccgtacaccggacccggagcagctcgccgccgaacccagcgctgaaccgacggggagaggcgaggccgcgctttaccccgggaactacgaagcaacgacggcgggactgagcaggcggggatatgactgtgatcaaggcagctggagcggagccgtgcggagacggcggcgcgtacggcgcgaggcggcggcagtcgctgcgggcgcggtacgcgtacgggttcgtcttcttcgccaccaacctgctggcctggttcgtcagggactacggggcaagggcgctccgcggcttgcatcatgtgccggtctgcggagcaggggactccaagtgcttccagtccggaggagtgcttcgagtaagcttgggctgcttcatatttttctgggtgatgtttgccacaacatttggaactcgcaagctccatgaagctcgtaattcgtggcattctggatgttggattctgaagtctcttgtgtatgccatgtcgatcggcatcccatttatcatccctaacatcttcatccaattttatggtgaagttgctcgactgggtgccgggatatttctcctcctccagctcataagcatgctccacttcatatcatggtgcaataaacgatggatgccagatcctggatcaaatcaatgtgggttgtttgggttattcttgtcaaccatctcctacattgcttcgtttgttggaattggcgtgctgtatgttctgtatgtccccaactcctcttgtgcgttcaacatcttcactattacatggacggcaatcttggtgactataatgatggcagtatcattgcactccaaggttaacgagggtcttctctcttctgggatcatgagttcatatattgttttcctttgttggtctgcactccacagtgagccgcaaactgggaagtgccactctcatatgaaaattgcccaggatggcgattcagctactatcgttagcttcattatcgcaatttgttccattgtaatggccacgttttctactggaatcgacaccaaatccttccagtttcggaatgataaagtacaattggatgaggacatcccctacagctacgagattttccacattgtgtttgcgatgggggctatgtacttcgcaatgctgttcattagctgggagcttaatcacccaacaagaaagtggagcatagatgttggatgggcaagtacatgggtgaagatcatcaacgagtggttcgcggctagcatatacctctggaggttgatctccccagtcgtattgaggaaccaacttgccaatgaagagttgatgccacacaggcctacagtatagttttgatgatatagagaaaacgagttctataacccgctgattctttccttctaaaaagatcgctatatgctttattcttttaatacacttgtacatcgaaactcgaaaccacacgaaaaaaagactaggaattc

SEQ ID NO: 102530 - DNA, 1566 bp, Zea Mays
cgtacaccggacccggagcagctcgccgccgaacccagcgctgaaccgacggggagaggcgaggccgcgctttaccccgggaactacgaagcaacgacggcgggactgagcaggcggggatatgactgtgatcaaggcagctggagcggagccgtgcggagacggcggcgcgtacggcgcgaggcggcggcagtcgctgcgggcgcggtacgcgtacgggttcgtcttcttcgccaccaacctgctggcctggttcgtcagggactacggggcaagggcgctccgcggcttgcatcatgtgccggtctgcggagcaggggactccaagtgcttccagtccggaggagtgcttcgagtaagcttgggctgcttcatatttttctgggtgatgtttgccacaacatttggaactcgcaagctccatgaagctcgtaattcgtggcattctggatgttggattctgaagtctcttgtgtatgccatgtcgatcggcatcccatttatcatccctaacatcttcatccaattttatggtgaagttgctcgactgggtgccgggatatttctcctcctccagctcataagcatgctccacttcatatcatggtgcaataaacgatggatgccagatcctggatcaaatcaatggtaaggattgagctagttgtgttggaacttgtggcatcgcagttacttcagtcttcaggtcctgaagctagaactgaccatggcgtgtcacccttatgtgattctcagtgggttgtttgggttattcttgtcaaccatctcctacattgcttcgtttgttggaattggcgtgctgtatgttctgtatgtccccaactcctcttgtgcgttcaacatcttcactattacatggacggcaatcttggtgactataatgatggcagtatcattgcactccaaggttaacgagggtcttctctcttctgggatcatgagttcatatattgttttcctttgttggtctgcactccacagtgagccgcaaactgggaagtgccactctcatatgaaaattgcccaggatggcgattcagctactatcgttagcttcattatcgcaatttgttccattgtaatggccacgttttctactggaatcgacaccaaatccttccagtttcggaatgataaagtacaattggatgaggacatcccctacagctacgagattttccacattgtgtttgcgatgggggctatgtacttcgcaatgctgttcattagctgggagcttaatcacccaacaagaaagtggagcatagatgttggatgggcaagtacatgggtgaagatcatcaacgagtggttcgcggctagcatatacctctggaggttgatctccccagtcgtattgaggaaccaacttgccaatgaagagttgatgccacacaggcctacagtatagttttgatgatatagagaaaacgagttctataacccgctgattctttccttctaaaaagatcgctatatgctttattcttttaatacacttgtacatcgaaactcgaaaccacacgaaaaaaagactaggaattc

SEQ ID NO: 102531 - DNA, 96 bp, Zea Mays
gaaccatgtcgatatcctgaattaatagacgtattcaatatagacgtgatcagtaggcttctgatggaaacctgtccgaggttcgagttctagacc

SEQ ID NO: 102532 - DNA, 4778 bp, Zea Mays
ctttccttcttcttgctcgtccacccagtactccactgctcctcgtcctcgtcctcgtcctccctctcccgccatccccatccccgcgacgacgcgcatcggaccctgcgtcgtacgtgctcgcccattccctagccgtcagtggatgtgccgggctggccgcgggccgtccgagcctgcggcggcggcaggggagggcgacaacccggcgggcggcaggagtggcagcgggtgagttgagctccactcagggcccgcattaccagtgtgtccctccccggtggtgctctgcgctgttccccttgctcacttgtcgggcggggcgtgccctagcaccgtgtggactgtggagctcgcaccgcgcgggggaagtgaaaaagctcgcgcgcctttcgcggatctgcttcgggggcttgcgcggcggtgtgctcctgggtcccccagacggggccgggtatcccgtgatttgaggggacttctacttctctctctctctcctgctgcctcttcttctttatgatgggtacacggtgcgattggtgtgtgctcctgtttggggatcccctgtttggtcagtgaggagagttgagctgctatagcatttctgccggagaaatcggcttagagttgtctgggtgcttcttctcttcgtgagcttctcgatttccaggaggtgattactggttaaacggttattaattgtatacttttgttttctgtcttacttgattgccgggtcgctaccgatctgctacttggtttggtggctcgctcttgtcagtttgtctgataaatcccaatgcgaagctacttcccttgccgtcacacgagtactagttccgctgctgcccgtcggagtattcagaattcataagcatgtatctgctgccgtgttcttacagctgctcgcgccctctacaggaaggaagccatccaaccgcggagatgtgggagcccaggaggtcgtagcgaggggtttccttgattggtgaatcttcgatcaaggatggagcaccgggctttgctgctcggcgtggcgctggcctttctgctggcctctggctcccagggcttgaaccatgaaggttggcttctcctagcgctgaagagccagatgaacgacactctccaccacctcgacaactgggacgcgagggatctaacaccatgcatctggaagggcgtcagctgctcgtcgacgcccaacccagtggtggtgtctctcgacctcagcaacatgaacctgtcaggcacagttgcgcctagcattggtagcctgtctgagctgaccctccttgatctgtcctttaatgggttctatggtaccatccctccagagattgggaacctgtcgaaattggaagtgcttaacttgtacaacaacagttttgttggtacaataccccctgagctcgggaagctagataggctggtcacgtttaatctgtgcaacaacaagcttcatggcccgatacctgatgaggttggaaatatgacagcacttcaggaattggtaggatacagtaataatctcactggctcactacctcgttcacttggcaagctgaagaacctgaaaaatattaggttgggtcagaatcttatatcaggcaacattcctgttgagataggtgcatgcctgaacataactgtgtttggtcttgcgcaaaacaagctcgagggtcctttacctaaagagattgggaggttgaccttgatgaccgacttaatcctatgggggaatcagctttctggtgttattcctccagagataggaaactgtacaagtctgagcacaattgccctctatgacaataatctagttggccccattcctgcaacaattgtgaaaattacgaatcttcagaagctatacctttacaggaattcattaaatggtacaattccatctgacattgggaatctttctcttgcaaaagagatcgacttttcagagaatttcttaactggagggataccaaaggagctggccgacatcccaggcttgaatttactctacctcttccagaaccagcttacaggccctattcctacagagttgtgtgggttgaaaaacttgagtaaacttgatctgtcgatcaattcactgaatggcacgattccagttggatttcagtacatgagaaatctaatccaactgcaactcttcaacaatatgctttctggcaacatacctccaaggtttggcatttatagccgtctttgggtggtggatttctcaaacaacagtataacagggcagataccgaaagatctttgcaggcaatcaaaccttattttgttgaatttggggtctaacatgcttacaggaaacattcctcgtgggatcactaactgtaaaacattggtgcagcttcgtctcagtgacaacagtctgacaggaagtttccccactgatctctgcaatctggtaaatttgacaacagttgaactaggtcgaaacaaatttagtgggcctattcctcctcagataggcagttgcaagtctcttcaaaggctggaccttacaaataattatttcacgtcagagttgcctcgagaaattggtaatttgtcaaaactcgttgtcttcaatatctcatctaatagactaggaggaaacataccactagagattttcaattgtacagtgttgcaacgccttgatctcagccagaatagctttgaaggttcgttgccaaatgaagttggtaggctgccacagctggagctgctatcttttgctgacaataggctaactggccagataccacccattcttggtgaactatcacatttaacagcactacagattggtggcaatcagttatctggtgaaataccaaaggagctgggtctgctgtcgagcttgcagatcgccctgaatttgagttacaacaacctctctggcgatattccatcagagcttggtaaccttgcactgttggaaagtttatttcttaataacaacaagctgatgggtgaaatcccaaccacatttgctaatctgtccagtttgcttgagctcaacgtctcctacaattatctctctggtgccctcccgccaataccgctttttgataatatgtctgtgacctgttttattggaaataaaggattatgtggtggacaacttggtagatgtggatcccgaccatcctctagttctcagtcatccaaatcagtcagtcccccattgggcaagatcatagcaattgttgctgctgtcattggagggatttcacttattcttattgcaataattgtgcaccatatcagaaaaccaatggagacagtggcccctttgcaagataagcaaccttttccagcttgttctaatgtgcatgtttctgctaaggatgcatatacatttcaggaattgctcaccgccacaaataactttgacgagagttgtgtgatcggaaggggtgcatgtgggacggtgtacagagccatcctgaaggctggacagacaattgcagtcaagaaacttgcttctaacagggaagggagcaacactgacaacagctttcgtgcagagatcatgactcttggaaagataagacatcgtaatattgtgaagctttacggttttgtataccaccagggttccaaccttctactctacgaatacatgtcaagaggtagtcttggtgagctacttcatggacaatcatcctcttcacttgattgggagacacgcttcctgatagcacttggtgcggctgaagggctttcatacctacatcacgactgcaagcctcgtatcatccaccgtgatatcaaatctaataacattttacttgatgaaaactttgaagcccatgttggtgattttgggttagcaaaggtgattgacatgccatactcgaagtcaatgtctgcaattgcaggttcatacggctatatagcaccagaatatgcttataccatgaaggttactgagaaatgtgatatatatagttatggcgtcgtgctgctggagctgctaactgggcgtgcccctgtgcaacccttggaactaggaggcgatctggtaacatgggtaaagaactacatcaaggacaattgtttgggtccagggatcctcgataaaaaaatggatttacaagatcaaagtgttgtcgatcatatgatcgaggtcatgaaaattgctttggtatgtactagcttgactccgtacgagagaccaccaatgcggcatgttgtagtcatgttaagcgagtctaaagataggacgagggtcagctctgcatcctcgcctgcctctgatgattcttcaaagaaggatgactcataatgtatttataatatgttcgattagccaaaggtaatacacatttttttactgacttttcctagtattgatagtaattagtagggttcttgtaatctgcattcattatttgtgtcagcatttcgtagggagaaatatgatagtggttcatagtttcgtagtgtcattgtatgccgttgtctcagaaaggtttcagactagcatgaagcatttgaggcacgtgacggtcttactgatgccgttgtctctcagaaaggcttcctcttctctgcagatgttcattgttcagttaattctatatgcgtcggtgcattcttactcgagttacaagtacactaggaacacctgtcaggtagccaattctgtaatattctccaacatgaactgcagtgcagatcatatgtaatcatcgatcatatgcaatcgctctttgtagctgttaacctgtagcctctgatcgttgttgctgagtcgtctttct

SEQ ID NO: 102533 - DNA, 1839 bp, Zea Mays
gctgcctctaaaaaagcagatcagcgcgttgtcgcagcgtcggagcacaagcgacatcgctccccgggggccgtcggccggcgaccggcgacttccgcagtagaaccaactccacccacccatccacttggccagcagcttcttgcctgcatcaattgccatggcggcggtggaagcgaagaggagcccacactttgttctctttcccttcctggctcacggccacgtccctgtcttcctccgcctggctggcctcctccgcgcgctccgcccagggctcgaggtcacgctcgtctccaccccgcggctcctgggctccctcacgctcccgcctgcctccccacccgtgcgcctccacgcgctcccgttcgtccccgccgaccacggcctgcccccaggcgctgactccctcgccgatgtccagatccaccagttcatcaccttcttcacggcctccgagtcgctccgccctgcgttcgagaagttcgtctccggcatcggttccccagtctgcatcgtcgccgatgccttcttcgggtggacggccgaagtcgcgcgcgcgcggggcgcgtcccacgcggtgttccttcccggcggcgcgttcggcaacgccgtgttcttctccgtgtgggagcacctcccgcacgcccttacggccgccgacgagttcccgctgccggatttcccagacgtcgttctccaccgcacgcagatcccgaggttcatcctctctgccacgggggcggacccctggacggccttcttccggcgcgtcatcgcctcctgccgcaagaccgacgctctccttgtcaacaccgtccgggaactggaaccctccggcctcgacatgctccggagaagcttcggcgtccagccatggccaatcgggccagtcctcgcagagccgacggccccgtcgtcagactcgcgggacgacgccagcatcatccggtggctggacacgcacccgccgcgctcggtgctgtacatatcattcggatcgcagaacagcatcagcgcggatcagatgatggagctcgcgctggggctggaggcgagcggtcgccccttcctctgggcgctccgcccgccgctggggttcgacgcgaaggacgtgttcaggcccgagtggctcccggctggcttcgaggagcgaacggcgagggcgaatgtgggactgctggcgcgcgggtgggcgccgcagatgcggatcctgtcgcacccgtccaccggcgcgttcctgagccactgcgggtggaactccgtcctcgagagcctgtcccgcggcgtgccgctgatcgggtggccgttgggcgccgagcagttcttcaacgcaaatctcgcggtcgagtggggcgtctgcgtggagctggcgcgcgggaacctggagagctccgcggtggagagcagggcggtggtcgaggccgagcggacggtgatgggggacacggcgaagggtgatgagatgaggagggtggtggcggcgatcgcacgcaccatggaggccgcgtgggaagcgcctggcgggtcggcggcggagagcctggaagggttcctgcgatgcgttgaaccctgagatgccccgctttgagatggttgcgcgaggaatctgcaactaagtacgcgcgcgggaaatctgtgttaagaattcctcaactacaaaggacgacggattgatgggattacggctcctgttgcattgtaacagaaacggatttgtttggttcattaacgtgtagcctgcaggattggatagcgcttctgggtagagataacgagcagacagtggtgcaaacgtttacgggcataaaaaacggtgaaccaaacaacaccttaaaa

SEQ ID NO: 102534 - DNA, 2524 bp, Zea Mays
tcccgtcctccgcccccgccttcccttcccacgccgcccgtgccgccccagatcggcaaatccgcccgcatctaccccgcgcgcgtcccggatggccacttcttcctccgcccgccccggggttccgtagcatgggccactctctctcctcgcattccaaatccaccctctcctccccgccgcgccgcagcaggtcgctctcgccgatgagtccgccgccgctgcggctgaccgcgccgatgcagatcgctgcggaggacagcggcagtgacagttcctcctcgtttgcgccgcccgcccgggactacacccaggacctgcccgacgagatcctcgcgctcgtcttcgcgtcgctctcgcccaccgaccgcaacgcctgctccctcgcctgctcgcgctggatggaggtcgacgccaccacgcgccaccgcctctccaggctcaagctccgcggcctaaggcagctgtccgacgccggtctagcctcgctcgctgctgccgcgccagcgatccgcaagctctccgttgcgtcctgcaccttcggacccaaggcattcgtcgccgtgctccagtcctgccccctcctcgaggacctctccgtcaagcgcctcaggggcctaccagacacggccggtgccaccacttccattgctgaggacatcaaatttccaccggcttcgtccctgcgttctgtttgcctcaaggatctatatagcgctctatgctttgtgccgcttgtggcatcctcaccagaactccgctcgctcaagatactgcggtgctccggcgcctgggacctgccattggaggtcatcactgcacgtgctcctggacttgttgagcttcacctcgagaaactacaggtcggcgaccgtgggcttgctgcgctttctgcctgtgccaatctggaggtcctgttccttgtcaagacccctgagtgcactgattcgggcatcatcagtgttgccgagaagtgccacagactacgcaagctgcatgttgatgggtggcgcacaaaccggattggggattttggactcatggctgtggcacgaggatgtccaaatctgcaggagctcgttttgataggggtcaaccccaccgtgctgagcctccggatgcttggcgagcactgtcggacactggaacgacttgcactttgtgggtgtgaaactgtgggggatgctgagatcatttgcttggctgagcgctgggctgcgctcaagaagctctgcatcaaggggtgcccagtatcagatcgtgggatggaagcactgaatggtggttgtcctagtttagtcaaggtgaagctgaagagatgccgtggagtgtcatacgagtgcattgagaacctgaaggttactagggggggatcattttccatcagcttggatattgtgttggagcatgatgctaggagtgctagtgaaaatggtgcccaggagaacggacaagcacaaattactgcgctgactgatcaaatggcaggcatggaccttccagtcaatgctgctggcgcacaatcatcgactcatacaattaccaggatgaggagcgtcgtgtcagcactccggcgtaggtttggcaatcctccgccaccgtgatttgtgattgaaattaatgaactgtttttacagctttccattttctaatgaaacattcatgttgcctaagacttccattatttctggtcagtgcaagataaccgcctatggatgcttctgcatgtagtttttattaatccacatcagtctttcctgtgctctagaaccaaaatttactcctgttgctttgtttaccataactgtgtttccatatgcatctaaattaatcatctgttttttggggggttttgctgcttggtgttaagaaattgggtgctacagtccctatataaaccattatcctggaaagttggttagttgtagatggtggacgaacccattgaaatatacgcacactgacactggtaatagtagtgttcgcttctgtgttaggtttgaagaaaagatatgtttgaatttgtctccactttctgtatgggcaggagatcctctttgatttaattttccaaattttgtgttgcacgttcttccactgaaatgaatgcaaacaaaaatcaatggtgtatacatcaatgccattgttgctttctgctgttactcttggataacgatgtgctagttgttgcttagcagcgatggttgtttatgctgatagtgaaggatattcgttataaatagactagaatgcgtgtgtttgaggttgtctacatatttgctgcctttcataatataccaatttaatttcagtgtagcaagttgaattggggactacatggcctccatgatgcatggtaccatctctagaactggatgggcattagggcagtgagtgcggtactgtgatcccaaagcttaaaacagtaatttctatgtctatttaatttatgtaaactgtttctatagaaactgtttctatgttccaaatggatagtttctattgaatgacgttttattcaatc

SEQ ID NO: 102535 - DNA, 2689 bp, Zea Mays
tcccgtcctccgcccccgccttcccttcccacgccgcccgtgccgccccagatcggcaaatccgcccgcatctaccccgcgcgcgtcccggatggccacttcttcctccgcccgccccggggttccgtagcatgggccactctctctcctcgcattccaaatccaccctctcctccccgccgcgccgcagcaggtcgctctcgccgatgagtccgccgccgctgcggctgaccgcgccgatgcagatcgctgcggaggacagcggcagtgacagttcctcctcgtttgcgccgcccgcccgggactacacccaggacctgcccgacgagatcctcgcgctcgtcttcgcgtcgctctcgcccaccgaccgcaacgcctgctccctcgcctgctcgcgctggatggaggtcgacgccaccacgcgccaccgcctctccctcgacgcccgcgccgcgctgggcaacgctgcccccgcgctgttcgcgcggttcacggccgtcacgaagctggcgctccgctgggcgcgcgggtcgggcgcggacagcctctccgactacggcgctgcggcggtggccaccgcgctgccctcggggcgcctctccaggctcaagctccgcggcctaaggcagctgtccgacgccggtctagcctcgctcgctgctgccgcgccagcgatccgcaagctctccgttgcgtcctgcaccttcggacccaaggcattcgtcgccgtgctccagtcctgccccctcctcgaggacctctccgtcaagcgcctcaggggcctaccagacacggccggtgccaccacttccattgctgaggacatcaaatttccaccggcttcgtccctgcgttctgtttgcctcaaggatctatatagcgctctatgctttgtgccgcttgtggcatcctcaccagaactccgctcgctcaagatactgcggtgctccggcgcctgggacctgccattggaggtcatcactgcacgtgctcctggacttgttgagcttcacctcgagaaactacaggtcggcgaccgtgggcttgctgcgctttctgcctgtgccaatctggaggtcctgttccttgtcaagacccctgagtgcactgattcgggcatcatcagtgttgccgagaagtgccacagactacgcaagctgcatgttgatgggtggcgcacaaaccggattggggattttggactcatggctgtggcacgaggatgtccaaatctgcaggagctcgttttgataggggtcaaccccaccgtgctgagcctccggatgcttggcgagcactgtcggacactggaacgacttgcactttgtgggtgtgaaactgtgggggatgctgagatcatttgcttggctgagcgctgggctgcgctcaagaagctctgcatcaaggggtgcccagtatcagatcgtgggatggaagcactgaatggtggttgtcctagtttagtcaaggtgaagctgaagagatgccgtggagtgtcatacgagtgcattgagaacctgaaggttactagggggggatcattttccatcagcttggatattgtgttggagcatgatgctaggagtgctagtgaaaatggtgcccaggagaacggacaagcacaaattactgcgctgactgatcaaatggcaggcatggaccttccagtcaatgctgctggcgcacaatcatcgactcatacaattaccaggatgaggagcgtcgtgtcagcactccggcgtaggtttggcaatcctccgccaccgtgatttgtgattgaaattaatgaactgtttttacagctttccattttctaatgaaacattcatgttgcctaagacttccattatttctggtcagtgcaagataaccgcctatggatgcttctgcatgtagtttttattaatccacatcagtctttcctgtgctctagaaccaaaatttactcctgttgctttgtttaccataactgtgtttccatatgcatctaaattaatcatctgttttttggggggttttgctgcttggtgttaagaaattgggtgctacagtccctatataaaccattatcctggaaagttggttagttgtagatggtggacgaacccattgaaatatacgcacactgacactggtaatagtagtgttcgcttctgtgttaggtttgaagaaaagatatgtttgaatttgtctccactttctgtatgggcaggagatcctctttgatttaattttccaaattttgtgttgcacgttcttccactgaaatgaatgcaaacaaaaatcaatggtgtatacatcaatgccattgttgctttctgctgttactcttggataacgatgtgctagttgttgcttagcagcgatggttgtttatgctgatagtgaaggatattcgttataaatagactagaatgcgtgtgtttgaggttgtctacatatttgctgcctttcataatataccaatttaatttcagtgtagcaagttgaattggggactacatggcctccatgatgcatggtaccatctctagaactggatgggcattagggcagtgagtgcggtactgtgatcccaaagcttaaaacagtaatttctatgtctatttaatttatgtaaactgtttctatagaaactgtttctatgttccaaatggatagtttctattgaatgacgttttattcaatc

SEQ ID NO: 102536 - DNA, 1572 bp, Zea Mays
gccgcccgtgccgccccagatcggcaaatccgcccgcatctaccccgcgcgcgtcccggatggccacttcttcctccgcccgccccggggttccgtagcatgggccactctctctcctcgcattccaaatccaccctctcctccccgccgcgccgcagcaggtcgctctcgccgatgagtccgccgccgctgcggctgaccgcgccgatgcagatcgctgcggaggacagcggcagtgacagttcctcctcgtttgcgccgcccgcccgggactacacccaggacctgcccgacgagatcctcgcgctcgtcttcgcgtcgctctcgcccaccgaccgcaacgcctgctccctcgcctgctcgcgctggatggaggtcgacgccaccacgcgccaccgcctctccctgctcaagctccgcggcctaaggcagctgtccgacgccggtctagcctcgctcgctgctgccgcgccagcgatccgcaagctctccgttgcgtcctgcaccttcggacccaaggcattcgtcgccgtgctccagtcctgccccctcctcgaggacctctccgtcaagcgcctcaggggcctaccagacacggccggtgccaccacttccattgctgaggacatcaaatttccaccggcttcgtccctgcgttctgtttgcctcaaggatctatatagcgctctatgctttgtgccgcttgtggcatcctcaccagaactccgctcgctcaagatactgcggtgctccggcgcctgggacctgccattggaggtcatcactgcacgtgctcctggacttgttgagcttcacctcgagaaactacaggtcggcgaccgtgggcttgctgcgctttctgcctgtgccaatctggaggtcctgttccttgtcaagacccctgagtgcactgattcgggcatcatcagtgttgccgagaagtgccacagactacgcaagctgcatgttgatgggtggcgcacaaaccggattggggattttggactcatggctgtggcacgaggatgtccaaatctgcaggagctcgttttgataggggtcaaccccaccgtgctgagcctccggatgcttggcgagcactgtcggacactggaacgacttgcactttgtgggtgtgaaactgtgggggatgctgagatcatttgcttggctgagcgctgggctgcgctcaagaagctctgcatcaaggggtgcccagtatcagatcgtgggatggaagcactgaatggtggttgtcctagtttagtcaaggtgaagctgaagagatgccgtggagtgtcatacgagtgcattgagaacctgaaggttactagggggggatcattttccatcagcttggatattgtgttggagcatgatgctaggagtgctagtgaaaatggtgcccaggagaacggacaagcacaaattactgcgctgactgatcaaatggcaggcatggaccttccagtcaatgctgctggcgcacaatcatcgactcatacaattaccaggatgaggagcgtcgtgtcagcactccggcgtaggtttggcaatcctccgccaccgtga

SEQ ID NO: 102537 - DNA, 1765 bp, Zea Mays
gccgcccgtgccgccccagatcggcaaatccgcccgcatctaccccgcgcgcgtcccggatggccacttcttcctccgcccgccccggggttccgtagcatgggccactctctctcctcgcattccaaatccaccctctcctccccgccgcgccgcagcaggtcgctctcgccgatgagtccgccgccgctgcggctgaccgcgccgatgcagatcgctgcggaggacagcggcagtgacagttcctcctcgtttgcgccgcccgcccgggactacacccaggacctgcccgacgagatcctcgcgctcgtcttcgcgtcgctctcgcccaccgaccgcaacgcctgctccctcgcctgctcgcgctggatggaggtcgacgccaccacgcgccaccgcctctccaggctcaagctccgcggcctaaggcagctgtccgacgccggtctagcctcgctcgctgctgccgcgccagcgatccgcaagctctccgttgcgtcctgcaccttcggacccaaggcattcgtcgccgtgctccagtcctgccccctcctcgaggacctctccgtcaagcgcctcaggggcctaccagacacggccggtgccaccacttccattgctgaggacatcaaatttccaccggcttcgtccctgcgttctgtttgcctcaaggatctatatagcgctctatgctttgtgccgcttgtggcatcctcaccagaactccgctcgctcaagatactgcggtgctccggcgcctgggacctgccattggaggtcatcactgcacgtgctcctggacttgttgagcttcacctcgagaaactacaggtcggcgaccgtgggcttgctgcgctttctgcctgtgccaatctggaggtcctgttccttgtcaagacccctgagtgcactgattcgggcatcatcagtgttgccgagaagtgccacagactacgcaagctgcatgttgatgggtggcgcacaaaccggattggggattttggactcatggctgtggcacgaggatgtccaaatctgcaggagctcgttttgataggggtcaaccccaccgtgctgagcctccggatgcttggcgagcactgtcggacactggaacgacttgcactttgtgggtgtgaaactgtgggggatgctgagatcatttgcttggctgagcgctgggctgcgctcaagaagctctgcatcaaggggtgcccagtatcagatcgtgggatggaagcactgaatggtggttgtcctagtttagtcaaggtgaagctgaagagatgccgtggagtgtcatacgagtgcattgagaacctgaaggttactagggggggatcattttccatcagcttggatattgtgttggagcatgatgctaggagtgctagtgaaaatggtgcccaggagaacggacaagcacaaattactgcgctgactgatcaaatggcaggcatggaccttccagtcaatgctgctggcgcacaatcatcgactcatacaattaccaggatgaggagcgtcgtgtcagcactccggcgtaggtttggcaatcctccgccaccgtgatttgtgattgaaattaatgaactgtttttacagctttccattttctaatgaaacattcatgttgcctaagacttccattatttctggtcagtgcaagataaccgcctatggatgcttctgcatgtagtttttattaatccacatcagtctttcctgtgctctagaaccaaaatttactcctgttgctttgttt

SEQ ID NO: 102538 - DNA, 1755 bp, Zea Mays
gccgcccgtgccgccccagatcggcaaatccgcccgcatctaccccgcgcgcgtcccggatggccacttcttcctccgcccgccccggggttccgtagcatgggccactctctctcctcgcattccaaatccaccctctcctccccgccgcgccgcagcaggtcgctctcgccgatgagtccgccgccgctgcggctgaccgcgccgatgcagatcgctgcggaggacagcggcagtgacagttcctcctcgtttgcgccgcccgcccgggactacacccaggacctgcccgacgagatcctcgcgctcgtcttcgcgtcgctctcgcccaccgaccgcaacgcctgctccctcgcctgctcgcgctggatggaggtcgacgccaccacgcgccaccgcctctccaggctcaagctccgcggcctaaggcagctgtccgacgccggtctagcctcgctcgctgctgccgcgccagcgatccgcaagctctccgttgcgtcctgcaccttcggacccaaggcattcgtcgccgtgctccagtcctgccccctcctcgaggacctctccgtcaagcgcctcaggggcctaccagacacggccggtgccaccacttccattgctgaggacatcaaatttccaccggcttcgtccctgcgttctgtttgcctcaaggatctatatagcgctctatgctttgtgccgcttgtggcatcctcaccagaactccgctcgctcaagatactgcggtgctccggcgcctgggacctgccattggaggtcatcactgcacgtgctcctggacttgttgagcttcacctcgagaaactacaggtcggcgaccgtgggcttgctgcgctttctgcctgtgccaatctggaggtcctgttccttgtcaagacccctgagtgcactgattcgggcatcatcagtgttgccgagaagtgccacagactacgcaagctgcatgttgatgggtggcgcacaaaccggattggggattttggactcatggctgtggcacgaggatgtccaaatctgcaggagctcgttttgataggggtcaaccccaccgtgctgagcctccggatgcttggcgagcactgtcggacactggaacgacttgcactttgtgggtgtgaaactgtgggggatgctgagatcatttgcttggctgagcgctgggctgcgctcaagaagctctgcatcaaggggtgcccagtatcagatcgtgggatggaagcactgaatggtggttgtcctagtttagtcaaggtgaagctgaagagatgccgtggagtgtcatacgagtgcattgagaacctgaaggttactagggggggatcattttccatcagcttggatattgtgttggagcatgatgctaggagtgctagtgaaaatggtgcccaggagaacggacaagcacaaattactgcgctgactgatcaaatggcaggcatggaccttccagtcaatgctgctggcgcacaatcatcgactcatacaattaccaggatgaggagcgtcgtgtcagcactccggcgtagtgtagcaagttgaattggggactacatggcctccatgatgcatggtaccatctctagaactggatgggcattagggcagtgagtgcggtactgtgatcccaaagcttaaaacagtaatttctatgtctatttaatttatgtaaactgtttctatagaaactgtttctatgttccaaatggatagtttctattgaatgacgttttattc

SEQ ID NO: 102539 - DNA, 1691 bp, Zea Mays
ccgcgcgcgtcccggatggccacttcttcctccgcccgccccggggttccgtagcatgggccactctctctcctcgcattccaaatccaccctctcctccccgccgcgccgcagcaggtcgctctcgccgatgagtccgccgccgctgcggctgaccgcgccgatgcagatcgctgcggaggacagcggcagtgacagttcctcctcgtttgcgccgcccgcccgggactacacccaggacctgcccgacgagatcctcgcgctcgtcttcgcgtcgctctcgcccaccgaccgcaacgcctgctccctcgcctgctcgcgctggatggaggtcgacgccaccgcgctgccctcggggcgcctctccaggctcaagctccgcggcctaaggcagctgtccgacgccggtctagcctcgctcgctgctgccgcgccagcgatccgcaagctctccgttgcgtcctgcaccttcggacccaaggcattcgtcgccgtgctccagtcctgccccctcctcgaggacctctccgtcaagcgcctcaggggcctaccagacacggccggtgccaccacttccattgctgaggacatcaaatttccaccggcttcgtccctgcgttctgtttgcctcaaggatctatatagcgctctatgctttgtgccgcttgtggcatcctcaccagaactccgctcgctcaagatactgcggtgctccggcgcctgggacctgccattggaggtcatcactgcacgtgctcctggacttgttgagcttcacctcgagaaactacaggtcggcgaccgtgggcttgctgcgctttctgcctgtgccaatctggaggtcctgttccttgtcaagacccctgagtgcactgattcgggcatcatcagtgttgccgagaagtgccacagactacgcaagctgcatgttgatgggtggcgcacaaaccggattggggattttggactcatggctgtggcacgaggatgtccaaatctgcaggagctcgttttgataggggtcaaccccaccgtgctgagcctccggatgcttggcgagcactgtcggacactggaacgacttgcactttgtgggtgtgaaactgtgggggatgctgagatcatttgcttggctgagcgctgggctgcgctcaagaagctctgcatcaaggggtgcccagtatcagatcgtgggatggaagcactgaatggtggttgtcctagtttagtcaaggtgaagctgaagagatgccgtggagtgtcatacgagtgcattgagaacctgaaggttactagggggggatcattttccatcagcttggatattgtgttggagcatgatgctaggagtgctagtgaaaatggtgcccaggagaacggacaagcacaaattactgcgctgactgatcaaatggcaggcatggaccttccagtcaatgctgctggcgcacaatcatcgactcatacaattaccaggatgaggagcgtcgtgtcagcactccggcgtaggtttggcaatcctccgccaccgtgatttgtgattgaaattaatgaactgtttttacagctttccattttctaatgaaacattcatgttgcctaagacttccattatttctggtcagtgcaagataaccgcctatggatgcttctgcatgtagtttttattaatccacatcagtctttcctgt

SEQ ID NO: 102540 - DNA, 931 bp, Zea Mays
ataaccctctgttcccacgccccctctgccccactcccaaaatcttgacgcctgacgtccccacaagtgatcggcatgagtaacacagctgaggaaaacactggcggcggcggcggcggcagcaccccgacgcgcgttgtggtagtcgagcgcgtggtgacggtggagtacctggagccgtccatgtcgcgggagctgctgggcaagttcccggacccatccgccttcgacttcgactactcgcagagcggaatctggtcgccgctcaacaaggtcccgcgcggcggcgcgtgcgagcccgagacggccgacgccaccaactcctcgaccgacttcctcatcgccaacccgaagcgcagggcgagggccggcggccggcccaaggactcggccggcggcgggaggtccaggtggaggcgcagacggctgcggcgagacgggtccttcctggacctccacgagactggcagggccaggctcgacttctcgccgccggcaccttcccccgcgaaggtagtagccgcccacttgccttcattaagctttgctgaaatagtcgtgagcaattgagcatcacgcgggtttccactgattggttggacttgggggcggttcaggaggggtggaggtgggtgctcaaggcggccatcaggaagttcaaggcgcggcagcggcggtcccggcaggctcccctgctccagatggtcctccccatgctgtgatgatcgatcgatcgatctcgcgcgctcacacgaattgtgcttgccttttgtttccacttgttccatcacagttctattcattgcatccggacgctggtccatgcctcgcctgtattatagttgagttcagatttgcttcaagttgtattgtaaccgtgtaatgcagctaatgctcttgctggagaaatatattggtgtacatcttttca

SEQ ID NO: 102541 - DNA, 878 bp, Zea Mays
ataaccctctgttcccacgccccctctgccccactcccaaaatcttgacgcctgacgtccccacaagtgatcggcatgagtaacacagctgaggaaaacactggcggcggcggcggcggcagcaccccgacgcgcgttgtggtagtcgagcgcgtggtgacggtggagtacctggagccgtccatgtcgcgggagctgctgggcaagttcccggacccatccgccttcgacttcgactactcgcagagcggaatctggtcgccgctcaacaaggtcccgcgcggcggcgcgtgcgagcccgagacggccgacgccaccaactcctcgaccgacttcctcatcgccaacccgaagcgcagggcgagggccggcggccggcccaaggactcggccggcggcgggaggtccaggtggaggcgcagacggctgcggcgagacgggtccttcctggacctccacgagactggcagggccaggctcgacttctcgccgccggcaccttcccccgcgaaggaggggtggaggtgggtgctcaaggcggccatcaggaagttcaaggcgcggcagcggcggtcccggcaggctcccctgctccagatggtcctccccatgctgtgatgatcgatcgatcgatctcgcgcgctcacacgaattgtgcttgccttttgtttccacttgttccatcacagttctattcattgcatccggacgctggtccatgcctcgcctgtattatagttgagttcagatttgcttcaagttgtattgtaaccgtgtaatgcagctaatgctcttgctggagaaatatattggtgtacatcttttcattcgatttcaatcccttcaggctccaagtgagaggaggatattcatggaac

SEQ ID NO: 102542 - DNA, 131 bp, Zea Mays
tttatttttaattctccttgtgtttgtaaggtttttgctatttccattctgactgtatttactcatattagttgtcggggaccataattaggggtacccccaagactcctaatctcagctggtaaccccca

SEQ ID NO: 102543 - DNA, 729 bp, Zea Mays
atgacgaatgggcaagtagagcgtgccaacggcatgatcctgcaagggctcaagccgcggatctacgacgacctcaacaagttcggcaagagatggatgaaggagctcccctcggtggtctggagtctgaggacaacgccgagccgagccacgggcttcacaccgttctttctagtctatggggccgaggccatcttgcccacagacttagaatacggttccccgaggacgagggcctacgccgaccaaagcaatcaatctaatcgagaagactcactggaccagctagaagaggctcgagacatggccttactacactcggcgtggtaccggcagtccctgcgacgctaccacgcccgaggggttcggtcccgagacctccaggtgggcgacctggtgcttcggctgcgacaagacgcccgagggcggcacaagctcacgcctccctgggaagggccattcgtcgtcgcaaaggttctgaagcccggaacatacaagctggctaacagtcaaggcaaggataaggttgtaatagagcacaaaaagatggttgaagcaattgtaaagcgggatgaaaagtgttgcaaaagaatcaaggcagctggtattgacaatgagtgtccagctcttaagctgaaggatgccattgcaatgcacaacactgctcattgcagcattggcccacctgttggagttggcgatgttggtgtattcggcatttttcagtaa

SEQ ID NO: 102544 - DNA, 954 bp, Zea Mays
cagtcatcagttctacactcgtagccaaaatctacagtgggaactcctgcatacattgctcctgaggttcttctgaagaaggaatacgatggaaaggtcgctgatgtgtggtcatgtggagtaacgctgtatgtgatgctggtcggtgcatatccgtttgaggacccagatgagcctaggaattttaggaagacaattcagagaatattgggtgtgcagtactcaattccagactatgtccacatatctccagagtgccaaaatcttgtctctaggattttcgtcgccgacccagccaccaggatcaccatccctgagatagggaaccatccatgattcttgaagaacctaccagctgacctaatggatgatagcacgatgagcaagcagtacgaggagcctgagcaaccgatgcagagcatggatgagatcatgcagatcctagccgaggcgaccattccagcagctggttcttgtggactcaatcagttcttgaacgacgaccttgacctcgacgatgacatggacgacctggactcagataccgatcttgacctggaaagcagtggggaaatcgtgtatgctatttgacagcagcgaggcaatgcgtatcatcagtcctgctcacatcgtttgttgcgccgcaggttactaagataattagagagacaaggggggaggtatctgttgcagatgctgctcgtgtctgatgccgtgatgcccccttttttcatcctgttatgtttggttgttgtttggttggtgcatctccagtgttttacaacagtttggctctttggaattggtagtgctagaacctcgttcatctgagaagaccctttgtttttgcatcaccagctaagagacagtgaagtacttgtattattacactatttgtgtcatatgtatttggtgtagaaaaataaagaaactccattgcccgttcttgttcca

SEQ ID NO: 102545 - DNA, 381 bp, Zea Mays
atgtcgggcaacgacgacaacactgccagcgaagtcgcatctgctgcggcgccaaacaccaccagcgcagccctggagcagaagctggacaccatgacgaaggcccttgcagatctcgccaccagggtgtccaatctggcgctgcatgtgacagaaatcgatgggcgcacgactcccatagtgtccgccgccggcaaccatccagggtttccttacggtctcccaggttatggcggcattccagagacacatgcaccattgacctccaccaggccaccaccagctacagctccaccatcatccaacccattaccaatccaccaaatccccatgccccactcgctgtcacctcttccatcgtttccaccatacataccatag

SEQ ID NO: 102546 - DNA, 2171 bp, Zea Mays
ggaatcgagtctgaagcacagagccatcagagactgaccagagccgagaccaaggatcctgtctcctgtgcactccggcggccggaccacggcgagtccgggacgtagaagtcgccccgcccctccggatcgtgttgctcgggaaattgcttccgagtagttcccgacgccgcgggcctctaagccgctgcctccgacagtctcgtgagtccttgactcttgagaatcgagggaacgcatttacggacgcaagactggatctgaagaggcgctgacgaattggagggccgcgcaagcctggggatgggaaggctggtcgtcgcggcggcggtggccgtgtgggcgttcccgattgcggctttggtgaactccgtagtgccagagccctacatggatgagatcttccatatttcacaagcacagcagtattgccgtggagatttctggacatgggatcccatgatcaccacccctcctggcctgtgagtttttgacaattcctcattgcttcaagctccaatttatcccatcatggatcgttgttgcaattttgcaggtattatgtttcactagcatatattgcttctttctttcctgttgcctggatgtttcgggtagcaaaaacatttgatgttctttgctccacagcagctctcagatcaactaatgttatcttggcaatggtctgcgctgttcttattcatgacctgcttttgtgcatccgaccaggaattggagaaaggaaggcaactgcctacgctattcttgtagcattgtatcctgttcactggttcttcacttttctttattacactgatgttgcatcattagctgcagttcttgcagtgtacctattctgcttgaagaaacagttctggatcagcacaatgtttggtgttttttcaatactttttcgtcagacaaatgtaatatggattatattttttgctgccaatggagctatcacatacgtaaaagacttgtatcccaaggataatgcttctcatgagaacagtgaaccaatacatcagtcaaaaaaagcttctgccagggataacaaaactagtgttcaaagcttgagaagacggcgaatcaatagtcccataaataaggtcattgtttgtgaatctgctaacccttacaacagtcttacagaggaagtgtgtgacatcagcttgaagttatggaactcaaagtgtgaaattttgattgcatttgcaccatttgtagttgtcatggcggcattcgtagcattcataatctggaatggtggtatagtactaggtgctaaggaagctcatgttgtttcgccacactttgcacagtttctgtactttggccttgtgtcagctgctgccctccttccatggcatttcactcccaaccgagtattggatctattccacttgtctggaaagaacaaaacctgtggttctctggcagtattaatgggtcttggtttaagctttgtcgctgtacattttttcagcattgcccatccgtatcttcttgctgacaatagacactataccttctatatttggaggaaggttatccaagtaaactggatgatgaagtacatgttgattccactttatgtgtactcatggctctcaatcatcaacatcttagggaaatcacagacaaggatttgggtgttatcatttgtgctgtcagttgcactggtccttgtacctgccccgctggttgaattcagatactacacaattccattcgtgatactggttcttcactctccatcaattggcaatggcaaattgcttgccatgggatcgctttatgcagccgttgacttgtctaccctggtgatgtttctgttccgaccattccgttgggaacatgagcctggaacacaaaggtttatgtggtagtttaggataaagcacgggaagttgggaatagagcaaaaccttcattgtaccgtcgttttggttcgaacttctaacaggacgattaagcatacatgtgtcaggcttatttggatccttgagtgaatttaatggtaggagtcaaaacaatagcgctgagtatcgtcattttctttttgccagcctttatgtattctaggcattctaatcaacgattgcacaagtcaaaaataggcagtggatacattgtttgatcacacggcttttaagggcaacagcaat

SEQ ID NO: 102547 - DNA, 2080 bp, Zea Mays
ggaatcgagtctgaagcacagagccatcagagactgaccagagccgagaccaaggatcctgtctcctgtgcactccggcggccggaccacggcgagtccgggacgtagaagtcgccccgcccctccggatcgtgttgctcgggaaattgcttccgagtagttcccgacgccgcgggcctctaagccgctgcctccgacagtctcgtgagtccttgactcttgagaatcgagggaacgcatttacggacgcaagactggatctgaagaggcgctgacgaattggagggccgcgcaagcctggggatgggaaggctggtcgtcgcggcggcggtggccgtgtgggcgttcccgattgcggctttggtgaactccgtagtgccagagccctacatggatgagatcttccatatttcacaagcacagcagtattgccgtggagatttctggacatgggatcccatgatcaccacccctcctggcctcatatattgcttctttctttcctgttgcctggatgtttcgggtagcaaaaacatttgatgttctttgctccacagcagctctcagatcaactaatgttatcttggcaatggtctgcgctgttcttattcatgacctgcttttgtgcatccgaccaggaattggagaaaggaaggcaactgcctacgctattcttgtagcattgtatcctgttcactggttcttcacttttctttattacactgatgttgcatcattagctgcagttcttgcagtgtacctattctgcttgaagaaacagttctggatcagcacaatgtttggtgttttttcaatactttttcgtcagacaaatgtaatatggattatattttttgctgccaatggagctatcacatacgtaaaagacttgtatcccaaggataatgcttctcatgagaacagtgaaccaatacatcagtcaaaaaaagcttctgccagggataacaaaactagtgttcaaagcttgagaagacggcgaatcaatagtcccataaataaggtcattgtttgtgaatctgctaacccttacaacagtcttacagaggaagtgtgtgacatcagcttgaagttatggaactcaaagtgtgaaattttgattgcatttgcaccatttgtagttgtcatggcggcattcgtagcattcataatctggaatggtggtatagtactaggtgctaaggaagctcatgttgtttcgccacactttgcacagtttctgtactttggccttgtgtcagctgctgccctccttccatggcatttcactcccaaccgagtattggatctattccacttgtctggaaagaacaaaacctgtggttctctggcagtattaatgggtcttggtttaagctttgtcgctgtacattttttcagcattgcccatccgtatcttcttgctgacaatagacactataccttctatatttggaggaaggttatccaagtaaactggatgatgaagtacatgttgattccactttatgtgtactcatggctctcaatcatcaacatcttagggaaatcacagacaaggatttgggtgttatcatttgtgctgtcagttgcactggtccttgtacctgccccgctggttgaattcagatactacacaattccattcgtgatactggttcttcactctccatcaattggcaatggcaaattgcttgccatgggatcgctttatgcagccgttgacttgtctaccctggtgatgtttctgttccgaccattccgttgggaacatgagcctggaacacaaaggtttatgtggtagtttaggataaagcacgggaagttgggaatagagcaaaaccttcattgtaccgtcgttttggttcgaacttctaacaggacgattaagcatacatgtgtcaggcttatttggatccttgagtgaatttaatggtaggagtcaaaacaatagcgctgagtatcgtcattttctttttgccagcctttatgtattctaggcattctaatcaacgattgcacaagtcaaaaataggcagtggatacattgtttgatcacacggcttttaagggcaacagcaat

SEQ ID NO: 102548 - DNA, 2135 bp, Zea Mays
ggaatcgagtctgaagcacagagccatcagagactgaccagagccgagaccaaggatcctgtctcctgtgcactccggcggccggaccacggcgagtccgggacgtagaagtcgccccgcccctccggatcgtgttgctcgggaaattgcttccgagtagttcccgacgccgcgggcctctaagccgctgcctccgacagtctcgtgagtccttgactcttgagaatcgagggaacgcatttacggacgcaagactggatctgaagaggcgctgacgaattggagggccgcgcaagcctggggatgggaaggctggtcgtcgcggcggcggtggccgtgtgggcgttcccgattgcggctttggtgaactccgtagtgccagagccctacatggatgagatcttccatatttcacaagcacagcagtattgccgtggagatttctggacatgggatcccatgatcaccacccctcctggcctgtattatgtttcactagcatatattgcttctttctttcctgttgcctggatgtttcgggtagcaaaaacatttgatgttctttgctccacagcagctctcagatcaactaatgttatcttggcaatggtctgcgctgttcttattcatgacctgcttttgtgcatccgaccaggaattggagaaaggaaggcaactgcctacgctattcttgtagcattgtatcctgttcactggttcttcacttttctttattacactgatgttgcatcattagctgcagttcttgcagtgtacctattctgcttgaagaaacagttctggatcagcacaatgtttggtgttttttcaatactttttcgtcagacaaatgtaatatggattatattttttgctgccaatggagctatcacatacgtaaaagacttgtatcccaaggataatgcttctcatgagaacagtgaaccaatacatcagtcaaaaaaagcttctgccagggataacaaaactagtgttcaaagcttgagaagacggcgaatcaatagtcccataaataaggtcattgtttgtgaatctgctaacccttacaacagtcttacagaggaagtgtgtgacatcagcttgaagttatggaactcaaagtgtgaaattttgattgcatttgcaccatttgtagttgtcatggcggcattcgtagcattcataatctggaatggtggtatagtactaggtgctaaggaagctcatgttgtttcgccacactttgcacagtttctgtactttggccttgtgtcagctgctgccctccttccatggcatttcactcccaaccgagtattggatctattccacttgtctggaaagaacaaaacctgtggttctctggcagtattaatgggtcttggtttaagctttgtcgctgtacattttttcaggtttattacctagcattgcccatccgtatcttcttgctgacaatagacactataccttctatatttggaggaaggttatccaagtaaactggatgatgaagtacatgttgattccactttatgtgtactcatggctctcaatcatcaacatcttagggaaatcacagacaaggatttgggtgttatcatttgtgctgtcagttgcactggtccttgtacctgccccgctggttgaattcagatactacacaattccattcgtgatactggttcttcactctccatcaattggcaatggcaaattgcttgccatgggatcgctttatgcagccgttgacttgtctaccctggtgatgtttctgttccgaccattccgttgggaacatgagcctggaacacaaaggtttatgtggtagtttaggataaagcacgggaagttgggaatagagcaaaaccttcattgtaccgtcgttttggttcgaacttctaacaggacgattaagcatacatgtgtcaggcttatttggatccttgagtgaatttaatggtaggagtcaaaacaatagcgctgagtatcgtcattttctttttgccagcctttatgtattctaggcattctaatcaacgattgcacaagtcaaaaataggcagtggatacattgtttgatcacacggcttttaagggcaacagcaattatatggattgatattgaacaggaa

SEQ ID NO: 102549 - DNA, 2132 bp, Zea Mays
ggaatcgagtctgaagcacagagccatcagagactgaccagagccgagaccaaggatcctgtctcctgtgcactccggcggccggaccacggcgagtccgggacgtagaagtcgccccgcccctccggatcgtgttgctcgggaaattgcttccgagtagttcccgacgccgcgggcctctaagccgctgcctccgacagtctcgtgagtccttgactcttgagaatcgagggaacgcatttacggacgcaagactggatctgaagaggcgctgacgaattggagggccgcgcaagcctggggatgggaaggctggtcgtcgcggcggcggtggccgtgtgggcgttcccgattgcggctttggtgaactccgtagtgccagagccctacatggatgagatcttccatatttcacaagcacagcagtattgccgtggagatttctggacatgggatcccatgatcaccacccctcctggcctgtgagtttttgacaattcctcattgcttcaagctccaatttatcccatcatggatcgttgttgcaattttgcaggaattggagaaaggaaggcaactgcctacgctattcttgtagcattgtatcctgttcactggttcttcacttttctttattacactgatgttgcatcattagctgcagttcttgcagtgtacctattctgcttgaagaaacagttctggatcagcacaatgtttggtgttttttcaatactttttcgtcagacaaatgtaatatggattatattttttgctgccaatggagctatcacatacgtaaaagacttgtatcccaaggataatgcttctcatgagaacagtgaaccaatacatcagtcaaaaaaagcttctgccagggataacaaaactagtgttcaaagcttgagaagacggcgaatcaatagtcccataaataaggtcattgtttgtgaatctgctaacccttacaacagtcttacagaggaagtgtgtgacatcagcttgaagttatggaactcaaagtgtgaaattttgattgcatttgcaccatttgtagttgtcatggcggcattcgtagcattcataatctggaatggtggtatagtactaggtgctaaggaagctcatgttgtttcgccacactttgcacagtttctgtactttggccttgtgtcagctgctgccctccttccatggcatttcactcccaaccgagtattggatctattccacttgtctggaaagaacaaaacctgtggttctctggcagtattaatgggtcttggtttaagctttgtcgctgtacattttttcagcattgcccatccgtatcttcttgctgacaatagacactataccttctatatttggaggaaggttatccaagtaaactggatgatgaagtacatgttgattccactttatgtgtactcatggctctcaatcatcaacatcttagggaaatcacagacaaggatttgggtgttatcatttgtgctgtcagttgcactggtccttgtacctgccccgctggttgaattcagatactacacaattccattcgtgatactggttcttcactctccatcaattggcaatggcaaattgcttgccatgggatcgctttatgcagccgttgacttgtctaccctggtgatgtttctgttccgaccattccgttgggaacatgagcctggaacacaaaggtttatgtggtagtttaggataaagcacgggaagttgggaatagagcaaaaccttcattgtaccgtcgttttggttcgaacttctaacaggacgattaagcatacatgtgtcaggcttatttggatccttgagtgaatttaatggtaggagtcaaaacaatagcgctgagtatcgtcattttctttttgccagcctttatgtattctaggcattctaatcaacgattgcacaagtcaaaaataggcagtggatacattgtttgatcacacggcttttaagggcaacagcaattatatggattgatattgaacaggaagtgcagtgttccttgcgatgagaggtggtgttgtgtgagctaatattcttgtattgttctccaaatcactgtcgtaattgaagaaatgtttgcaccgtcaacagaaact

SEQ ID NO: 102550 - DNA, 1665 bp, Zea Mays
cttccctgtcgctctctccccgttctggttttcgtctaatctagattggatgggatgatgattcgaggcgttagcttattttagctgtaatcccagactaaaccctggctcgttggttcggcggcctcccggtgagaatcgcatctccaatcaggatggagacgaagaaagtggagtctgtccctggtcataatcacgcggggagtggatgataagatcataaaaatcagacaatcatcggtcacaactcatactgttgtgtctttttaacccctgagccaccgaggccaggagtgattgattggtttaagctcagcgcacccagagtctgtgacattcatgggtagtgcctgttcgaggaagaggggccagctggtccaagaggatgatctctacagtgcgaggttctccaagagcggcagcttcaagtggctgctgcatacgctgccccgcagcaactttgctgatgtgcagcggagagcacagggcccagctccaaaccggtgcccgtcgcttgtggagctgtgcgtggccaaagtctgcaaggacataaatatgtattctgatttatccctgctgcccagagatcttagtcagcagatattcaatgagctggtggaatgtggatgcctcacggaggcatcgcttggggctttccgtgattgcgatttgcaggatatttgtctgggagactaccctggagttactgatgcttggatggaagtagtggcttctcaagggcagtccttgctatctgttgacctctcttgctcggatgtcactgatagtggattcaatcttcttaaagattgctcaagcatgcaaagtttggcatgtgattattgtgatcaaatctcagaacatggacttaagacattatcaggcttttcaaacttgacatcactgagcattaagaaatgtgctgctgttactgctgaaggagcaaaagcctttgcaaacttagttaatttggtaaacttagacctcgagcgttgtccaaagattaatggtgggcttatacatttaaaaggcttgaaaaaactggaaaaactgaatctgagatactgtaatggcatcacagattcagacatgaaatatttgtcagatctcacgaatttgagagagctacagctctcttcctgcaaaatatctgcttttggtgtttcttatctgagaggtttgcacaagctaggtcatctaaacctggagggctgtgcagttactgcagtttgtttggaggttatatctgagcttgcttcgttggtcttgttgaatctgagtcggtgtggcatatgcgatgaaggctgtgagaacttgaaaggtcttacaaaattgaaggctctaagtttagggttcaaccaaattacagatgcatgtttaattcatttaaaagatttggtcaacttggagtgcttgaacttggactcatgtaagattggtgatgagggtctatttcacctaaaaggcctcatacagctaaaaaacctggagctttcagacactgaagttggaagcaatggacttcgtcatctttctggttgatttaaaacgcctgcagaaatgctagtattattggcaattgtttttttcttgttaatccattctggtagaccaattcaaatcgtctagtcgttttttaatttattgtgtgttcggtttgaggaa

SEQ ID NO: 102551 - DNA, 2473 bp, Zea Mays
cttccctgtcgctctctccccgttctggttttcgtctaatctagattggatgggatgatgattcgaggcgttagcttattttagctgtaatcccagactaaaccctggctcgttggttcggcggcctcccggtgagaatcgcatctccaatcaggtggatggagacgaagaaagtggagtctgtccctggtcataatcacgcggggagtggatgataagatcataaaaatcagacaatcatcggtcacaactcatactgttgtgtctttttaacccctgagccaccgaggccaggagtgattgattggtttaagctcagcgcacccagagtctgtgacattcatgggtagtgcctgttcgaggaagaggggccagctggtccaagaggatgatctctacagtgcgaggttctccaagagcggcagcttcaagtggctgctgcatacgctgccccgcagcaactttgctgatgtgcagcggagagcacagggcccagctccaaaccggtgcccgtcgcttgtggagctgtgcgtggccaaagtctgcaaggacataaatatgtattctgatttatccctgctgcccagagatcttagtcagcagatattcaatgagctggtggaatgtggatgcctcacggaggcatcgcttggggctttccgtgattgcgatttgcaggatatttgtctgggagactaccctggagttactgatgcttggatggaagtagtggcttctcaagggcagtccttgctatctgttgacctctcttgctcggatgtcactgatagtggattcaatcttcttaaagattgctcaagcatgcaaagtttggcatgtgattattgtgatcaaatctcagaacatggacttaagacattatcaggcttttcaaacttgacatcactgagcattaagaaatgtgctgctgttactgctgaaggagcaaaagcctttgcaaacttagttaatttggtaaacttagacctcgagcgttgtccaaagattaatggtgggcttatacatttaaaaggcttgaaaaaactggaaaaactgaatctgagatactgtaatggcatcacagattcagacatgaaatatttgtcagatctcacgaatttgagagagctacagctctcttcctgcaaaatatctgcttttggtgtttcttatctgagaggtttgcacaagctaggtcatctaaacctggagggctgtgcagttactgcagtttgtttggaggttatatctgagcttgcttcgttggtcttgttgaatctgagtcggtgtggcatatgcgatgaaggctgtgagaacttgaaaggtcttacaaaattgaaggctctaagtttagggttcaaccaaattacagatgcatgtttaattcatttaaaagtaatgctgataagatgaaaagcagatgccagcctggaatgacatcttcaaggaggatttggtcaacttggagtgcttgaacttggactcatgtaagattggtgatgagggtctatttcacctaaaaggcctcatacagctaaaaaacctggagctttcagacactgaagttggaagcaatggacttcgtcatctttctggtctgcgtaatttgcagagcatcaatctctctttcacattggttactgacattggtttgaagaagatctctggcttgagttcactgaagtctcttaatcttgacaatcgccaaatcacagatactggtttagcgtctcttacaggtctcactggattgacacacctcgacctatttggagctcgcataactgattctggcatgagctgcttcagatttttcaagaatattcagtccctggaggtctgcggtgggttgattacggatgctggcgtgaagaacatcaaggacctgaaagctctgacgttgctcaacctatctcaaaacggcaagctcacggacaaaaccctggagctgatctccggcctgactgcgctagtgtcgttgaacgtgtccaactcccgggtctccaactcgggcctccaccacctgaaaccgctgcagaacctgcgctccctatccctggagtcctgcagggtgacggcaagcgagatggataagctccggctggtcgccctccccaaccttatcagtgtgcggccggagtgatacgaccgccagcgctcccacagcgacctgtaactgtggagcaagtggcgcctggctagagcaggccgccttgtacatacttttgcaaaaacgaggtgtctgtacatattgttcgtcgtgtcgtgtcgtgtcagtgtgcctgatggcaacgggctaatacgtccgtgccaacgtgtgcatggtatcccacggaccctgtggtagtaaggagcagttgtaaatatgccgtgcttcctctccatgtggggtgctgctgtataaatagattggtgcattgctaaatacctctgcttggtaacatcgtggtatcggtgctagtttccatgtaaa

SEQ ID NO: 102552 - DNA, 2348 bp, Zea Mays
cttccctgtcgctctctccccgttctggttttcgtctaatctagattggatgggatgatgattcgaggcgttagcttattttagctgtaatcccagactaaaccctggctcgttggttcggcggcctcccggtgagaatcgcatctccaatcaggtggatggagacgaagaaagtggagtctgtccctggtcataatcacgcggggagtggatgataagatcataaaaatcagacaatcatcggtcacaactcatactgttgtgtctttttaacccctgagccaccgaggccaggagtgattgattggtttaagctcagcgcacccagagtctgtgacattcatgggtagtgcctgttcgaggaagaggggccagctggtccaagaggatgatctctacagtgcgaggttctccaagagcggcagcttcaagtggctgctgcatacgctgccccgcagcaactttgctgatgtgcagcggagagcacagggcccagctccaaaccggtgcccgtcgcttgtggagctgtgcgtggccaaagtctgcaaggacataaatatgtattctgatttatccctgctgcccagagatcttagtcagcagatattcaatgagctggtggaatgtggatgcctcacggaggcatcgcttggggctttccgtgattgcgatttgcaggatatttgtctgggagactaccctggagttactgatgcttggatggaagtagtggcttctcaagggcagtccttgctatctgttgacctctcttgctcggatgtcactgatagtggattcaatcttcttaaagattgctcaagcatgcaaagtttggcatgtgattattgtgatcaaatctcagaacatggacttaagacattatcaggcttttcaaacttgacatcactgagcattaagaaatgtgctgctgttactgctgaaggagcaaaagcctttgcaaacttagttaatttggtaaacttagacctcgagcgttgtccaaagattaatggtgggcttatacatttaaaaggcttgaaaaaactggaaaaactgaatctgagatactgtaatggcatcacagattcagacatgaaatatttgtcagatctcacgaatttgagagagctacagctctcttcctgcaaaatatctgcttttggtgtttcttatctgagaggtttgcacaagctaggtcatctaaacctggagggctgtgcagttactgcagtttgtttggaggttatatctgagcttgcttcgttggtcttgttgaatctgagtcggtgtggcatatgcgatgaaggctgtgagaacttgaaaggtcttacaaaattgaaggctctaagtttagggttcaaccaaattacagatgcatgtttaattcatttaaaagatttggtcaacttggagtgcttgaacttggactcatgtaagattggtgatgagggtctatttcacctaaaaggcctcatacagctaaaaaacctggagctttcagacactgaagttggaagcaatggacttcgtcatctttctggtctgcgtaatttgcagagcatcaatctctctttcacattggttactgacattggtttgaagaagatctctggcttgagttcactgaagtctcttaatcttgacaatcgccaaatcacagatactggtttagcgtctcttacaggtctcactggattgacacacctcgacctatttggagctcgcataactgattctggcatgagctgcttcagatttttcaagaatattcagtccctggaggtctgcggtgggttgattacggatgctggcgtgaagaacatcaaggacctgaaagctctgacgttgctcaacctatctcaaaacggcaagctcacggacaaaaccctggagctgatctccggcctgactgcgctagtgtcgttgaacgtgtccaactcccgggtctccaactcgggcctccaccacctgaaaccgctgcagaacctgcgctccctatccctggagtcctgcagggtgacggcaagcgagatggataagctccggctggtcgccctccccaaccttatcagtgtgcggccggagtgatacgaccgccagcgctcccacagcgacctgtaactgtggagcaagtggcgcctggctagagcaggccgccttgtacatacttttgcaaaaacgaggtgtctgtacatattgttcgtcgtgtcgtgtcgtgtcagtgtgcctgatggcaacgggctaatacgtccgtgccaacgtgtgcatggtatcccacggaccctgtggtagtaaggagcagttgtaaatatgccgtgcttcctctccattttccatgtaaattcgtg

SEQ ID NO: 102553 - DNA, 1207 bp, Zea Mays
gtgcttttttttatttttgactaccattgcctttagttgttcagtaatcatgaagttttattaaagttagcagtaactcattgcttttagttgttgggtcattcaattcaggtttgcacaagctaggtcatctaaacctggagggctgtgcagttactgcagtttgtttggaggttatatctgagcttgcttcgttggtcttgttgaatctgagtcggtgtggcatatgcgatgaaggctgtgagaacttgaaaggtcttacaaaattgaaggctctaagtttagggttcaaccaaattacagatgcatgtttaattcatttaaaagatttggtcaacttggagtgcttgaacttggactcatgtaagattggtgatgagggtctatttcacctaaaaggtctgcgtaatttgcagagcatcaatctctctttcacattggttactgacattggtttgaagaagatctctggcttgagttcactgaagtctcttaatcttgacaatcgccaaatcacagatactggtttagcgtctcttacaggtctcactggattgacacacctcgacctatttggagctcgcataactgattctggcatgagctgcttcagatttttcaagaatattcagtccctggaggtctgcggtgggttgattacggatgctggcgtgaagaacatcaaggacctgaaagctctgacgttgctcaacctatctcaaaacggcaagctcacggacaaaaccctggagctgatctccggcctgactgcgctagtgtcgttgaacgtgtccaactcccgggtctccaactcgggcctccaccacctgaaaccgctgcagaacctgcgctccctatccctggagtcctgcagggtgacggcaagcgagatggataagctccggctggtcgccctccccaaccttatcagtgtgcggccggagtgatacgaccgccagcgctcccacagcgacctgtaactgtggagcaagtggcgcctggctagagcaggccgccttgtacatacttttgcaaaaacgaggtgtctgtacatattgttcgtcgtgtcgtgtcgtgtcagtgtgcctgatggcaacgggctaatacgtccgtgccaacgtgtgcatggtatcccacggaccctgtggtagtaaggagcagttgtaaatatgccgtgcttcctctccattttccatgtaaattcgtg

SEQ ID NO: 102554 - DNA, 2004 bp, Zea Mays
atggaggccgccctggagctgcgggcgcgcgcgttcctcgcgctgcgtcgctacagcgaggtcgcggagatgctccgcgattacatccccagccgcggcaagtcgtgctctggcgaggacacctcctcgtcctcgtcggcgtccctcttgtccactggctccggtgatctcggcacgatctcccgcgccaaactcttctcgcccgaccgccaccgctccgacgacgcggaacctgacgctcgccccgtccgctccttctgctgcttcgacatctccgagctcaagcgccgcgtccttgccggcctctccaagaacccgagcaccggtacccagtggaggtacttggtcctcggccaagcttgcttccacctcggcctcatcgaggacgctatggtgctgctgcagaccggccgccgcctcgcttcggtggcgttccgccgcgagagcgtgtgctggtcggacgacagtttctcgtcgtcgtcgtcctccgcgaccgccgcgactccctgcgtcccgtccggcaagacatccagctccggttcggcgttcataatcccaacgacggagtcggaggccgtgtcccagctcctggcgcacgtgaagctcctgctccggcgccgagcggctgccatggccgcgctggacgctggcctctcggccgaggccgtgcgccatgcggcgcacctcgagtccctgtccatcgacccgggccgccacttgctgtactcctactccgccgccgcgcacggattcgtggcggcgctgctaccggtccccgaggtgctccaggttgtgccggacgagatgttccagctccacaccacgcgcttcccagagttcttgggccttctcacgccggcctaccggcctgccatgggcaatctggaagcggccacgcacgacgtggtcataggggttcttgacaccggcgtatggccagagtcgccgagcttcgcgggcggcaacctgccgccatcgccggctcgctggaagggggtgtgcgaggctggcgtggatttcccgtcgagcttgtgcgggaggaagctggtgggcgcgtgcagcttctcgcgcggcctccgtgcggcaaacggcggcgcaataggtgtggggaagaggacgttcagaggagagtctagtagggcctcggccgtttcttcgtctccacagctcccgcagccgcggaccagcgcgtcactctaccgggttccggcgtctccccttagcgcggcatccatggcggagcagacggaaagggctttcttgaagcagcccaaggtgtttctctgttccaagaaggccaccaaggtaaacaaacctggcaagggaggaaacagattctggaagaacattggccttggtttcaagacacccagggaagccattgaaggaacctacattgataagaaatgtccattcaccggcactgtgtctatcaggggtcgcatcatcgctggaacatgccacagtgctaagatgaataggaccatcattgttcgtaggaattatcttcactttgtcaagaagtatgagaagagacactccaacatccctgcgcacatttcaccatgctttcgtgtcaaggaaggagatcatgtgatcattggccagtgcaggccagtgtcgaagactgtaaggttcaatgtgctcaaagttattcctgcaggttcgaagagtggagcagtgaagaaagctttcactgccgcttaagatcatgacgagttcatcatccatggcccggaaaagctctgttataacgttttgatgctgcctattagcctttttccccgtaactactatatgtgtacttggaattggacttgaattacatccagaacttgaaatcctgaaaaaaaaaaatcataaccctttgtctgattgcttagcaccttttagtttcagtaaaagcatatgaccctcaaaatgttttctaggtcagtagtgatacgtttgaaaccttttggcatccatcttggcttgaaaaaattgctattttgacattctcaa

SEQ ID NO: 102555 - DNA, 2013 bp, Zea Mays
atggaggccgccctggagctgcgggcgcgcgcgttcctcgcgctgcgtcgctacagcgaggtcgcggagatgctccgcgattacatccccagccgcggcaagtcgtgctctggcgaggacacctcctcgtcctcgtcggcgtccctcttgtccactggctccggtgatctcggcacgatctcccgcgccaaactcttctcgcccgaccgccaccgctccgacgacgcggaacctgacgctcgccccgtccgctccttctgctgcttcgacatctccgagctcaagcgccgcgtccttgccggcctctccaagaacccgagcaccggtacccagtggaggtacttggtcctcggccaagcttgcttccacctcggcctcatcgaggacgctatggtgctgctgcagaccggccgccgcctcgcttcggtggcgttccgccgcgagagcgtgtgctggtcggacgacagtttctcgtcgtcgtcgtcctccgcgaccgccgcgactccctgcgtcccgtccggcaagacatccagctccggttcggcgttcataatcccaacgacggagtcggaggccgtgtcccagctcctggcgcacgtgaagctcctgctccggcgccgagcggctgccatggccgcgctggacgctggcctctcggccgaggccgtgcgccatgcggcgcacctcgagtccctgtccatcgacccgggccgccacttgctgtactcctactccgccgccgcgcacggattcgtggcggcgctgctaccggtccccgaggtgctccaggttgtgccggacgagatgttccagctccacaccacgcgcttcccagagttcttgggccttctcacgccggcctaccggcctgccatgggcaatctggaagcggccacgcacgacgtggtcataggggttcttgacaccggcgtatggccagagtcgccgagcttcgcgggcggcaacctgccgccatcgccggctcgctggaagggggtgtgcgaggctggcgtggatttcccgtcgagcttgtgcgggaggaagctggtgggcgcgtgcagcttctcgcgcggcctccgtgcggcaaacggcggcgcaataggtgtggggaagaggacgttcagaggagagtctagtagggcctcggccgtttcttcgtctccacagctcccgcagccgcggaccagcgcgtcactctaccgggttccggcgtctccccttagcgcggcatccatggcggagcagacggaaagggctttcttgaagcagcccaaggtgtttctctgttccaagaaggccaccaaggtaaacaaacctggcaagggaggaaacagattctggaagaacattggccttggtttcaagacacccagggaagccattgaaggaacctacattgataagaaatgtccattcaccggcactgtgtctatcaggggtcgcatcatcgctggaacatgccacagtgctaagatgaataggaccatcattgttcgtaggaattatcttcactttgtcaagaagtaccagaggtatgagaagagacactccaacatccctgcgcacatttcaccatgctttcgtgtcaaggaaggagatcatgtgatcattggccagtgcaggccagtgtcgaagactgtaaggttcaatgtgctcaaagttattcctgcaggttcgaagagtggagcagtgaagaaagctttcactgccgcttaagatcatgacgagttcatcatccatggcccggaaaagctctgttataacgttttgatgctgcctattagcctttttccccgtaactactatatgtgtacttggaattggacttgaattacatccagaacttgaaatcctgaaaaaaaaaaatcataaccctttgtctgattgcttagcaccttttagtttcagtaaaagcatatgaccctcaaaatgttttctaggtcagtagtgatacgtttgaaaccttttggcatccatcttggcttgaaaaaattgctattttgacattctcaa

SEQ ID NO: 102556 - DNA, 357 bp, Zea Mays
atgccgatcacggcgagcaccttgcgcgaggactggaagtcctcccagggtgaaggcacgcagccgccgagcacgaacttgaggcggaggcatccggtctcccagggctggtgctggaaggggctcttctggtgctccgcgtagtaggtgcggagcgaggcgaggtcgacgcgcgcgtggcgcgccaccagggccgcgtactcgcgcaggcgcggcggcggaatcgggccgcccacggggagcaccgcgacgcggatggcagaaccggactcgatgctcaacccgggctccatggccagtggcgcgtcccccctgcctcggctcacctggctggctccgggtcgggaaaggcagatc

SEQ ID NO: 102557 - DNA, 1485 bp, Zea Mays
cgtcgagctcgtctgcgctgctcctccctggtgctcgagcgctcctggtgctctccctgacggtcttgctctctctgctcggcgctctctctgcccggcgctctctctccaggcatgtcaatggaatctcctgtagttcttcggagcacgaaggcattactcgaccgattggagaaacgccttgtcatttctcattcagtagcatcttcatcagtagaaaatgttgatcatctactgaaacgccttggttctcccccaaggaggagggctcctcctagcagagaaggaaaaactcgggcagtggtaaaaagaccagctaaaagttctgaggcaagcatcaaattgcctagatactcactgagggtggtgctctgtgcttacatgatactggctcatcccagtgctgttttaagtgggcaaggtgagcgggagaaacagcttatcgagtcggcagcaaactttatcaaggagttcgagctgttgattaaggtaatccttgatggaccagggcagtcatctggtgttactggccagaggaagttcagggcacagttggctaattttgacaaggcgtggtgttcgtatctttacagctttgtggtgtggaaggtaaaagatgcaagattattggaggaagatcttgtcagggctgcatgcaagcttgagttgtcaatgatgcaaacatgcaagctaactgcagataggcactcgcaaaacaatcttacacatgacatgaaggcaattcagaaacaggttattgatgatcaaaagcttttacgtgataaggttcaacacctgagtggcgatgctggccttgagcggatgaactctgctctttccgatacgagatcaaagttctttgaagcaaaggagaatgggagtccattgacagcacctgttgcaaatgtgtctacccctttgagcatcaattcgtctgggaaagcaccactttctgaggttcctgaaagttccaggacaaatgttattgggacaagctcagtaatgccagcagcagggcaggttcctgctcttgttccggtactccgatctggtcatggagctccagtagggcaaccatctccttctgcaggagacacctatggtcaaccagagtgcaagggtgagaagcttgacaagctaataaggattggcctgttgcaactcattagtagtgtggagggcttgcaattgcagtcaactcctgaaagttttcagattaatctgctgaggctgagggccgtgcagagccaattccaacaggtgatcgtgatcgccacaagcatgctcgtcctgcaccaagttctgatgagagagaactcgagggccactcctctggaactggaaaatgccatctcagaactcgtcaaggctctcgcggaacagccagggaagagcagcgcagacgagcgccgggaaagaccattggggagcaccagggaggagcagcgcagacgagctcgacaagcgccgggagggagaggatag

SEQ ID NO: 102558 - DNA, 402 bp, Zea Mays
atggatgaagaaaacgatggctctacacagagcatcacggtagaaatgaaagtatacatgcattgcgacgcttgcgaaaggaaagtgcgccgtaccatcagcaaagtcgaaggcgtcgggacggtagaggtggacagggaagagaacaaggtcacagtgacgggagattttgagcctgagaaggtggtgaggaagatcaggaagaagaccggaaagaaggcggagatcttggtccgcgaggaaaacgaggaggacgaaggcaacggagaagaaacttacgttccttatccattgctgtaccctgatgcagatattcccgacgagtttcagacctataggccggaacgatggaacttccattactttgacgacgaaaactcacaagcgtgtacggtaatgtaa

SEQ ID NO: 102559 - DNA, 3212 bp, Zea Mays
acagctcagctgctcaacctcagccaactcagatgttcccgttgcacgattcgaacggcggcgaatcgcaaaaaattgggagggagaggtcgagtgcgaacgcctcctcctcgccgccaccgccaccgccgccgccaccaccacaaccggcgtctcgtcggctataaaaccctaccccttctagtcttcccgtcgccaccagccgcctcgctgaaaccctaaacctctctccccgttaggtctcccccagcgccccgacgatggcggaggacgcaccgcctgcagcccctgtgatgacgccggaggaagtgcaggctgagaccgagctgcggatgcgcgacataggccagcgctttggtgctatcccagaggaccccgacgagctgctccggttactcgaagaagccgaaatctggttgtccagggtggatcaatctccgcccgagagcatgtacaatgctcttcgccccaccatggctgttttgattacaaatgagctactggagcaccctgatcccaacgtgaaggttgctctcacctcttgcttaacagaagttaccaggattactgcgccagaggccccctatgatgatgatgttatgaaggacgtgtttaagagagtcgtagagacttttgctgagttggatgatatgaacagcccctcctttgcaaggagggtttcgatccttgattctgttgcaagggttcgttgttgtgttctgatgttggatcttgacttggaccatatgatactggacatgttccgccatttttttaaaactgcctccaccaagcattcagaacaagtcacccactgtatggaaattataatgatgtttgtaattcaggagagcgatgatgtccatgctgaactggcatcattccttcttcagaaccttacaaaagaagcacaagaaactctcccggcatcttttggacttgcagagagggtactaggcctatgcagggacaagctcaaaccagtgtttcatgagttacttaaggccactctcttggatgaatacagcaatgttgttacgatgttgttccaagatgcttcagatgctggagagaacaatgtcgatgcatcaggaaaagacatggcagctgaaggtaaactttctgaaaagtctgtttctgatgagtcacgacaggaaacttcaaaggtagaccgaaatgtcaattgcctaggccaagaaggtactagcccaagtagtactccaacaactgccattagcaatggtggtgctccgattgacaatgtcaagtctccagatgaaccagattcttcaaaacagaagcaagaactgacttctggtgacgaacagacaccagattcttctaaacagaagcaagaactgacttctggtgatgagcagacaccaaattcttctaaacagaagccagaactgacttttcttgacaagcagaccaaaagttctgagcaattggtatcttgtgatgtagaagtacaagaaccagtgactgttggaactgaaaagctatctgatatcaattcaaagaaagatcacaagcttggttcttccaccggatctgagatgactgaacaacccaaggttgttaaagacaatgagagtctagtagcatctgagttatccccagagacaaatgatggtgataaaaagcagctaacagagtctggcaatataactgctgacgaatcatcaaaaccaatcgatactaaacctgcttctgttaaaccaaagaggggccgacctccagcagcaaagtctcaggagaaaaagcctgttggaaagaaacaggcatcaaacctaaaatctccaaaacttgatcctgtcactgattctgtagggagagctaccaggcaactgaataatgatgttgcaaagtcttcatcaactaaggctgttgatggagaatctgggaagaagcaacataaaaccagtatgaaatttcagaaagaagatgccgcctctgataaagacaccgatgatgatattagtttgaaggaaatggtgtccccaacaaggattgataaatcaaaaggccaacaagaagatagagggacgtcatcaaaaaggaaacgtctgctggaagctcaagatacccctgtatcgaagaaaaacaaaatgcttgacaaaaaccttattggctcaagaattaaagtttggtggccagatgacaaaatgttttatgcgggtgttgttgaatcattcgatgcctcgtcaaagaagcacaaggtttcgtatgatgatggtgatgttgaggtactagctcttaagaaggaaagatgggagttcattgctgaggaacaaggcgctgatcctgatgtggcatctaatatgccacgtggcaggaaagctaaagggagctcggttcaacaaatggagggaaaaacaggaacacctcaaagtgatgttaagaattctcccaagaagagagggcgcccaaaaggtgtgcgctccagcaataatatgccaaatgctgatagctctgtgactccagccagactgaagggaaaaagtgtcgagaaggatactgaagagacacctaagactggcagtaactctaagaaggaaggtgcaaaaccctctcgatctactggaaaggctaaggattctgttgtcaaggcaagcagcaaggatgaggctgatagcaccgacaactcaaaggatgctgctgccagtgaagacaaggattcaaaagatgaagtgaaatccagtgaagctatcgatggatccaagacaaatggcctttcaaccaaaaggaagccagatgagaatgaaggtgagtcatcagaggaggagaaggcgtctactaaaactactaccagaaagaagcgcagaagaaagagccgcaactagttgcccagaagctatgcagctcatcatctaagtggcgttccgcccttgcagtctcaagtctcaaagatgttggcatgaggcatgccatgtactgtacgctttatattcactggaccggttaccagcttagcgctttggtagttggccattatgagtcagctcgtagttatagcagtcttaaactctcaataggagctgtaatgtttggtcttactttttttttgtttctccttgccaacggctgtgcctctggcaaaaatggatttgattcttgcttgggttcaagcttttgtgttaaaacgtgatgcagtttgagttatctgctggcaaacagaaatacgttcctcttatgaagcgaatcttgca

SEQ ID NO: 102560 - DNA, 841 bp, Zea Mays
cctcgcaagcctagctagctagctgcctgcctccagcctcctcatattcctccactcaccgttgccatgccaaagctcccacacctctcatgcatgggcagagggttcatggccacggcagcagccgcccacgttcgccgccgcatccaccactcaccacccgatcgatggggagcaccggagcagagcagagagcagcgcgcgcgcgaaccctaaaagccttcggtcgacctgtatggatcggatcagccggagcgcgagcgtccagcctgccacgcctgggctggtgcgcgcgcgggcccacctccccgctataaagcgggaccgccgcgcgcggcatcgtcaggagcaggaatctaccggacggaggatccgtagttccctccaaggtgtttctgaccagatctatttattactagtaccactactcagttcttcccctaccgtactctgtctcttctttcctttccaggcttactgttaggctcgagagccgatccacaaacggcgccgcgtgtgtcagggataagatgagctcagcaagaggcagagtggaggaggaggtgaggaaagagcaaggaaaggcacaatacggtggcacggtcggcagatctatcccggcctgccgccgtttccgcactaccatgcatgtcatcaggattgtgtctccatcggtcagttttatcttctactgtagtcctttctgttcttgaatagtcatgtcgctggggtggtattcaaagtaggagtaatggtgtatatggctccggatatatatatatatatatatatatatatatatatatatatatatatatatatatgtgcaggagatactgtt

SEQ ID NO: 102561 - DNA, 933 bp, Zea Mays
cctcgcaagcctagctagctagctgcctgcctccagcctcctcatattcctccactcaccgttgccatgccaaagctcccacacctctcatgcatgggcagagggttcatggccacggcagcagccgcccacgttcgccgccgcatccaccactcaccacccgatcgatggggagcaccggagcagagcagagagcagcgcgcgcgcgaaccctaaaagccttcggtcgacctgtatggatcggatcagccggagcgcgagcgtccagcctgccacgcctgggctggtgcgcgcgcgggcccacctccccgctataaagcgggaccgccggtggtggtctggtggacatcgatccctggagaatggcttgaacctttcatttgcgtgattctagcatagacatctgaatatctgatggttagtgaaaggctggataccatcatatatacgtgtcatatgccatttgaagtgtgccatactaaaattgtagtcccaggagtattatgctttggctgtaattaaactttaaatagtgttctgtacatatgtattacagtgcctcattgtctcacacatgggctatcagggtagccccgaccatatatggatgaaggagaggaagaaaactatgtataaaagatatatagaggatcagagggagaagaaaaagagaggaagaaagagaaagaaaaggagaagaaaattgtgtatgatgttactattcagatttattcatggtcagctattcagagattgatgcatggtcatgtagccctttcatattctaccacataacaagagattcacaatcaaataaagcttaccaggactgctaggtatcgaatcttagggcatagctactcaagtttgatgtattaagaacaaggtcattccacattagctgataatcaaatgggggaaacttccagtgtc

SEQ ID NO: 102562 - DNA, 4218 bp, Zea Mays
cctcgcaagcctagctagctagctgcctgcctccagcctcctcatattcctccactcaccgttgccatgccaaagctcccacacctctcatgcatgggcagagggttcatggccacggcagcagccgcccacgttcgccgccgcatccaccactcaccacccgatcgatggggagcaccggagcagagcagagagcagcgcgcgcgcgaaccctaaaagccttcggtcgacctgtatggatcggatcagccggagcgcgagcgtccagcctgccacgcctgggctggtgcgcgcgcgggcccacctccccgctataaagcgggaccgccgcgcgcggcatcgtcaggagcaggaatctaccggacggaggatccgtagttccctccaaggtgtttctgaccagatctatttattactagtaccactactcagttcttcccctaccgtactctgtctcttctttcctttccaggcttactgttaggctcgagagccgatccacaaacggcgccgcgtgtgtcagggataagatgagctcagcaagaggcagagtggaggaggaggtgaggaaagagcaaggaaaggcacaatacggtggcacggtcggcagatctatcccggcctgccgccgtttccgcactaccatgcatgtcatcaggattgtgtctccatcggtcagttttatcttctactgtagtcctttctgttcttgaatagtcatgtcgctggggtggtattcaaagtaggagtaatggtgtatatggctccggatatatatatatatatatatatatatatatatatatatatatatatatatatatgtgcaggagatactgttgagatacagcttgctagcggctgttccattcatggtgcttgtgcttgcattgtactcgtcagaatccctggccgcacacgccattcgtttgactttctgctgtcggactagtaaattcacggaccgacgaccggcgatataataatacattcatggattacattaagtttatatatatatgctgcccttcgatgttcacaaaaaagagattgttttgaataatgaaaacaaatactcctagttccgcgcgaataataattggaggatttactttctactatgattaattatttggggtttataacttaacagtatatcctagcctcaccgttcctagcaatggaagtttcgttttttcttttgctgtttttatatatgggcaagcaatgaacttcgtccagctggataatgatgtgcacaacaacaaagcagggacgacacgtactagtctggtcatatattcgttaggaaataaacatttctggtacaatatagggcaaccatcgcgttgctaaatctgagcctgccagctcctcacgagcaggagaatgttgattttccacacacaaaatgacaattttgctgacctcaaaatttgtaagtttgcatatgttcttggctgaaaaggcatgggatcggtgcaagtgagtgcacatatgtttttctatatcaacaaaagaagggcgccaagctagttactgctattctttttgctggacaaccgttggactttcaactactacctaggttgcaatatcacatgcttccttcaatagtataataaagtcagattgttaccttaaaattgctagcctactagcaaaacaccaatatatatttttgttagtttttcccaagttccaacatgcctggcaccggctaatggcaattctattatacataaagtttcaagtatataaaggcctgggaccgatcatggtgatatatacttttttcataagcatgtaacaacctgtatcatctcactcccacttttattgttccataatgtttgtttgctcaaacttatctcaaatctactatgtgtggctatatgcacctgcacatcaaagcttccttttgctatggcaaggtggtcatgtagaggtatgtaatgtccaaccaaggcattgttgcactattagcatgtctgtcatgtgataaaagatggaaactaaaccagggcctacacaactagtgtggtatattaatccacacttagccaatctataaccatgcaagcatacgtcaaatgatcaagaaattaaaaaagagacagttttatttcaagtttgtgtaacaatattactcgttagattactcttatctcatctactgataaatatggcttgttaatgctttgttcaattgcatatacgattaggattcttgtgttcaagccttgtcaactttgacgatcaatatttatggacttagacaattgttgatgtaagactaatcttggtgagggtgaatttgtcgtgaaaaatacttccgtataatttttttgtttggttttttttaccgaaatttgctgtaaaattattatcttgttgtacttgtggatttagtaaacaacttacagatagagtacatagacgacataataatacactgcaacaattaatagaattagaatgtaacaacctatatgcatgcatggcaggactcgtgaatatagtggagttattagttcagcatgcatgttctatctgcttacctccttagagcagcatatgtatatgtttgggatgctacatgccatttaaattggataggtatgatatacaaacatacaattaatttattttggtcctatcatcttgtggcccacatgaatttatgcatcttaaattgttctagttgtccttggacaaactataaaaaaagctagtgaccaagtttatagaagaatagtattaatatttatgacacaaaatagattatatacatatattccatatgatgactctagcgacacctttttttatatactctttgtataaatttggtcaaactcaacatagtttaactcgatggctactttgatatatagaattacataggttatatatattcttagacagtgcgattatgaaaacatatatgttatctttagtgttccgatggtatcctatgtatgcataaatcgtgtcctgaagctgcagattagattgctgagtagtttattgaacagagaaatgaatatataatcacggttgttgttagttaataaaagggactgatgagtttacacaaaatgcggcactacttcattttattatttattatgaaaagttctaatcgtaccctctctattctcaaatatttgtcggttgctagttcattttttgaactaaaacacgataaataggaaaacgggccgggggggggggggagtacaatttttaggactaaattccatgaaaattccaaatgatgaaagctataattaaattttttggatatgtgtatgttggctgttcacatcctcgattgaaatgataagtagtgagtcgtagtgataatgatgttttaagttcattaaataaatcaatatatatgtcgctgttgttggaatatatagtacctgaaaggtactcgatgagtggaatttgagcccttcacatggactgaaattgcatatttaatcatgctatgggaaataaaatgattgtcctatctatatataggtggtggtctggtggacatcgatccctggagaatggcttgaacctttcatttgcgtgattctagcatagacatctgaatatctgatggttagtgaaaggctggataccatcatatatacgtgtcatatgccatttgaagtgtgccatactaaaattgtagtcccaggagtattatgctttggctgtaattaaactttaaatagtgttctgtacatatgtattacagtgcctcattgtctcacacatgggctatcagggtagccccgaccatatatggatgaaggagaggaagaaaactatgtataaaagatatatagaggatcagagggagaagaaaaagagaggaagaaagagaaagaaaaggagaagaaaattgtgtatgatgttactattcagatttattcatggtcagctattcagagattgatgcatggtcatgtagccctttcatattctaccacataacaagagattcacaatcaaataaagcttaccaggactgctaggtatcgaatcttagggcatagctactcaagtttgatgtattaagaacaaggtcattccacattagctgataatcaaatgggggaaacttccagtgtcaaagcatctttgaaaaatacctgtggcgtgttcaatatctggttcaactcaaattgaatgctactctaccacccttttata

SEQ ID NO: 102563 - DNA, 542 bp, Zea Mays
tttcgcagggtacaaacatagctttgcgtcaatcggtgctaggcgaatgcagaacgcttggtagccggtcagcgctatgtgtagaacacatactccagagatgaaattggatcacgagcactggaataattgttgtcagccatggacccatggcagcggcggtttcgcgcacctcaaagacatgggtggggaggcatcgcggctgctgcacgccctctggagaatgcttatcgatcatcaggtgcattcgattacgctttcggttgctgcattaagaaatgaatcaatcgaactgtgaaccaactacttgaaatttcatgtgatgtggggtatagtggcaatgcataagcccacatggagcactgggtcttcgaggtgacacactgatattgcaaatgaacacatctgtctatgtggctatggctacggtatacatagagtcgtacattaggtagcttattcaatcaaataatgtctggttttttcatgaaaatgataataatcttctatgtaaacttggtcaaacataagacatttcactt

SEQ ID NO: 102564 - DNA, 705 bp, Zea Mays
atgccccagtcagcccaacgtgagcccgcccttgcttctctgctcagacatgcacataaaccgaattcgtctcatttatttatgtttaaggttcatgggtcttatgtccagaaacttagctggtctccaaaactcccatctaaccgaccatttgcagggttctgtagggaccgagattctggatacctcactcccttgattcagaatgactccactgagtcattgctccgttggcaatgtcagcctgtttcacatcggaactacaggaccacccgagaaatccagataagaaggttccagggctcggcgaggaagtatgccgattacattccagtggaaacagctccatctgtcaatggggaaaacgaatctccaaggagcttgggcgatgctacagagcgagatgaagatggaggtagtgtggcagctgatgctttgctaactttagtgaactcagagggccaggcggctgggagccagaataatgttgagcaggccagttccaaaataaccgatgatcgccgtgttcttagtgccatgattgggattgttgatcctaaattcaggaagcaaatgtccaggagcggagctggaaacgaggagtcgatgtctgacgctgagacggatgaaggcgtcgaggaaggtgattcagattcaggttcagatggcagcgacagcgaggaggcccgtgcgttgtgtacctga

SEQ ID NO: 102565 - DNA, 363 bp, Zea Mays
cacaaaatcatattcagcaaagaggttcggatcatgctcgttaatcaatatgtatgtacatgacagtaaccttgttggcgtcccctgcaaacacataccatcttgtttcagttaaccaccttgtatctaggcatcaggatttgaacatggtaaaatatctagtttcagttaaccatctctcgtatctaggcacaaggagttgaacaagataaattaatgcaaaattttagcgacgccgccgcctccttatctgatcttagcactggacttatcttgcaaaaattaaacacaaaaatttagagtatgcagcacatataataattcatattggaccaaatttgagctccatgacaagaccaatag

SEQ ID NO: 102566 - DNA, 3109 bp, Zea Mays
acagccctagctccaccgataaaaccccacctcctcccgtaacccgcgcctcccttcccttctcctctcttccccgaaagagaggtcgcggacggaacccttccaccctcacctcatcccacaaccttcgattccttcacgatcttacctcgcgcgctcgccgattcctcgatcgagtcccgcgcgattcgctttctggtcggattctctcccccgaagcatgcagccggaccagcctgtgatcagcttgcgccccggcggcggcggcggcccgcgcgccggccgcctcttctcccccgccttcgccacctccgtctctggagacttcctccgcccgcacggcgggggcgcctccggcatctccaagatcggagattcacattttgagccacgtgagcgtgttcgatacacaagagatcaacttctcgagctgcgtgagattgttgatgtgtctgaggaaattttaagaatcaagcaagagattgatgtagagcttcatggtgaagaccagagctgggttcgcaatgattcaactgttcaaggacaagcacaagctcaaacacaagcacagaatcgctatgctgagactgatagccgtgattggcgtgcacggtctgcacagctgactccgactaatgaagaaaaatcttgggacaacataagggaggctaaagaagcctatgcctctagcggtaggcagcaagagcaagctaacaggcaagatcagttaagctcccagtttgcttcgaaagctcaggttggccctacccctgctcttattaaggctgaagtgccctggtcagcccgaagaggcaatctctcggagaaagaaagagtcttgaaaacggtgaaaggtatactgaacaaacttacaccagagaaattcgatcttttaaagggtcaactaatggaagctggaattactactgctgatatattgaaggatgttatatctctcatatttgagaaggcagtttttgagcccactttctgtccaatgtatgctcaactttgttctgatctcaatgaaaagcttccgacattcccttctgaagagccaggtggcaaagagatcacattcaagcgcgtgatattgaacaattgtcaggaagcctttgaaggtgctagcaacttaagagctgagatttctaaattaactggccctgaccaagggatggaaagaagagacaaagaacggttggtcaaacttagaacacttggaaatattcggctaattggtgagctactcaagcaaaaaatggttcctgagaagatagttcatcacattgttatggagctattggggtctgggactgataaaaaaccatgccctgaagaggaagatgttgaggctatctgtcatttcttcaatacgattggtaaacagcttgacgagaacacaaagtctcggcggatcaatgacacatacttcatccagatgaaggagctaacaatgaatccccagcttgcaccacgtttgaggtttatggttcgtgatgtgattgatctccggtcaaataactgggtgcctcgacgtgaggagattaaggccaagacaatcagtgaaattcactctgaggcagaaaagaatcttggattacgtcctggagcagcatctgtcattaggaatggccgtagctcaccaggagggccactttcacctggagggggatttccaatgaatcggccaggaactggaggcatgatgcctgggatgcctggttcaagaaagatgcctggaatgcctggtttggacaatgataactgggaagttccccgttctaaatcaatgccaagaggtgactcgattcgcaaccagggattgttgcttaataaaccatcaacagttcacaagacatcatctattaacacgaggcttcttcctcaaggcagtggtgcggcactaataggcaagagtgcacttttgggaaccggtgtctcagcatctcgtcctctcagctttacgcctgggcccacaccagctcaaactacaccaaaaccaatacgtgcagcaccagctgttgtccctgctcctgataaacaggccagtgctcccaaggggaacactgctgagcttcagaagaaaacaatagctcttcttgaggagtattttggcatacgtattttagatgaagcccatcaatgtatcgtggagctgcagagtcctgattactacccagaaattgttaaagaagctgtcaatcttgccctagataaaggcaccaattttgttgatcctcttgttaggctactggagcatttgtacacaaagaaaattttcaagactcaagacctggaatccggttgcttgttatatggtactctgctggatgacattggcattgaccttcctaaagctccagcacaatttggtgagatcattgctcgcctgactttgttgggtgccttgagatttgaagctctggaggttattttaaagaaaatggaggatacctacaaccgcaaagcagtttctaatgctttcatgaaaaccttggaagcaaacccatcaggtcaggctatcttaggctcacctgctgctgctgcagtaatagacgcttgcaacagccttttggaataatcttcctagcagctttggcctatcaaccttttcagattctgtatcttgcgaaagacggtctcgtgtactctctatagtttaggtgtcaaggaattgaggaacagacaattttgagctgtataattttgcgagatcagatgagtgttgattgttattgtttcggccaagaaggaaagaaagaagccatgaattttggtcttgggcgaccaacttaatttgcaggagtcctagatgaacaaggctaaatatgttgttactatgtccacctaaaatgttgttagttattttcctgtgactacacatttttgtaacgttgtactatgattttggaatgttttattgggtacaatatattgtgttatttaggagtcaaaactatctctaggtcctggtttaccctgttgctgccgtgatgttggctccctaattcctttgggcgacttagcgtatgttggctccaattcgtttgggctttgtatttccatgctgtttgactggatatttgatgggtctctttgtttgggtttg

SEQ ID NO: 102567 - DNA, 1092 bp, Zea Mays
ctctcggattgctctgttctcaccaaactttctaaagctcaccatttgccctgcctacttgggtcgtacgcaaccctcgccgagagcagcccccgtaaaatcttcctctgcatcctattcgctattgccggggggggggggcatcgccggtggcgttcgtgtgcttctcgctacggtgaaacctttattgccgttcctgccgcactttcctcattccttgagactttggccgttggacggtgtactctgcgggatccccaacctcctgctgagctcccgcacagagggcgggcatggctggaaggcataccatcattctcatgcaaccatcacagaacagatcgacgaggacatttatggactacgattcagttaaccacgcgctggatggaatatgtggtctttacgaaaggaaaatcagaaacatcaacccgatggtcaggaacttgacttatgatatcggtgacctgtacaacttcatcgatggcctgaccgacataagtgcactggtgtacgacgattcacttcacgctttcctgccgtatgaccgccagtggataaaacagaagctgtttcagcacctgaagcggctggcgcagcagtagggtatcatcaccgctggcttttgacgtgcatgcgtcgtggggagaaccccctcacctaagccttaaggctttgtttgggtgctctagtattaacctcaattcatatgtattgaggtgaattaaggtgtacattagtttaatttacaactcagggcttgttcggttagctctcaatccatgtggattgagtggaattggataggttttaatcccaaacaagtcaaacttattctcaattttttctaatctcatccaatccatatgtattgggaataaccgaacaagccctcaatccatctcaacacatgtggattatggtcaatactagagcatccaaactagcctatggttcgggcttggatccaaatgcccaggatgtgtgtatagaaataagacctgtatcccgtgtttgatgtagaacatgtggtcatgctgcggcttgcttctgaagatgattggttgaacaatgcagatttcatgtttgtca

SEQ ID NO: 102568 - DNA, 1208 bp, Zea Mays
tatggctaggctcgcgagcccggagcgagccgagccgctttttcgagctcgccagatgagcgagccaaaccgagctcggctcgttgcgtgaacgagccgcagcgagccgagctcggctcgtttccacccctacggtcaggcaacttttcggttcactaagcaaacagctccagtatcctacatctaatggttactgctgttaccataatgctaattcttgggttgaagagttttattgaattatttgaagaatacgcaagtcaccgcaatttcaatggaagacatgtggattcatagattcaactggccatatgacacgggaaacgtaagaattgagtccttggtttgtaaaatgcatgcactagtcaactataccatatttcaaatggcatgaaagttcgccatattgttcatatgaccatatcactcagcagttacgtggctggttattatttgatactggcacatgctattttttcttacgatattgttatctggaatggaaggaatatgtggtctttacgaaaggaaaatcagaaacatcaacccgatggtcaggaacttgacttatgatatcggtgacctgtacaacttcatcgatggcctgaccgacataagtgcactggtgtacgacgattcacttcacgctttcctgccgtatgaccgccagtggataaaacagaagctgtttcagcacctgaagcggctggcgcagcagtagggtatcatcaccgctggcttttgacgtgcatgcgtcgtggggagaaccccctcacctaagccttaaggctttgtttgggtgctctagtattaacctcaattcatatgtattgaggtgaattaaggtgtacattagtttaatttacaactcagggcttgttcggttagctctcaatccatgtggattgagtggaattggataggttttaatcccaaacaagtcaaacttattctcaattttttctaatctcatccaatccatatgtattgggaataaccgaacaagccctcaatccatctcaacacatgtggattatggtcaatactagagcatccaaactagcctatggttcgggcttggatccaaatgcccaggatgtgtgtatagaaataagacctgtatcccgtgtttgatgtagaacatgtggtcatgctgcggcttgcttctgaagatgattggttgaacaatgcagatttcatgtttgtca

SEQ ID NO: 102569 - DNA, 347 bp, Zea Mays
ctggtgaataataggacagccagcgccagtgaaatagttgcttcatcacttcatgacaattgcaaagctgttcttgttggcgaaaggacttttggcaagggcttaatccaatctgtatttgaacttcatgatggttctggtattgtcgtcacagttggcaaatacgtgacaccaaaccacaaggatatcaatgggaatggaatagagccggattacaatcgtcttcctgatttcaatgaagccagagattacctttcatgttgcggaattaaagaattaagctgacagacgtttgtggcaaatttcaatgaagcattatattctaaaggttctctcacggtaagaag

SEQ ID NO: 102570 - DNA, 1665 bp, Zea Mays
cgcacacagaccgaccagccgcagcccgtagcgcacctgcctgcgcccgccgcctccgtcaccgtcatccactcaacctcgcccctcggccactgccgcccggcgcccgcccgcctgccgcaccggccgaatcatccgacggcccttaagctgaggcggtgtggcctaagttgcagcgcggcggtcgccccgagtcgtccacttcggccccgacaggctgtccacggtggcgcgaactgcccctcgccggttcggccccgcccgcccgtagcagctcaccagagaactagcctctcgtcggccttccccaggtctgcgcgtggcgcggcgccgcagcaaagctccacgcgtgcgtgtccgccacccgccgtcccgcccgggccgccgtcgttgctcgtcggtgaacgacgtctcgctgggtatcagcgcgttcttcgagcggcaggaacgacaaacgggagaaggaagagaactcgtggggaaggcgaagcgggacgatgcagcccaagatcagcgcgttcttcgagcggcaggagacggacccagatccgattagtggcgacggtgaggggaacgggcagggaaacgtcggcgcggcgacggaggcgaagcggaaggccaatggctgcaggctcgatgggctcgtcagcaagaagaggaactacgcgcagctccatctggagctagggcagcctgatttcgtcctccacacgtgctccgtgtgcggcatgatgtacgcccgagggaacgacgaagacgaaaaggttcacagggcgtaccacaagagctactccgagggagtccctttcaagggttggaaaaaagagacagtgatagcgaggtccgagggcggtgatcgggttgttcttgcaactgacgagaactcttgtatgtcgaaaagtaaggtcagagaggtgatcacagtggtggagaaggagctgggatttggtgaagggaaactcctgcataagctttgcaaggtgtatctatacatatctgcacaaaggatcgtggggtgccttgtcactgaaccgataaaaacaggacatagagttatcccaagctccacggaaggaagccctaatgatttgccagttagtagtactgagcgaggaaaaaatggtcatacattagagttcggcagtattagtttcaagagggaaatcataaggcggcacagtcgttcggtcaagaacaaagaagagtgccaggaccctggtgccatactttgcgaaacggaagctgttcctgcgctttgtggatttcgagccatctgggtggcaccatcgtgcagaagaaaacgaattgcctcaaaactaatggacgttgcaaggaaaaccttctgcgaaggcaggactttggggatttcacagtttgctttctctcccccgacctcctctggcaaggggctagcatgccgttactgcaagaccagtgcattcttagtctacaaagacggaccggtgtaacacttgtactctaagaaagccctctctgaaacttttcttcctcttgtaaaatacgcttatcttgttggagcatttgacaaaaaaaatgtaaacaattagatcaatatgtattcaggtagaccagaaattagcgatgctttgtaacaatgtagctttctcttttgagtggtgacaatagctttcttgtgatcttcat

SEQ ID NO: 102571 - DNA, 1666 bp, Zea Mays
cagaccgaccagccgcagcccgtagcgcacctgcctgcgcccgccgcctccgtcaccgtcatccactcaacctcgcccctcggccactgccgcccggcgcccgcccgcctgccgcaccggccgaatcatccgacggcccttaagctgaggcggtgtggcctaagttgcagcgcggcggtcgccccgagtcgtccacttcggccccgacaggctgtccacggtggcgcgaactgcccctcgccggttcggccccgcccgcccgtagcagctcaccagagaactagcctctcgtcggccttccccaggtctgcgcgtggcgcggcgccgcagcaaagctccacgcgtgcgtgtccgccacccgccgtcccgcccgggccgccgtcgttgctcgtcggtgaacgacgtctcgctggcttcagggtatcagcgcgttcttcgagcggcaggaacgacaaacgggagaaggaagagaactcgtggggaaggcgaagcgggacgatgcagcccaagatcagcgcgttcttcgagcggcaggagacggacccagatccgattagtggcgacggtgaggggaacgggcagggaaacgtcggcgcggcgacggaggcgaagcggaaggccaatggctgcaggctcgatgggctcgtcagcaagaagaggaactacgcgcagctccatctggagctagggcagcctgatttcgtcctccacacgtgctccgtgtgcggcatgatgtacgcccgagggaacgacgaagacgaaaaggttcacagggcgtaccacaagagctactccgagggagtccctttcaagggttggaaaaaagagacagtgatagcgaggtccgagggcggtgatcgggttgttcttgcaactgacgagaactcttgtatgtcgaaaagtaaggtcagagaggtgatcacagtggtggagaaggagctgggatttggtgaagggaaactcctgcataagctttgcaaggtgtatctatacatatctgcacaaaggatcgtggggtgccttgtcactgaaccgataaaaacaggacatagagttatcccaagctccacggaaggaagccctaatgatttgccagttagtagtactgagcgaggaaaaaatggtcatacattagagttcggcagtattagtttcaagagggaaatcataaggcggcacagtcgttcggtcaagaacaaagaagagtgccaggaccctggtgccatactttgcgaaacggaagctgttcctgcgctttgtggatttcgagccatctgggtggcaccatcgtgcagaagaaaacgaattgcctcaaaactaatggacgttgcaaggaaaaccttctgcgaaggcaggactttggggatttcacagtttgctttctctcccccgacctcctctggcaaggggctagcatgccgttactgcaagaccagtgcattcttagtctacaaagacggaccggtgtaacacttgtactctaagaaagccctctctgaaacttttcttcctcttgtaaaatacgcttatcttgttggagcatttgacaaaaaaaatgtaaacaattagatcaatatgtattcaggtagaccagaaattagcgatgctttgtaacaatgtagctttctcttttgagtggtgacaatagctttcttgtgatcttcat

SEQ ID NO: 102572 - DNA, 427 bp, Zea Mays
atgacctcgcatggcgatccgttgctggtgaataataggacagcaagcgccagtgaaatagtaagtacacattttcgtccaccgacagtaatgaaatggcatgtagtcaaagctcacgcaccaataattttttaggttgcttcagcacttcatgacaattgcaaagctgttcttgttggcgaaaggacttttggcaagggtgatgcagggcttaatccaatctgtatttgaacttcatgatggttctggtattgtcgtcacagttggcaaatacgtgacaccaaaccacaaggatatcaatgggaatggaatagagccagattacaatcgtcttcctgatttcaatgaagccagagattacctttcatgatgcggaattaaagaattaagctgacagacgtttgtggcaaatttcaatgaagcatta

SEQ ID NO: 102573 - DNA, 2030 bp, Zea Mays
cgcacacagaccgaccagccgcagcccgtagcgcacctgcctgcgcccgccgcctccgtcatccactcaacctcgcccctcggccactgccgcccggcgcccgcccgcctgccgcaccggccgaatcatccgacggcccttaagctgaggcggtgtggcctaagttgcagcgcggcggtcgccccgagtcgtccacttcggccccgacaggctgtccacggtggcgcgaactgcccctcgccggttcggccccgcccgcccgtagcagctcaccagagaactagcctctcgtcggccttccccaggtctgcgcgtggcgcggcgccgcagcaaagctccacgcgtgcgtgtccgccacccgccgtcccgcccgggccgccgtcgttgctcgtcggtgaacgacgtctcgctggcttcagggtatcagcgcgttcttcgagcggcagcaacgacaaacgggagaaggaagagaactcgtggagaaggcgaagcgggacgatgcagcccaagatcagcgcgttcttcgagcggcaggagacggacccagatccgattagtggcgacggtgaggggaacgggcagggaaacgtcggcgcggcgacggaggcgaagcggaaggccaatggctgcaggctcgatgggctcgtcagcaagaagaggaactacgcgcagctccatctggaactagggcagcctgatttcgtcctccacacgtgctccgtgtgcggcatgatgtacgcccgagggaacgacgaagacgagaaggttcacagggcgtaccacaagagctactccgagggagtccctttcaagggttggaaaaaagagacagtgatagcgaggtccgagggcggtgatcgggttgttcttgcaactgacgagaactcttgtatgtcgaaaagtaaggtcagagaggtgatcacagtggtggagaaggagctgggatttggtgaagggaaactcctgcataagctttgcaaggtgtatctatacatatctgcacaaaggatcgtggggtgccttgtcactgaaccgataaaaacaggacatagagttatcccaagctccacggaaggaagccctaatgatttgccagttagtagtactgagcgaggaaaaaatggtcatacattagagttcggcagtattagtttcaagagggaaatcataaggcggcacagtcgttcggtcaagaacaaagaagagtgccaggaccctggtgccatactttgcgaaacggaagctgttcctgcgctttgtggattcgagccatctgggtggcaccatcgtgcagaagaaaacgaattgcctcaaaactaatggacgttgcaaggaaaaccttctgcgaaggcaggactttggggatttcacagtttgctttctctcccccgacctcctctggcaaggggctagcatgccgttactgcaagaccagtgcattcttagtctacaaagacggaccggtgtaacacttgtactctaagaaagccctctctgaaacttttcttcctcttgtaaaatacgcttatcttgttggagcatttgacaaaaaaatgtaaacaattagatcaatatgtattcaggtagaccagaaattagcgatgctttgtaacaatgtagctttttcttttgagtggtgacaatagctttcttgtgatcttcataaataacttttcatggtctcacatgctccgttgcagcaatgctgctgcagctgcaccaagcatggaactaggagagtgcatctacaagatggatgttttgagcaagaaaatgacagactgtagcagcagagtgacaatacatcaatgaatgaatcatgtatcactgatggctgatacgtgctgtttctgaggataagaaaaggaattcttagaatttttattacaaggacctagcagtcttgtagaatacaggaatacactcaggaatcattctagctcaggaattgttctagctgattaaaacttgtataaatcagataagcaattcggccaggaattgtttcggtcgatggccccttaatgtct

SEQ ID NO: 102574 - DNA, 2023 bp, Zea Mays
cgcacacagaccgaccagccgcagcccgtagcgcacctgcctgcgcccgccgcctccgtcatccactcaacctcgcccctcggccactgccgcccggcgcccgcccgcctgccgcaccggccgaatcatccgacggcccttaagctgaggcggtgtggcctaagttgcagcgcggcggtcgccccgagtcgtccacttcggccccgacaggctgtccacggtggcgcgaactgcccctcgccggttcggccccgcccgcccgtagcagctcaccagagaactagcctctcgtcggccttccccaggtctgcgcgtggcgcggcgccgcagcaaagctccacgcgtgcgtgtccgccacccgccgtcccgcccgggccgccgtcgttgctcgtcggtgaacgacgtctcgctgggtatcagcgcgttcttcgagcggcagcaacgacaaacgggagaaggaagagaactcgtggagaaggcgaagcgggacgatgcagcccaagatcagcgcgttcttcgagcggcaggagacggacccagatccgattagtggcgacggtgaggggaacgggcagggaaacgtcggcgcggcgacggaggcgaagcggaaggccaatggctgcaggctcgatgggctcgtcagcaagaagaggaactacgcgcagctccatctggaactagggcagcctgatttcgtcctccacacgtgctccgtgtgcggcatgatgtacgcccgagggaacgacgaagacgagaaggttcacagggcgtaccacaagagctactccgagggagtccctttcaagggttggaaaaaagagacagtgatagcgaggtccgagggcggtgatcgggttgttcttgcaactgacgagaactcttgtatgtcgaaaagtaaggtcagagaggtgatcacagtggtggagaaggagctgggatttggtgaagggaaactcctgcataagctttgcaaggtgtatctatacatatctgcacaaaggatcgtggggtgccttgtcactgaaccgataaaaacaggacatagagttatcccaagctccacggaaggaagccctaatgatttgccagttagtagtactgagcgaggaaaaaatggtcatacattagagttcggcagtattagtttcaagagggaaatcataaggcggcacagtcgttcggtcaagaacaaagaagagtgccaggaccctggtgccatactttgcgaaacggaagctgttcctgcgctttgtggattcgagccatctgggtggcaccatcgtgcagaagaaaacgaattgcctcaaaactaatggacgttgcaaggaaaaccttctgcgaaggcaggactttggggatttcacagtttgctttctctcccccgacctcctctggcaaggggctagcatgccgttactgcaagaccagtgcattcttagtctacaaagacggaccggtgtaacacttgtactctaagaaagccctctctgaaacttttcttcctcttgtaaaatacgcttatcttgttggagcatttgacaaaaaaatgtaaacaattagatcaatatgtattcaggtagaccagaaattagcgatgctttgtaacaatgtagctttttcttttgagtggtgacaatagctttcttgtgatcttcataaataacttttcatggtctcacatgctccgttgcagcaatgctgctgcagctgcaccaagcatggaactaggagagtgcatctacaagatggatgttttgagcaagaaaatgacagactgtagcagcagagtgacaatacatcaatgaatgaatcatgtatcactgatggctgatacgtgctgtttctgaggataagaaaaggaattcttagaatttttattacaaggacctagcagtcttgtagaatacaggaatacactcaggaatcattctagctcaggaattgttctagctgattaaaacttgtataaatcagataagcaattcggccaggaattgtttcggtcgatggccccttaatgtct

SEQ ID NO: 102575 - DNA, 446 bp, Zea Mays
gtatcactgatggctgatacgtgctgtttctgaggataagaaaaggaattcttagaatttttattacaaggacctagcagtcttgtagaatacaggaatacactcaggaatcattctagctcaggaattgttctagctgattaaaacttgtataaatcagataagcaattcgggatcccctctaaattcatggtcgtcaccaaaccagcccttaatgtttcctacttgatgggtcatttacatctgcctttgagtactcatcaactactgctttgtgtgcatcttgaagtgggtattatgtaacgaacttgccgagatatcttacctcattgctgccatttcagcttcctggcaaaggccttcgagaccaacacaagtgaacaactcggaatactccacaatcttccaaagatatacatcctctccaatttcattctgtgtatggt

SEQ ID NO: 102576 - DNA, 131 bp, Zea Mays
gcaagcatgcatgctttttctccctttttctaaaatattgcaaatcctatgtgtttttttttctaaaatattgcaaaatctaagagagtttactatccacataccttagccttttgctgccccaaccgaga

SEQ ID NO: 102577 - DNA, 121 bp, Zea Mays
ttcattttgctcaaccatatggactgggtggttttaaattccaagtaaatcaaaatctttcatttttttttcaattccatctaattcatatgagataggaataaacgaacaagcctttaaa

SEQ ID NO: 102578 - DNA, 1859 bp, Zea Mays
atataaggcccagcccaccgatcctcctcttctgtcttctcccctgcgtcaaagacgacgcaagcccttgcctctccctactccaaaccctcgccgactcagatccagcttcctcgcaccgccgtcgccatgccgttcactccaggcccctactctggcgtcagcaccctcgcccttgtggcgagggcgtcggcctttggcgtcggtgtcgtctacgggagcatcaagctctcaatcctaaaggtacgtcatcttgtgaattgactgactcaacctggtagcggaggttttttagatggttcgaattccgcaacgctttagcatggttcaggaatcggctaaggattttatgatgtgaggattcgacggaatgccgtgaaattaaccttttcctacgttgatgcccttactggaacagtttcgagcctcactcgtctggatagtcatagactgatgggtaatttatgtcggtatgagtagttgagtttaaattaacaacgagctgatgcttggcatcgcggaaataatttgtttagaatagttcatcaaccaattgaggctgttgtatagctgcttgttagtttatggctgcgacaaactgttttgccctgatttgtctcctctgcatgtttgtgggcactacacgtctacaatgacattcttcttacttgaagatgagtttatatatttgctcctgagttttcacatcctggaagttccccaaaaacatgttaggtataatactttttttgttggtattgtatgaaagccattcttttccgatgagtgcatatttcctgctagatatgatttcatattttgccagcccttgaaacagtaggcacactgaatgaatgggcttaaatttatgttataaattcttttgttgtgattggtgaaaactctggtaactgtaaaaagcaagtcatacttattctaaatgataaatgatgatggtcggttttgttttgttcgtaagtcttgatatatgaaactgtcagcgtcttttttccagattattcgtgcaaaagtagaaggagaattttggtgatgttaatggtcttctgataaaagcttactttgtttggtctatcactcttgcacccctcttctctaatagatggctgtgttggttcttcatagtttccagcatagtgtagatctttgtactggtccttttaaactggttgacatacacattcacaattcactaatttatttgtgctggttgctcctacctttaaatttagcactgtgatctatactagttactgattttgattgaatttgttatattcagactttagtagatgctgctaccattgactttttctatgcaagcttatggaaccagtatactgagcttgttctgctgttgtttcaactttgggcctggttacagtttaacttgcatgccgctttgtgtttgtgaaagatcatgtttgcctcattccctatttgaaccgtggtcgtttttagtaagaagcctagctgcactcttgtaacaagtgcatctcaagtttatttgttgcttcattccctatttgctgcactgaaccgtccaattcaattttcttacgttgcactttctctttcaggtaacaaaacctaaaaaggaggaagtgcatgatcatcactaaggatgacagggctgctacatgttataaaattggcagtgcaccccttctccatacgtgcaatttcgtttatgatttgtggacctgtctgtaacatacctgctgttttttttgtgttgtaataaattcttatacaatgacatgaaatcaggaagtggaaaaagcaatattaataattgcaagtcgttcgacaaatcttgattagttgggccggttgcctgt

SEQ ID NO: 102579 - DNA, 504 bp, Zea Mays
atataaggcccagcccaccgatcctcctcttctgtcttctcccctgcgtcaaagacgacgcaagcccttgcctctccctactccaaaccctcgccgactcagatccagcttcctcgcaccgccgtcgccatgccgttcactccaggcccctactctggcgtcagcaccctcgcccttgtggcgagggcgtcggcctttggcgtcggtgtcgtctacgggagcatcaagctctcaatcctaaaggtaacaaaacctaaaaaggaggaagtgcatgatcatcactaaggatgacagggctgctacatgttataaaattggcagtgcaccccttctccatacgtgcaatttcgtttatgatttgtggacctgtctgtaacatacctgctgttttttttgtgttgtaataaattcttatacaatgacatgaaatcaggaagtggaaaaagcaatattaataattgcaagtcgttcgacaaatcttgattagttgggccggttgcctgt

SEQ ID NO: 102580 - DNA, 1008 bp, Zea Mays
gacgccgtagtccgcatcggctccgccgggggccatgagcgcagccacggcggcagcggcggaggagtacatctcctcgtgctcctccagcgtgtcctccccagccccgggcgtgcgcttggcgaaccggcccttgatgcgcggccgcgtctccgcgtacgccttgcgggacgcgtaccggatcgtcttctcgaaccgcctgctcttgcgcttctcccggtaccgcatcagccgcgcctctcgctccaggcccctgctgaccactgccaccatgggcgccatgccagacgccgcgtcgggcacaaccgctgcctccgacgatgacacctgcaatcgtatccgtgtctttattttcagaacactgagataagtagtgctgggacgtgcgtagatagaatgatagataaatagatagtgcccagatcagagatgctagctcacactgtggttcacggagtgatcggagtagaagagcttggtgccggcgaggtcgagctctggtgacccgctctgctggacgccgatggtcttgatttcgtccatggaacgcgcgaagtcgaggtcgaggtacgggtcagagtccgcgaagaacacctccgtcgtggcgccttctttctgcccgtggtcgggctcggggaggagccacgacgccgcctcgtcctcgttgctcccgtcgtcgtcggttgctttgggcggcgccgccgaggcgaagggcttgggcgcgtcggccagcgcgccgaagaagggcgccacgtggaggcgctcgtggcggcgcgcgagcgggttcgccgagtggatgtcggcgtcgcaggaggcgcagagcgcggcagcgtccgcgcggcacgtgaccgccgccggcgcgtgctcgcagacctcgcagagccagacccgcgcgtggcgcgacccggcgccgtgcgcccgcgcgtcgcacccggcgcacaggaacgccgcgtccgcgcggcagtagaggcgcgccgcctcggcgccgcacgcgtcgcagggccgcgc

SEQ ID NO: 102581 - DNA, 1525 bp, Zea Mays
gcgcgcctccttccctcgcaagccaagccaaggcgggcgccaatcctgtcccgaatttggattcaaaatttccccaattccctcacaccccctataaatcaatcccgctgccgccgtttcccaactcacacaatttcaccgaaatcctccaataccccaccctacgaatcttccaacccctccgacgatgccttccgcgccggcgctcgtccccgcgtgcgacatgcaggagccgttgctggcggagtcgtccgaccgcttctccatgttcccgatccggtacccgcagatttgggagttctacaagaaggcggtggcgtccttctggactgccgaggaggtggacctctccgcggacgcgcgccactgggacgcggccctctcccccgacgagcgccacttcatctcccacgtgctcgccttcttcgccgcctccgacggcatcgtgctcgagaacctcgcctcccgcttcatgtccgatgtccaggtcgccgaggcgcgcgccttttacggcttccaaatcgccatcgagaacatccactcggagatgtactcgctgctgctcgagacctacatccgcgatggcaccgagaaggaccgcctcttccgcgccatcgaaaccgtccccgccgtacgccgcaaggccgactgggccatgcgctggatcgacggcggggagcgctttgccgagcgcctcgttgccttcgcctgcgtcgagggcatcttcttctcgggctccttctgcgccatcttctggctcaagaagcgcggcctcatgccgggcctcactttctctaatgagctcatctcccgggacgagggcctccactgcgacttcgcctgcctcctttatgacctccttcggggcaagctcgatgagtcccgcgtccgcgagatcgttgccgacgccgtcgacatcgagcgtgagttcgtttgcgacgcgctccccgtcgcgctggtcggaatgaacggcgggctcatgagccagtacatcgagttcgtcgccgaccgcctgctcatggcgctggggcacaggaagatgtacaacgtcgccaaccccttcgactggatggagctcatttccctgcagggcaagactaacttctttgagaagcgcgtcggggagtaccagaaggcgtccgtaatgtccagcctcaacggcggcgctgctgcaaaccataccttcagcatcgacgaggacttctgagttgacagttgtgatcgcgtgcttaatttattgctccgataatctcataagtcataactcataaccttattgtgctttttcttgcttgctagttgtagtagaggtaattactgatctggatggagcaaggcagtggtttggcagccaccatatgatatatatataggtggatggatggtcttccattcgctagaagtgagctgtattgtcctatctgaattacttgtcttcaatgtgaattttttattaaatcgctggaacgatactcacattcgatccttctcgtttgtcagccaaataaatctgaattcctacaaa

SEQ ID NO: 102582 - DNA, 2661 bp, Zea Mays
atggcctcaagggctatcatcaggaggaggaatgacattctacggcacactcatgtgcctattttgtccccttcattcactagcacaattgggcaaggacaatttgattgtgaggttgatcatcaaagatctgtatgttacttttcaaaggaaagtttagcagattctaatcatgctatggcacattgtactttaaataagcgaaagctttgtcatctcagtagcggtttcgcatggcatccagcttgtgaggtttctcttcctacttatggttctagagcacagaactttgtattcccattgggagtcaggtgtttcctgcagtcagtccgcaccacatcaaacacaactgcacagggtcaagttcatattatggacaagaagagtgaggatgagaagcagaagcaacaaaaaaaggaggcatcccctgaagaatgtgatcaggcagtggaaggattaagcactgcaaaagcgaaagcaaaagctaagctggaggaagtgcaaaagactgaccaatcagtggtacagaaattatgggcaaagcttcttggtattggccctgctttacgaattattgcttcaatgagcagagctgattgggctgcaaagttgaagcattggaaggatgaatttatttctacactgcagcattattggttgggcactaagctactctgggcagatgttagaatctcatcaaggctgttagttaaacttgctagtggaaagagcctcacaagacgagagaggcagcagctcacacgcacaacagcagatctattcaggctagtaccttttgcagtttttattatcgttccattcatggagctcttgctgccagtgttcctcaagttgttcccaaacatgttgccatccactttccaggacaaaatgaaagaagaggaggccctaaaaaggaaactgaaagcaaggatggaatatgcaaagtttttacaagacactgctaaagaaatggcgaaggaagttcaaacatcacgcagtggagaaatgaaacagactgctgaagatctggatgagttcttgaataaggttaggaaaggtgggcatgcctccaatgacgaaattttgagctttgcaaagctatttaatgacgagctgactttggataacatgagcagcattaagaatgatgataagatgattcaagctgagggtgtggagtctctttctgaatatgagcttcgacaagcatgtcgtgagcgtgggcaccttggtttgttgtcaacagaggagatgcgtcaacagctcagagactggctggatctatcactcaatcattctgtgccatcgtctcttctaatactctcaagagcttttactgtatctggtaaaatgaaacctgaggaggccgttgtagcaaccttatcttccctgccagatgaagttgtcgatacagttgggactgtactgccttctgaagattctgtttcagagaggaagagaaaattggaatttctggagatgcaggaagagcttatcaagttgcctagtctaatatgtacattgcctatcctttttatatattctttcgctgacgaatcagcggttatacaacttgtctgggaggaagaggagaaaaggcaagagaaagatgacaaggcaaaactggaggagccaaaggctactgaagaagatttggctttgaaggaaatgactgagcctactgttagggagaaagaggaactaaagaaagcaaaaacccacgataagaaagagcagctttgtaatatcagtcaagcattggctgtgcttgcatctgtttcttctgttaccaaggagcgacaagagtttttaagccttgtcaacaaggagatagaactatataataacatgctcgcaaaggagggtacagatggtgaagaagaagccaggagagcgtacaaggctgctagggaggaatcagaccatgctgcagaggcagctgtgggagaaaaggtctcttcagctttgattgatagggttgatgctatgcttcaaaagttagaaaaggagattgatgatgttgatgctcgaattggcaatcgctggcagctgctggatagggactgcgatggcaaggtgactcctgaagaggtagctgcagctgcaaattatctcaaagacaccataggagcagaaggcgtccaggagcttatcagcaatctttctaaagacaacgaagggaatatccttgtggaagacattgtgaagctggcgtcacaaacagaggaaaacaacgaagctgaagaaactgcacgatgatttggaatagcagccacattcttggctcttaaaactcgacggtccattccttttttaaaaggaaccgcacataataaagctagttcctggcagtctcatgcaaaaatcaccaagcaggatggtcattctttttgttctgactggcggctgcagagaaaattgtatcctgctgttgaaagatattcatttatacagttaagtcccagcacaaccgatcgttaggttaggaattctgtccgaaatggcaacttgcatttcaaacgtctgccatgaaaatgagaataaattcggcgggctctacagatttttcatctattgtctgaacaaaagtataggcatcaaataagtatctgggtaagtttatactatttgaataagaatcagctggatttgtttaaa

SEQ ID NO: 102583 - DNA, 861 bp, Zea Mays
gtctgaagcccgctgaagagagtgccacccttgcaaaattctagaccaggagaaggaaagggatctccggtccccggctcaccacttccgattccaatctggtctcgctgggcctggccgctggcggcaagggagagatggggaagaaccaggcgtataaggcgatgcagcgggcgaggctggggtcctcgtccggcgcacctggcgccgccgacgcccccgaagacggcatgagtggcatgcggcgcgcctggccagccttaacaagacgcacaccgtcacctgggaggagttcaaaaagaagcagaaggaagaggaattgaaaaggggtgagctggaggctgacaaagataaaatgatgagagagtatagagctcaactggatgctgaaagagctcagaagctagcaaatggaagaaatcactggtccaactcaaagtcatcatattccaagaaagagaggaaggataaggatgcaaagaaaagaaataaaaagaggagaaagcacagaagttcatcagagtcaagttccagcttatcgtcagaatcttccagcagcgatgatgaggataggggttcaaggaagtccagatcacgatctagttcgaagagaacaaagcaggaaaagaagcaccgatcaaggtccaagcacagagacagtgaaagtgaggaaggtccagttcgcctctctaaattcttcgggaagtaaggagtagatactgtacccaatacgccttttcattttgaaccgtagattggtgggtttggatgtaatattcaatacagattatttctgaaggttgatggaatcagttaccatgttctcaatagaatgctcaacagttaagagggtctggttaa

SEQ ID NO: 102584 - DNA, 853 bp, Zea Mays
caaaattctagaccaggagaaggaaagggatctccggtccccggctcaccacttccgattccaatctggtctcgctgggcctggccgctggcggcaagggagagatggggaagaaccaggcgtataaggcgatgcagcgggcgaggctggggtcctcgtccggcgcacctggcgccgccgacgcccccgaagacggcatgacggacggttcatttcattctccagagtggcatgcggcgcgcctggccagccttaacaagacgcacaccgtcacctgggaggagttcaaaaagaagcagaaggaagaggaattgaaaaggggtgagctggaggctgacaaagataaaatgatgagagagtatagagctcaactggatgctgaaagagctcagaagctagcaaatggaagaaatcactggtccaactcaaagtcatcatattccaagaaagagaggaaggataaggatgcaaagaaaagaaataaaaagaggagaaagcacagaagttcatcagagtcaagttccagcttatcgtcagaatcttccagcagcgatgatgaggataggggttcaaggaagtccagatcacgatctagttcgaagagaacaaagcaggaaaagaagcaccgatcaaggtccaagcacagagacagtgaaagtgaggaaggtccagttcgcctctctaaattcttcgggaagtaaggagtagatactgtacccaatacgccttttcattttgaaccgtagattggtgggtttggatgtaatattcaatacagattatttctgaaggttgatggaatcagttaccatgttctcaatagaatgctcaacagttaagagggtctggttaa

SEQ ID NO: 102585 - DNA, 933 bp, Zea Mays
gatctctgattgccatccgcacttccgagttccaggcttgcaatccatcctgatctcattatttccgcggccctattcgtacgctaatatatatggtagagtaggattccagctgctgaggaattttggctatctcatccaacttctagtttgggtgaaaaataaagaaaaaagaactttggctaacgagggccgtcgcagacggacggttcatttcattctccagagtggcatgcggcgcgcctggccagccttaacaagacgcacaccgtcacctgggaggagttcaaaaagaagcagaaggaagaggaattgaaaaggggtgagctggaggctgacaaagataaaatgatgagagagtatagagctcaactggatgctgaaagagctcagaagctagcaaatggaagaaatcactggtccaactcaaagtcatcatattccaagaaagagaggaaggataaggatgcaaagaaaagaaataaaaagaggagaaagcacagaagttcatcagagtcaagttccagcttatcgtcagaatcttccagcagcgatgatgaggataggggttcaaggaagtccagatcacgatctagttcgaagagaacaaagcaggaaaagaagcaccgatcaaggtccaagcacagagacagtgaaagtgaggaaggtccagttcgcctctctaaattcttcgggaagtaaggagtagatactgtacccaatacgccttttcattttgaaccgtagattggtgggtttggatgtaatattcaatacagattatttctgaaggttgatggaatcagttaccatgttctcaatagaatgctcaacagttaagagggtctggttaagttgtgtggcttcctaaaactttgtaaggaattggtaagtcattgttagattgctgtaccttagaggatttgatgtcta

SEQ ID NO: 102586 - DNA, 1043 bp, Zea Mays
gatctctgattgccatccgcacttccgagttccaggcttgcaatccatcctgatctcattatttccgcggccctattcgtacgctaatatatatgacggacggttcatttcattctccagagtggcatgcggcgcgcctggccagccttaacaagacgcacaccgtcacctgggaggagttcaaaaagaagcagaaggaagaggaattgaaaaggggtgagctggaggctgacaaagataaaatgatgagagagtatagagctcaactggatgctgaaagagctcagaagctagcaaatggaagaaatcactggtccaactcaaagtcatcatattccaagaaagagaggaaggataaggatgcaaagaaaagaaataaaaagaggagaaagcacagaagttcatcagagtcaagttccagcttatcgtcagaatcttccagcagcgatgatgaggataggggttcaaggaagtccagatcacgatctagttcgaagagaacaaagcaggaaaagaagcaccgatcaaggtccaagcacagagacagtgaaagtgaggaaggtccagttcgcctctctaaattcttcgggaagtaaggagtagatactgtacccaatacgccttttcattttgaaccgtagattggtgggtttggatgtaatattcaatacagattatttctgaaggttgatggaatcagttaccatgttctcaatagaatgctcaacagttaagagggtctggttaagttgtgtggcttcctaaaactttgtaaggaattggtaagtcattgttagattgctgtaccttagaggatttgatgtctatatttgaaatatttgataaatcgaactgctatatatatcttaaggcttcacatggccagtcacttgtttcggttatgctctcgttgaagcaacgtgatacaccaattcgacttcagatcaaaagactgaatactgcatcttagcaccatcactctagttatcaaccgtatagttggcctcgtctataaggttagttcctgtccgtgaaaaaaaaaa

SEQ ID NO: 102587 - DNA, 668 bp, Zea Mays
ttcgattcactttggacacctcaccataatttaatgtcagacgcccttataaaaaaacattcacatctttcaaatgtcatcactcaaaataacagttttctatcttggttttgatgttttggcttgggtgattcatatgttgactgttgagtcactcgtaagtagaagaggaattgaaaaggggtgagctggaggctgacaaagataaaatgatgagagagtatagagctcaactggatgctgaaagagctcagaagctagcaaatggaagaaatcactggtccaactcaaagtcatcatattccaagaaagcacagaagttcatcagagtcaagttccagcttatcgtcagaatcttccagcagcgatgatgaggataggggttcaaggaagtccagatcacgatctagttcgaagagaacaaagcaggaaaagaagcaccgatcaaggtccaagcacagagacagtgaaagtgaggaaggtccagttcgcctctctaaattcttcgggaagtaaggagtagatactgtacccaatacgccttttcattttgaaccgtagattggtgggtttggatgtaatattcaatacagattatttctgaaggttgatggaatcagttaccatgttctcaatagaatgctcaacagttaagagggtctggttaa

SEQ ID NO: 102588 - DNA, 895 bp, Zea Mays
tcccccacgccgttcctccgcaccacactccactgctctcctccactccactgcctcccatccctgctgctccctctcccatcccggttccatcatgggcggcctctcggtgatcgcaccgcccgcgcgggactcggcttccccgcagcaccggcgcgcgcgccgcgcgttcctcgtgtccaactatctcatcctgggctgcgcctccgggtgcggcttcctcacgctctcgctccgcctggccccctccgtcgacggcttcctcctcatcctgctgcacgcgctcacggtggccgccgccgtggccgggtgcgccgtcatcgcggcgccggaccctccgcgcggccgctgctacaccgtccacatgtccgccaccgtcgtcgtctccatcctgcagggcgccgccgccgtgctcgccttctcccgcacgtcggagttcctctccgacggcctcaagtcgtacgtccgcgaggaggacggtgccgtcatcctccgcatggtcggcggcctcggcgtcggcatcttctgcctcgagtgggtcgcgctcgcgctcgccttcgtgctcaggtactacgtctacgtcgacagggagtgcggcggcaaccccatgcgccgcagcgccaaggtcggcggcgaggacggcgccggcacctggccctggcccttccaggtctgaagtggaccatgagtttttggaagggaaatcaagcgtcgagtgttatagaactatgtggggggacgggatgcacaatgttgtgattcgtttatttgtttattatgtggttttgtaatgtcatatttgtaacgctgttatatttatataattatatatgtgaaatttgcactgtattgcgatcgagcagtttgaattctgacgagatctgaactaaaacaa

SEQ ID NO: 102589 - DNA, 1632 bp, Zea Mays
ggctccccccgctgaaggctcaagtctcagtcccggctcaccgcagagttatctcactcggaggcgccagcgcgcgcgtgtataaataactgcgcctcactgctgcggtgcacggtgtccccctccctacccgctgtctgcggctggccaccctcatagcccccgagctctgtgtgcgacgatggactactcgggcaccaaggagtcgcctcctgccggggcttggtggtcgagggagacggtggccgtggtgaccggcgcgaaccgcggcatcggccacgcgctcgccgcccgcctggccgagcacggcctcaccgtggtgctcaccgcgcgggacggcgagcgcggggaggccgccgcggcgccgctcctcgcgcgcgggctcgccgtcgtcttccgcaggctcgacgtctccgaccccgcctccgtcgccgagttcgccgcgtggatccgcgacgccctcggcggcctcgacatcctggtgaacaacgcagccgtgtcgtttaacgagatcgacaccaactccgtggagcacgccgaggctgtcctcaggaccaacttctacggggccaagatgctcaccgaagcgctcctgccgctgttccggcagtcgtcggcgaccagcaggatcctcaacgtcagctcccagcttggccttctcaacaaggtgagcgacccgtcgctgagggcgctgctgctggacgaggacgggctgacggaggcggggatagaggcgatggtgtcgcggttcctggcgcaggtgaaggacgggacgtggggcgggcagggttggcccaaggtgtggacggactactcggtctccaagctggccctgaacgcctactcgcggctgctggcgcggcggctgcaggcgcgcggcgcgcgcgtgagcgtcaactgcttctgccccgggttcacgcgcacgggcatgaccaagggctgggggaagcgcaccgccgaggaggcggccgacgtcgccgcgcggctcgcgctgctggcgcccgccgagctccccacggggaccttcttcaagtggtgcacgccgcagctctactccaagctgtgactgtgactggatagctacgcctaccgtcgtcggcagtgtgtgcgtgcgctccgtgaacgctggagtatatatatatagttcggttcctttagctactctgctcagaagtcagaaacgggagtgtcgatctgccaaggtgctttcggttgaacacagctcgtttgtgacctctccgcaatgtaccatgtacctagttgtctaagatctaggtcaactttctgtgcactggttgaatggttgccttgcctctgcatctgcatctcccttaccgttctgcccgttcgtaaaaagtctgttccttaccggattgatggtagttggctagcttttccttccacacgagatttctggccgtgggatgtgaagtgtgattggagaagtgggccgcgtgggctttaacttgtgttcgctaatggtcaacacgaggagacagacggcccaactcatccttctttcattttctttcgtaatcagaatgagtgggataacaatgctgttccacggtctttttaattttttttgtaaacataagggaacaaatatataaataataaataaactatttt

SEQ ID NO: 102590 - DNA, 781 bp, Zea Mays
tctcactcggaggcgccagcgcgcgcgtgtataaataactgcgcctcactgctgcggtgcacggtgtccccctccctacccgctgtctgcggctggccaccctcatagcccccgagctctgtgtgcgacgatggactactcgggcaccaaggagtcgcctcctgccggggcttggtggtcgagggagacggtggccgtggtgaccggcgcgaaccgcggcatcggccacgcgctcgccgcccgcctggccgagcacggcctcaccgtggtgctcaccgcgcgggacggcgagcgcggggaggccgccgcggcgccgctcctcgcgcgcgggctcgccgtcgtcttccgcaggctcgacgtctccgaccccgcctccgtcgccgagttcgccgcgtggatccgcgacgccctcggcggcctcgacatcctggtgaacaacgcagccgtgtcgtttaacgagatcgacaccaactccgtggagcacgccgaggctgtcctcaggaccaacttctacggggccaagatgctcaccgaagcgctcctgccgctgttccggcagtcgtcggcgaccagcaggatcctcaacgtcagctcccagcttggccttctcaacgtaagtgccctgccacccccatctgtttacagtattttcttcagatgaactggcagcgaatccttcaaatttgaaaagtaagcatatcctgcttgctttgtcgcgtgcctagctcactaggtacataactaattgaagatagcgacatggatatacagatgacaaaat

SEQ ID NO: 102591 - DNA, 889 bp, Zea Mays
cggaacaacccctttctttttcttaattcctcatccactcgccgcacgacgaagagagcggctcccattccccaccacctactcggaccggagcagcagattctcgaagcgaccggtgaaacattctcgcgccaattgtgggggccatgggcgccaacggacacccgccggcgagcaccgtcgcgcagaacggatcccactctggcggaggcggaggagggggagggggagtgaaccctagcaacggcggcacgggggcggctcttcggcacgaccctggtctggcgcgggagtggtcgacggaggagcagaccatcctcgacgagctgctggtcaagtatgcatccgatttacccgttgttcgttatgcaaaagttgcaatgaagttgccagagaaaacagttcgggatgtagccttgcgctgcagatggatgaataaaaaggagagcgccaaaagaaagaaagaggatcacaactcgtctaagaaaagcaaggacaaaaaggagaaggtttcagattcttcgtcgaaaccacctgtgcatatggtgggtaggcctaatgttcctccataccctcttccagttcttccaatggacgatgatgaaatctcatccaaagccattggaggtccaacgggtgaaatacttgaaactaatgcccatgttttgggtcaaatttcgtcaaaccttagcaacatgcaggacaatatctctctgctctgccaaactcgcgataatatactcagggtcttgaaagagtatgttttgaattgctattgcgtttatatcaaaatctttttgaagtcatatattcgtctaatacgttgaggcccatttgttattagatgcatacattttccataacatataagggatatgtttccttcacc

SEQ ID NO: 102592 - DNA, 1166 bp, Zea Mays
cggaacaacccctttctttttcttaattcctcatccactcgccgcacgacgaagagagcggctcccattccccaccacctactcggaccggagcagcagattctcgaagcgaccggtgaaacattctcgcgccaattgtgggggccatgggcgccaacggacacccgccggcgagcaccgtcgcgcagaacggatcccactctggcggaggcggaggagggggagggggagtgaaccctagcaacggcggcacgggggcggctcttcggcacgaccctggtctggcgcgggagtggtcgacggaggagcagaccatcctcgacgagctgctggtcaagtatgcatccgatttacccgttgttcgttatgcaaaagttgcaatgaagttgccagagaaaacagttcgggatgtagccttgcgctgcagatggatgaataaaaaggagagcgccaaaagaaagaaagaggatcacaactcgtctaagaaaagcaaggacaaaaaggagaaggtttcagattcttcgtcgaaaccacctgtgcatatggtgggtaggcctaatgttcctccataccctcttccagttcttccaatggacgatgatgaaatctcatccaaagccattggaggtccaacgggtgaaatacttgaaactaatgcccatgttttgggtcaaatttcgtcaaaccttagcaacatgcagatacaggacaatatctctctgctctgccaaactcgcgataatatactcagggtcttgaaagagataaacgatgctccagatatcatgaagcagatgcccccgctacctgtgaagataaacgaggagctcgtcaactcgttgctccctagaccaactgtacctatgcagtagtgatagcaaaatgagcttttaagataggcagctgaaataaaaaaaaaaaggggcagccctggtacttttttgttcgttttgtagctccatcctctcgccttctgtattgtatgtttcgtctggatgcttatgtttgttccaaccttttgcaagtcaggcggttggaacgtgtaccaagttaccaagggctgcttccacataagtatcaggtcctgactctgttttgtaatctatagctgtttggtaatgccatggaatcggagtacactttagggtctgtttggttgggcggtg

SEQ ID NO: 102593 - DNA, 1188 bp, Zea Mays
ggcttgcattttgatcttgcaagtacaatgtttggacaacatcctgaagccctgttaagagcgagttccttcattttttaccttatgtttcaattaatgtttatcggcatttgctctcaggtatgcatccgatttacccgttgttcgttatgcaaaagttgcaatgaagttgccagagaaaacagttcgggatgtagccttgcgctgcagatggatgaatgtaagtaagatacgacatggcctggcctctttagtctttaggtttcagaaatgatttgagggaatttgttgagcctgcagaaaaaggagagcgccaaaagaaagaaagaggatcacaactcgtctaagaaaagcaaggacaaaaaggtttccaaatatttttcctgattgtactccatttaaatcaattgttgcagtaatttccacacataacagatatctggttgcacagtgtcactatatgtgtgtgtgttcctatcacacactccttaaattagagatttgcactgacagctaccaatttatgtaggagaaggtttcagattcttcgtcgaaaccacctgtgcatatggtgggtaggcctaatgttcctccataccctcttccagttcttccaatggacgatgatgaaatctcatccaaagccattggaggtccaacgggtgaaatacttgaaactaatgcccatgttttgggtcaaatttcgtcaaaccttagcaacatatacaggacaatatctctctgctctgccaaactcgcgataatatactcagggtcttgaaagagataaacgatgctccagatatcatgaagcagatgcccccgctacctgtgaagataaacgaggagctcgtcaactcgttgctccctagaccaactgtacctatgcagtagtgatagcaaaatgagcttttaagataggcagctgaaataaaaaaaaaaaggggcagccctggtacttttttgttcgttttgtagctccatcctctcgccttctgtattgtatgtttcgtctggatgcttatgtttgttccaaccttttgcaagtcaggcggttggaacgtgtaccaagttaccaagggctgcttccacataagtatcaggtcctgactctgttttgtaatctatagctgtttggtaatgccatggaatcggagtacactttagggtctgtttggttgggcggtg

SEQ ID NO: 102594 - DNA, 106 bp, Zea Mays
caaacttgagaaagacaagttgcaagatgatgatggtgattgtcaccccgagccgttcttctatcgctgaagagcagtgactgttgtagatcgaggtagaacttca

SEQ ID NO: 102595 - DNA, 1687 bp, Zea Mays
tagttgcactctgtttgaatgtcttaatctaattttagcaatcagctctagtacatttaaacaactcttaattacttctttttgcgccatagagttgtcttttacgccgcggatgcctctccctgctctgttctagtgttcttccttttgtccgaatagtcaaagctcaaaccaagcaatagcagtccttgctcctccaacttccctcctggcttctgcccctttgtctgcgctcctcacgccgccccccgccccagcctcacacccgcattccccagatctccatggactcgacccctcccacggacccggcggcctcctgcttggcctccgcctctgcggcggtggcatcgggggacgtcgccgcgatgctgccggactcgccgccgcggcgtggggcgggccaccgccgcgcacagtcggagatcctcctcggcggcgccgcgctccccgacgacctcaccttcgacgcggacctcggcgttgtcggggaggcctgcgtggccggcgacgaggatgaggaggatgacgacgacgacgaggaaggggtcggcggcgctggcggcagccggatgttcgagatgttcctcgagaacggtggcaagctcccaggaccgccggagccgtcggcgcatccgcattcgacgccgccgcggccacggcaccatcacagcatgtctatggatgggtccacgtctttgtttggttccgccgccgccgggacgcctgggaggtcgggcgctgatgccaagaaggctatttccgacgctaagctcgccgagctcgcgcttgttgaccccaaacgtgccaagaggattttggcaaaccgccagtcagctgctaggtcgaaagaaagaaagatgcgctacattgcggagcttgaaaggaaagtacagactctccaattagaagcaactacactatcagctcagctggccatgttgcagcgagatacgactggtatgacaagtgagaatagtgatctgaagatacgtgtgcagacaatggagcagcaggttcagctgcaggacgctctgaacgacaggctaagagacgagattcagcagctgaaggttgcaacaggacaggtaaacgccagcattggaaaaacaggaaactctggtatgtcatcatttggaggtaatccacaaagttaccagcgtagccatatacagtctcttctggctgctcagcacctgcagcggctccggatccactcccaacatcagcaacagcagacgcattttcagcagcagcagcagccgcagccgcagctgctgctgcaggaggcgcatccatttccggtggacctaaagatgagaggattttctctgtcatcacatgctcagaacgcaggtgcatcagacagccatgctgccaagagcgaaccctgagatttagcatgtattcatgtgggttgttagaaataataatgtcgctctgttagcgtggtgtctaggtgaacttcaatttgtttgaggtgcttagattttgtgcagcctggagctcccatttggttgtaagcttcagtgctgactgaccggtcatttaccttgcctaatgcttgtacctgggtcctggccatgactttgtgcctggaggatggagccgttcgcgcatctgtgcaagagcagaatgacaattgttctttggttctttgcaatagttcaaccttgagaacctaaaa

SEQ ID NO: 102596 - DNA, 1259 bp, Zea Mays
atagagttgtcttttacgccgcggatgcctctccctgctctgttctagtgttcttccttttgtccgaatagtcaaagctcaaaccaagcaatagcagtccttgctcctccaacttccctcctggcttctgcccctttgtctggcggcagccggatgttcgagatgttcctcgagaacggtggcaagctcccaggaccgccggagccgtcggcgcatccgcattcgacgccgccgcggccacggcaccatcacagcatgtctatggatgggtccacgtctttgtttggttccgccgccgccgggacgcctgggaggtcgggcgctgatgccaagaaggctatttccgacgctaagctcgccgagctcgcgcttgttgaccccaaacgtgccaagaggattttggcaaaccgccagtcagctgctaggtcgaaagaaagaaagatgcgctacattgcggagcttgaaaggaaagtacagactctccaattagaagcaactacactatcagctcagctggccatgttgcagcgagatacgactggtatgacaagtgagaatagtgatctgaagatacgtgtgcagacaatggagcagcaggttcagctgcaggacgctctgaacgacaggctaagagacgagattcagcagctgaaggttgcaacaggacaggtaaacgccagcattggaaaaacaggaaactctggtatgtcatcatttggaggtaatccacaaagttaccagcgtagccatatacagtctcttctggctgctcagcacctgcagcggctccggatccactcccaacatcagcaacagcagacgcattttcagcagcagcagcagccgcagccgcagctgctgctgcaggaggcgcatccatttccggtggacctaaagatgagaggattttctctgtcatcacatgctcagaacgcaggtgcatcagacagccatgctgccaagagcgaaccctgagatttagcatgtattcatgtgggttgttagaaataataatgtcgctctgttagcgtggtgtctaggtgaacttcaatttgtttgaggtgcttagattttgtgcagcctggagctcccatttggttgtaagcttcagtgctgactgaccggtcatttaccttgcctaatgcttgtacctgggtcctggccatgactttgtgcctggaggatggagccgttcgcgcatctgtgcaagagcagaatgacaattgttctttggttctttgcaatagttcaaccttgag

SEQ ID NO: 102597 - DNA, 445 bp, Zea Mays
accatggcgcccttgcccgagaagccgaccgccacgtacgagcccctgtccggcgccgagaggatgaagctccactcgctgggccccgtgttcttgcataccctgaggacgaagtcctgctgcttccaggcggcggtgcagcggaaggacgtggagtcgaagggcacgaggctggcgaccgcgaccttggccctggcgcacgagtccgccgccgactcctggtggctcagcgcgacgcagaacccgagaaggcagagcagcagcaccagcaggcgcacggagcgcgtcccggaagaagccgccattgcccgtgcgctgctcgctccctgttcctgcgctgcccttcctgcctcgggctgtgtggccttgctggatttggcaggcgccgggacaagattggtgcgtcgaagcgaagggaagggatggatggccactggccaggcgc

SEQ ID NO: 102598 - DNA, 1179 bp, Zea Mays
atggttccgcgtggagacaagcgagacgtcgtcgacgacgggtccgcagagcgtgccgtcgggcttcatgatgtagcccatgctgacgaacaccaccctggtctggtccgcgaccgccgcgaagtccagcacgccgcgcgtgtggccgcccttgccctgggactggtacggcaccttcacgctgccccgcgcggcgtacgcctggacggtcatggagcccacgcagccgttgccggcgtccccggccgagaactggagcctgtagagctgtccgggaacggtggccacgttctgcaccagcgctgtctccatgccggacaccagctccacggcgcgggcgccgtgcggcacggcgtggtgcggcgcgtccacgtacttcaccgacttggtggacgacaggaccatccacggggccagcggggagtagtcgtcctcgtccatcggcggcaccagcaccccccactgcgtgttggggaagatgtacggaccgtcctcgaagtccccgttcttcagcatattattcttgctgctccgaggagtcggcatggtcttaatggcaaacagatcgatgagggggccgcaggctgcgtcctcggcgacgccggggttgtggacgatcagggtcacgacgctgcccgcggcctggaaggcccaggagtaggagtcccacccgctgctggtgtagaccgtctggatcgggagtacgtccgactcgggggcgaccgtcacgttgagctgctcggcctgggcgcaggtgcgcgccgcgctgaaggtgatggagtagcgcgcgcccggcgtcacggcgaggcgctgctggatggatgcctcgttccccagccgcacggcgtacgcgccctccggcaccggcagcagcatgtcgccctgcttctggcccgacccgatgtactccacgtacccggagatctcccagtgcggtatcgcgttgcgccccatcaccctcgtgccgttgagctgcgacttgggcggcgcctcctcgaagttgccgttcggcaacaggccatcctggatcgcagaagccgctcgagccgccaagcagacgatcaagagcagcgcagctcgacgggcgtccggcactgcatcgcttccccttcccatcgtctaccttctccggcgcaggaaggaaaccaccacaagtccacaacgctcgaacgcaactga

SEQ ID NO: 102599 - DNA, 1023 bp, Zea Mays
caaccacctgatctcagtcctgaaacacagatcatcatcattcatggtcatggctatggcaaactcggcaacgatcctgaccgtcgtcctggctctgatcgggctagcgctcctccgcgccgcagctccggcctccgcgcagaacgactgcggcagctgcccgccaggctactgctgcagcaagttcggttactgcggcaccagcttcgactactgcaatggcaacacgtgccagtccggcccgtgcacggccgggggcgccggtagcggcggcgcgaacgtgagtggcgtcgtcaccgacgcatttctcagcggcatcaagtcccaggccgggagcgggtgcgagggcagtagcttgagcttctactcgcgaagggcgttcctgagcgccgccagctcgtaccccggcttcgcccgtgccggatcggaggccgacggcaagcgcgagctcgccgccttcttcgcgcacgtcacgcacgagaccggccatttctgctacgtcagcgaggtcaacaagaacaacagctactgcaactcgagcaacacgcagtggccgtgcgccccggggaagaagtactacggacgcggcccgctgcaggtctcgtggaactacaactacggtcccgccgggaggagcgtcggcttcgacgggctggggaacccggacatggtggcgcaggaccccgtggtctcgttcaagacggcgctctggttctggatgagcaacgcgcaccaggtcatgccgcgggggttcggcgccactatccgtgccatcaacggcgccctcgagtgcaacggcgagaaccccgccgccgtgaacgcgcgcgtgggctactacaaggagtactgcgagcagttcggcgtcggcccggggaacaacctcacctgctaggaccctattcaagtgttgtgttgggttcatgcatatgcgggcctcattggaaaactcagtcggctgtagtgaagctcagagtttgagagtacctgtttattgtatacaagaaaaatgaagcagttcctaat

SEQ ID NO: 102600 - DNA, 1246 bp, Zea Mays
acacctcaaatcacctcacacaacaagctgcaccgcagcaacgaacacgaaccttggcagaacgaagctgaagtagttcgctgtgaacccagtatggcaaacgcgccgaggatcctggccctcggcctgctagcgctcctgtgcgctgccgccggcccggccgccgcgcagaactgcggctgccagccaaacttctgctgcagcaagttcggctactgcggcacgaccgacgcctactgcggcgacgggtgccagtcgggcccgtgccgctcgggcggcggcggcggcggcggcggcggcggaggcggcggaggcagtggcggtgcgaacgtggctaatgtggtcaccgacgcgttcttcaacggcatcaagaaccaggccgggagcgggtgcgagggcaagaacttctacacccggagcgcgttcctgagcgccgtcaacgcgtacccgggcttcgcccatggcgggacggaggtggagggcaagcgcgagatcgccgccttcttcgcgcacgtcacgcacgagaccggacatttctgctacatcagcgagatcaacaagagcaacgcctactgcgacgcgagcaacaggcagtggccgtgcgcggcggggcagaagtactacgggcgcggcccgctgcagatctcgtggaactacaactacgggcccgccgggagggacatcggcttcaacgggctcgccgaccccaacagggtggcgcaggacgccgtgatcgcgttcaagacggcgctctggttctggatgaacaacgtgcaccgtgtgatgccgcagggcttcggcgccaccatcagggccatcaacggcgccctcgagtgcaacgggaacaaccccgcccagatgaacgcgcgcgtcggctactacaagcagtactgccagcagctccgcgtcgacccagggcccaacctcacttgctaggcgacggcgtccacgttgtacccatggctcctgctagtgctagctcgtccacaataaatgctcggcgtcgcaccctcgcgaaaagtaaaccaagagtttactgactagtacgagctagctagcatgcagtaataataatcatcgtaataataataataaaacgactgggctgagccactttgttcgacctgaatgaataatgaagcaactgtatgttccctctgtacatagttgtgtatgcttgtgcttttactttccgtttgcagcatgggtctaacatcgaccgaatcaagaaatttcgagaataaca

SEQ ID NO: 102601 - DNA, 1321 bp, Zea Mays
cttcaattcttccccaacgcaggctcttcccccgcacagcagcatctttcttctcctcttcgcggcgcgtcctccgggttaaggaaaaaaaagcggggaaaagggagaagaatcgcacgtcccgccgccgcccgctctgctagtgctagctgctgctggtttggtcgtttcccggccgccgcgccggtgacgcagatcgacagctcctgcccatctcagagtccatcgccgctgatcctgcctgtgcctgcagcgaaacacgcgcggggcaaggacggagctggtaagccgatcgagccggcgagggtggacaagatgatgatggccgaggtggtggccaaccacagcaaaaggagccacaccgacggctacttcagtgccaaagccgccgtcgccgccgccgccgccgcgagcccgccagaggagttgggaagcatgcccatgtcctcgaagaagccgaggccgaggaatagcaacagcccgagaaccgcgcccgtatcgcccaaggagaagaaggacaggatcggcgagagagtcgcggcgctccagcagctagtgtcgccgttcgggaagacagacacggcttccgttctgcaggaggcctcggggtacatcaggttcctgcaccagcagctccaggtcggtgttccaccagtgaccgcgcgcatggtggccggcactacgtcctcagctccccttacatgcgtgctcctccggctgccggcgccgcgcctgaggatcccgagcactacagcctccggagccgcgggctgtgcctggtgccggtggaccagacactgcagctgacccagagcaacggggccgacctgtgggcgccggcgaacacgaccaggcgcaggtgaggaggagcctgctgccggcctgtgcctggtggtggtctgcccggaggaaaccgcgcaagtactactgctgtgtctgcatggtgcgcgtgtagtacagtttccaagcgcctgacccaattcgatctcctaacaagaagctaagcattaagcaagcgtgtccgtatcagccgccttgtattataccagtgacctgtcggcgccgtatatgtgtgatctgcttgctagctgatccacacagatggaagcggccctgaactgcgtctccatgtggtactagtactatgtaactatgtgtttactgacttgtgaactagcagtctgtggcctgtcagcaagtaaatgggggcagtttaatgcatgttccttgagatgccctctcaccatatccttctctttctctcagctgctgaaactgaaactgcacattcaggcaaggcagagcctaatgactgccgatg

SEQ ID NO: 102602 - DNA, 1274 bp, Zea Mays
cttcaattcttccccaacgcaggctcttcccccgcacagcagcatctttcttctcctcttcgcggcgcgtcctccgggttaaggaaaaaaaagcggggaaaagggagaagaatcgcacgtcccgccgccgcccgctctgctagtgctagctgctgctggtttggtcgtttcccggccgccgcgccggtgacgcagatcgacagctcctgcccatctcagagtccatcgccgctgatcctgcctgtgcctgcgaaacacgcgcggggcaaggacggagctggtaagccgatcgagccggcgagggtggacaagatgatgatggccgaggtggtggccaaccacagcaaaaggagccacaccgacggctacttcagtgccaaagccgccgtcgccgccgccgccgccgcgagcccgccagaggagttgggaagcatgcccatgtcctcgaagaagccgaggccgaggaatagcaacagcccgagaaccgcgcccgtatcgcccaaggagaagaaggacaggatcggcgagagagtcgcggcgctccagcagctagtgtcgccgttcgggaagacagacacggcttccgttctgcaggaggcctcggggtacatcaggttcctgcaccagcagctccaggtcctcagctccccttacatgcgtgctcctccggctgccggcgccgcgcctgaggatcccgagcactacagcctccggagccgcgggctgtgcctggtgccggtggaccagacactgcagctgacccagagcaacggggccgacctgtgggcgccggcgaacacgaccaggcgcaggtgaggaggagcctgctgccggcctgtgcctggtggtggtctgcccggaggaaaccgcgcaagtactactgctgtgtctgcatggtgcgcgtgtagtacagtttccaagcgcctgacccaattcgatctcctaacaagaagctaagcattaagcaagcgtgtccgtatcagccgccttgtattataccagtgacctgtcggcgccgtatatgtgtgatctgcttgctagctgatccacacagatggaagcggccctgaactgcgtctccatgtggtactagtactatgtaactatgtgtttactgacttgtgaactagcagtctgtggcctgtcagcaagtaaatgggggcagtttaatgcatgttccttgagatgccctctcaccatatccttctctttctctcagctgctgaaactgaaactgcacattcaggcaaggcagagcctaatgactgccgatg

SEQ ID NO: 102603 - DNA, 1222 bp, Zea Mays
gatttaaggatatctgagggttcgggtactaataccaccttggatgaccaatcggtacaatcgccgaccagaagggcaaaggtttgggagtattttcaacaagagttagttgaggttgatggagtgatgaaggctgtttgcaaatattgtgggacaaagctgacaagtaaaaggaattcaggaacaaatagccttagaaaccatgttgcggatacatgttctaaaattccagttgaggaccgcaagcgattcattgctacaatgagaaaaaggccaggagaaggttcgtttgtgtttgaccctcgaaagaatcgtgagtgcatggttaagtggtgcatcagtgtcaaggtcacattcaacaagtttgatgatcctttctttgcctcgtggatggagtcattgcagccatcgttcagtggtgttgggcgtcagacaatgagaaatgattgtattgttagattcaagatgatgaggcaagagctaaggaatgagctacagagtcttaactctcggatttgcttgacatctgatctttggacctcaaatcagaagttgggttatctttgcttgacagcccactacattgatgcaaactttatcttgaaaaagaagactattgcattcaaagatgtcaaatatccacacacgggcctagcaatcgaagaagtaattacgaagtgtctcatagagtgggggataaaagagaaggtgtttactatcacattggataatgcctccaacaatcaatcagcatgtgacctacttcgagaaagtggacgttcggacatgttatttggaggcgagcatcttcatgtccgatgttgtgcacatatcttgaatctcctagttcaagatggaatggcaattgctcatggagcaatcgataagattcgtgatctggtcagacatatcatatcctcaccctctcgcatacaagcttttaatgagattgctgagaggtctggattgtcttcaaaggctggattaattcttgatgttccaaatcgttggaattcgacacacaatatgataatggaggccattgagtacaaagttgtcttgaagagatatactgaggaacaacttgagccttcaccagatgatgaagagtggacaaattctgaggcgattggagagtttcttggggcatttgaggaagctacaaaagcattctcagcacatagaagtccaacatctcatttgtttttgcataatgtgctat

SEQ ID NO: 102604 - DNA, 1012 bp, Zea Mays
gctctgctttgctcccgttcccatgctgatttttttaggcggctgctggcctgcctgtctccactggaagctccggattacgtagaaaaggggcgggcggcatgaggatccagtgcgacgcgtgcgaggccgcggcggccgcggtggtgtgctgcgccgacgaggcggcgctgtgcgcgcgctgcgacgtggagatccacgccgccaacaagctcgccagcaagcaccagcggctcccgctcggcgacgccgcggcgctccccgccagcctcccgcgctgcgacgtgtgccaggagaggccggccttcatcttctgcgtcgaggacagggcgctcctctgccgcgactgcgacgagcccatccacgtccccggcacgctctccggcaaccaccagcgctacctcgccaccggcatccgcgtcggcttcagctccgtctgcggcgccagcgccgagggcctcccgccggcgccgcccaagggaagctccaagcccacggccgtcgtcagcgcgccagctgccgggacgaccaccaaaacaaggacggtcaaggacgcgctgccgcaggaggtgccgtcctcgccgttcctgccaccgtccggttgggccgtcgaggacctcctcgagctgtcggactacgaatccagcgacaagaaagactcgtctcttgggctcaaggagctggagtggttcgaggacatcgacctgttccacgcccattcgccagctaaaactgccatggcggagttcttcgcctcgccgcagccagtgagtaacgccgggttctacaaggcgaacggggcgcgcctgttcaagaagtcacggatggaggtgcctgacgacgacgacgaggactacttcatcgttcctgatcttggctgagaatgagatgagagatctctgcatgattctccagtcatgtgatgtgtgtatgtatgcaaaatatgtatgtatgccatcatggggtgcactgacgcttacgttggacatatgtaattatccagtcatgtgat

SEQ ID NO: 102605 - DNA, 865 bp, Zea Mays
acctttactgggaaagtccccggtgggaacttggtggtgagcagcacgcggagccgacgcacgacgcgcacgcggttcgccaggcaacggaaggaattcatcgacgctcagggggaagtcctcagtgagccacaccgacggccacaacgtcttcaccatatcctcctccttccatttggctccacatgttgtcgtcgttcctgggtgccagtcgaagataccgtcctcgtcgcgcctcaccaacgcacacgacaacagccaccgcggcacgtccacgctattcctccgcctccgcggggtcctcaagtgcgaaggcggcccgccacgctgcgccgaccgggccgagggcgacgttggcatggtgttgggtgtggggggcatcgtgtccagtcatcccccgtagctacgattttggcaacgtcgagctcccgcatcgtgagcacctcatgcggtgcgaggacggtggcgtgttagttgatgggcctgcgccaagtctccagcaacgggacgtcgacctagacgacgtggatccgcctccgcatggtggttgtggcggtggcggcggtgcagtagagcggccagtcgagggagggtggagccgaggaaggtgggaggagaggggtaatcaggggatccttcgccttccatggatcaggttagcggcggaggtgagggaggtcgtgccatcagttgggtcgacgcacgcggccagcgaccacgcgcagtcgacggtagtggctgggcacggactagggtttttaggcgatagagggtgagagggaggcgcagggaggaaggggggacacaaacgatggatcgacgggggcacgacgtgggcgaggaggggcgagcagcgagggcttgc

SEQ ID NO: 102606 - DNA, 75 bp, Zea Mays
ggtcttttcttatcttctgcttttcatgtagattttagtctttcattttatttttgtattatatctgcatatcat

SEQ ID NO: 102607 - DNA, 355 bp, Zea Mays
gttgcctggtcaaaatgaaccaggcccatatgatacattgtttggttctcatttttgtagcttggcccaattgggttgccgcacaattttgttgtgtaaaatgaagctcccgccaaatctcaaaattttaagcgctattaaacaaattacaacagatttaaactaaaaatatgatttacaataatctgaattaaacagatcctcctgctagtaatttttcttattgaactaattacaatcatttgaattacaatcatatgaactatagtagcaacttaaaatatggataacaaaaacagaaactatgattataattacaatcatatgaattttaattaaacaaaaactattaatt

SEQ ID NO: 102608 - DNA, 1689 bp, Zea Mays
atggcgagtggaggttttgtggactggagaggaaacctcgtcaacagacaggtgcatggaggggttaaagcagcatggtttctgcacttcctgacatttgtaacaaacatggtgaatgtcccaattttgctgaatctggtcacctacctctgagggacaatgcatatgggagtgtcggactctgcaactacagtcactaattttgttggtgctacatccggatttactttgataggagctttcctctcggactcttacatcactcgttccagaactatacttctctttggtccattggagtttctgggctacggattgcttgcattgcaagcgtacgttccatcgctccatccaccaatttgcaacattgaagccgaaccaagtaactgcaaagaggcccatggttggaacgctacactgttttacgcagccctgtatatctgtgcgtttggtgaaggttgcatccgtgcttgcttgccgtctctcggagcagaccagtttgaccatgaagatccctctgagtcccaccaacagtccagcttcttcaactggttcacctttgggatctcctttggaggttttgtggggctgattttcatcgtgtggcttgagaactacaaggggtgggacattggactcggactgtctgctatcctaattctgcttgggttgcttgtgtttgcggctggcctccctttttaccgcaaccaagtacctgaaggaagccctctaactcgaatcctgcaggttcttgtggttgcattcagaaacaggaggtttgggctgcctgaggagctggaagaagcacatgaaagcagtgctgagcgaggctctactaaagtactttcccaaacaaatagcctcaaattcctcgataaggcttgcattaaccatggcaaagaaggagcctggtcactttgcagtgtgacaaaggtggaggagacgaaggctgtgctccgtatgcttcctgtgtttgtcagctccatgatcggatatatatcaaaccctgtcatcttcacattcactgtgcagcaaggtggcatgacaaacacaaggctgggcaagatccatgtttcccccgcgacactcttcgtcatccccatcaccttccaaatggcaatgcttgccatctatgaccggttcattgtgccgttcttgcgcaggcgcacaggctatgccagtggcatcactcacttgcagcgcatcggcatgggtttcgcctccatgatacttgcgtcggtcatcgcagcagtagttgagagaaagagaaaagaagccgcagtgcagatgtccctgttctggcttgcgcctcagttcttcctgctgggcgtgtcggacgtgacctcgtttcctgggctcctcgagttcttcaacagcgaggcgccacggggcatgaagtccattgccacagccttgttctggtgtgagatagggcttgcttcattgctggccaccttcctggtgcaagcagtgaacagcgtcacgaggcatgggcaccaaggagggtggctcgagggttccagcttggacagcagccatcttgacctcttctactgggttgtcactgttgtcggtttgattggtttccttaactacttgtactgggcaaaaaagtacgtctaccgccaggatacacgcatcgtcgatgagccatcatcagtcgatcaagattcacattgaacctcgaca

SEQ ID NO: 102609 - DNA, 640 bp, Zea Mays
cctgagtccaccccccgtccctttccctctcctacctccacctccacgacaacaagcaaatccccatccagttccaaaccctaactcaaatgctcgctttgactgcctcagcctcatccgcttcgtcccatccttatcgccacgcctccgcgcacactcgtcgcccccgcctacgtgcggtcctcgcgatggcgggctccgacgacccccgtgcagcgcccgccagatcggtcgccgtcgtcggcgccggggtcagcgggctcgcggcggcgtacaggctcagacagagcggcgtgaacgtaacggtgttcgaagcggccgacagggcgggaggaaagatacggaccaattccgagggcgggtttgtctgggatgaaggagctaacaccatgacagaaggtgaatgggaggccagtagactgattgatgatcttggtctacaagacaaacagcagtatcctaactcccaacacaagcgttacattgtcaaagatggagcaccagcactgattccttcggatcccatttcgctaatgaaaagcagtgttctttcgacaaaatcaaaggtatgttcagccattgagtacaaactgccgagtgccgactaacaaaatgtcataacattgctagtatcaatgcc

SEQ ID NO: 102610 - DNA, 2106 bp, Zea Mays
cctgagtccaccccccgtccctttccctctcctacctccacctccacgacaacaagcaaatccccatccagttccaaaccctaactcaaatgctcgctttgactgcctcagcctcatccgcttcgtcccatccttatcgccacgcctccgcgcacactcgtcgcccccgcctacgtgcggtcctcgcgatggcgggctccgacgacccccgtgcagcgcccgccagatcggtcgccgtcgtcggcgccggggtcagcgggctcgcggcggcgtacaggctcagacagagcggcgtgaacgtaacggtgttcgaagcggccgacagggcgggaggaaagatacggaccaattccgagggcgggtttgtctgggatgaaggagctaacaccatgacagaaggtgaatgggaggccagtagactgattgatgatcttggtctacaagacaaacagcacctaactcccaacacaagcgttacattgtcaaagatggagcaccagcactgattccttcggatcccatttcgctaatgaaaagcagtgttctttcgacaaaatcaaagattgcgttattttttgaaccatttctctacaagaaagctaacacaagaaactctggaaaagtgtctgaggagcacttgagtgagagtgttgggagcttctgtgaacgccactttggaagagaagttgttgactattttgttgatccatttgtagctggaacaagtgcaggagatccagagtcactatctattcgtcatgcattcccagcattgtggaatttggaaagaaagtatggttcagttattgttggtgccatcttgtctaagctagcagctaaaggtgatccagtaaagacaagacatgattcatcagggaaaagaaggaatagacgagtgtcgttttcatttcatggtggaatgcagtcactaataaatgcacttcacaatgaagttggagatgataatgtgaagcttggtacagaagtgttgtcattggcatgtacatttgatggagttcctgcactaggcaggtggtcaatttctgttgattcgaaggatagcggtgacaaggaccttgctagtaaccaaacctttgatgctgttataatgacagctccattgtcaaatgtccggaggatgaagttcacaaaaggtggagctccggttgttcttgactttcttcctaagatggattatctaccactatctctcatggtgactgcttttaagaaggatgatgtcaagaaacctctggaaggatttggggtcttaataccttacaaggaacagcaaaaacatggtctgaaaacccttgggactctcttttcctcaatgatgttcccagatcgagctcctgatgaccaatatttatatacaacatttgttgggggtagccacaatagagatcttgctggagctccaacgtctattctgaaacaacttgtgacctctgaccttaaaaaactcttgggcgtagaggggcaaccaacttttgtcaagcatgtatactggggaaatgcttttcctttgtatggccatgattatagttctgtattggaagctatagaaaagatggagaaaaaccttccagggttcttctacgcaggaaataacaaggatgggcttgctgttggaagtgttatagcttcaggaagcaaggctgctgaccttgcaatctcatatcttgaatctcacaccaagcataataattcacattgaaagcgtctgacctatcctctagcagttgtcgacaaatttgtccagttcatgtacagtagaaaccgatgcgttgcagtctcagaacatcttcacttcagatattaacccttcgttgaacatccaccagaaaggtagtcacatgtgtaagtcggaaaatgaggttaaaaactattatggtggccgaaatgctcttttttgttttcctcacaagtggcctacgacacttgatgttggaaatacatttaaatttgttgaattgtttgagaacacatgcgtgacgtgtaatatttgcctattgtgattttagcagtagattctttgccagattatgctttacgcctttacagtgacctaggagtcaagggccccacatattatatttattt

SEQ ID NO: 102611 - DNA, 2110 bp, Zea Mays
cctgagtccaccccccgtccctttccctctcctacctccacctccacgacaacaagcaaatccccatccagttccaaaccctaactcaaatgctcgctttgactgcctcagcctcatccgcttcgtcccatccttatcgccacgcctccgcgcacactcgtcgcccccgcctacgtgcggtcctcgcgatggcgggctccgacgacccccgtgcagcgcccgccagatcggtcgccgtcgtcggcgccggggtcagcgggctcgcggcggcgtacaggctcagacagagcggcgtgaacgtaacggtgttcgaagcggccgacagggcgggaggaaagatacggaccaattccgagggcgggtttgtctgggatgaaggagctaacaccatgacagaaggtgaatgggaggccagtagactgattgatgatcttggtctacaagacaaacagcagtatcctaactcccaacacaagcgttacattgtcaaagatggagcaccagcactgattccttcggatcccatttcgctaatgaaaagcagtgttctttcgacaaaatcaaagattgcgttattttttgaaccatttctctacaagaaagctaacacaagaaactctggaaaagtgtctgaggagcacttgagtgagagtgttgggagcttctgtgaacgccactttggaagagaagttgttgactattttgttgatccatttgtagctggaacaagtgcaggagatccagagtcactatctattcgtcatgcattcccagcattgtggaatttggaaagaaagtatggttcagttattgttggtgccatcttgtctaagctagcagctaaaggtgatccagtaaagacaagacatgattcatcagggaaaagaaggaatagacgagtgtcgttttcatttcatggtggaatgcagtcactaataaatgcacttcacaatgaagttggagatgataatgtgaagcttggtacagaagtgttgtcattggcatgtacatttgatggagttcctgcactaggcaggtggtcaatttctgttgattcgaaggatagcggtgacaaggaccttgctagtaaccaaacctttgatgctgttataatgacagctccattgtcaaatgtccggaggatgaagttcacaaaaggtggagctccggttgttcttgactttcttcctaagatggattatctaccactatctctcatggtgactgcttttaagaaggatgatgtcaagaaacctctggaaggatttggggtcttaataccttacaaggaacagcaaaaacatggtctgaaaacccttgggactctcttttcctcaatgatgttcccagatcgagctcctgatgaccaatatttatatacaacatttgttgggggtagccacaatagagatcttgctggagctccaacgtctattctgaaacaacttgtgacctctgaccttaaaaaactcttgggcgtagaggggcaaccaacttttgtcaagcatgtatactggggaaatgcttttcctttgtatggccatgattatagttctgtattggaagctatagaaaagatggagaaaaaccttccagggttcttctacgcaggaaataacaaggatgggcttgctgttggaagtgttatagcttcaggaagcaaggctgctgaccttgcaatctcatatcttgaatctcacaccaagcataataattcacattgaaagcgtctgacctatcctctagcagttgtcgacaaatttgtccagttcatgtacagtagaaaccgatgcgttgcagtctcagaacatcttcacttcagatattaacccttcgttgaacatccaccagaaaggtagtcacatgtgtaagtcggaaaatgaggttaaaaactattatggtggccgaaatgctcttttttgttttcctcacaagtggcctacgacacttgatgttggaaatacatttaaatttgttgaattgtttgagaacacatgcgtgacgtgtaatatttgcctattgtgattttagcagtagattctttgccagattatgctttacgcctttacagtgacctaggagtcaagggccccacatattatatttattt

SEQ ID NO: 102612 - DNA, 1230 bp, Zea Mays
tgttttgttttcctggctgagtaagttcaaaagttctttgttatttcagtcactaataaatgcacttcacaatgaagttggagatgataatgtgaagcttggtacagaagtgttgtcattggcatgtacatttgatggagttcctgcactaggcaggtggtcaatttctgttgattcgaaggatagcggtgacaaggaccttgctagtaaccaaacctttgatgctgttataatgacagctccattgtcaaatgtccggaggatgaagttcacaaaaggtggagctccggttgttcttgactttcttcctaagatggattatctaccactatctctcatggtgactgcttttaagaaggatgatgtcaagaaacctctggaaggatttggggtcttaataccttacaaggaacagcaaaaacatggtctgaaaacccttgggactctcttttcctcaatgatgttcccagatcgagctcctgatgaccaatatttatatacaacatttgttgggggtagccacaatagagatcttgctggagctccaacgtctattctgaaacaacttgtgacctctgaccttaaaaaactcttgggcgtagaggggcaaccaacttttgtcaagcatgtatactggggaaatgcttttcctttgtatggccatgattatagttctgtattggaagctatagaaaagatggagaaaaaccttccagggttcttctacgcaggaaataacaaggatgggcttgctgttggaagtgttatagcttcaggaagcaaggctgctgaccttgcaatctcatatcttgaatctcacaccaagcataataattcacattgaaagcgtctgacctatcctctagcagttgtcgacaaatttgtccagttcatgtacagtagaaaccgatgcgttgcagtctcagaacatcttcacttcagatattaacccttcgttgaacatccaccagaaaggtagtcacatgtgtaagtcggaaaatgaggttaaaaactattatggtggccgaaatgctcttttttgttttcctcacaagtggcctacgacacttgatgttggaaatacatttaaatttgttgaattgtttgagaacacatgcgtgacgtgtaatatttgcctattgtgattttagcagtagattctttgccagattatgctttacgcctttacagtgacctaggagtcaagggccccacatattatatttattt

SEQ ID NO: 102613 - DNA, 245 bp, Zea Mays
gagtatacatgtgattaaatgttgcactcattgcagcaattcaaaaggctttggtggcgcggaacgatcgtcagtttgccgttagatatcttgacgaccaaaggcgtagatagagtctgtaacttttgcaaatctgaattttatgatggaatacatgtactgttattgatgcaacttacatgtgtcaaaatttgtaaaacattttgttctcctgggacatatcaatgaataagtggaacatcaaa

SEQ ID NO: 102614 - DNA, 354 bp, Zea Mays
atgggcattcctgtagtatctgttgatgtacctcgcctttacattgtttacatcaggcgtgtctggggttttcacaggataaaatttgtaaaatttgatgttctcgaatgcctctttcaccttaggatccatatcatcaatagctttcctcctggcttctttagcctgtttaagctctctcttcctttctctaaccttctccttcaggaactccttgaatttttctttctcatcctctggcaggccaccttcttgaactttctgatcagcaaaatcctcgtaatcgtccatttcccagtcaaactcatctactatctgcaacaagcagtagaaagtaaacacagtgatgcatga

SEQ ID NO: 102615 - DNA, 255 bp, Zea Mays
atggaggaacatgtttatggcaatgttagttttgatggaatgaagaaggtgacggtgatgttcgaagaaaggccgtcttttgaccagattttcactagagcttgtgaggagattagttgcgatttaaacgaccctaagatatcaattgagggtttattgtcccatgttgtctccattggctctgaagatgaatggatgaaatatgtcaaaattatgatgacgattgttcctttatgtttggatatggtcgtttga

SEQ ID NO: 102616 - DNA, 1524 bp, Zea Mays
atagccttagcccggcgcgagaagaaatcgtatcctcgccagctcttcaccaacagattcgtctcctcgcctccgccgggtttcgaccagaacgccgccgccagcccaccagtaattcctccgggcactggtctccgcctaggtcccaggaggccaggaccgcctccggccctccgcgactccgtcggtccaccgggactggcttgccgctgccaggggctccatcgcccagtaccggctccggtacacaagcggaaggcggccgagtaccaagacgcagcagcagcgcgaggcgcctggtctccacctcctctgggatcaccacccaagaaaagggtgcgcggcgcataggcgaccactgagattttattctctatataacatttggctgtaagtggattataatctctataactcttaaataagcaacagtgcaacaccttgattttgttgggtcctccgccagtcccatgcaacgcgagattttgggagccgtggccgcacgcccgcacagacgccattgttcagccctagacatgcgccaccgagccctgtcgagccaacatagcagagaaagaagttgcaaatatctcaatgtcaagtgtttcaaattctattgctgtgggtcttccaagctatgggctatatctagagacaaggtttctcacgcagacctataggaacttcgcacagaaatcctcttacaagtattccagaatccgtgcagtgcagggaaatggtgggcgtcgaaggctggttgacataatccgaatcattccagaactctcaagggactattttaaaagtcgatcgaggcgagctctttttggtggcatctcgttgcttggcggcttttacgttgcacagacaatctcgctctctttcggtaccttgggtgtgaatgatgttatagcagcggttgtttgtgtcctgctgacagagtatgtgacaaagttctattacagtcggcctaaggttaccttccccattgctctcctcaacaatttcaagatgggtttcacatatggcctgtttattgatgccttcaagcttgctagctgagctgcactatgtcctgcttggctacttctttgcacgctcttgatcaccacaaacatgactatatatgacatacatcatttttgtattgttgtatgtgaagattgaatccagtttacatagccttttagtttacatggaattcatctctgctgtgcaattttgcaaacttgaggttaatccaagctaattctgaactgagcggcagtaaagttcctattgggttactgtctgttactgttgcctgccaaatttataaagtccttcagtaatatcagtgtgtcttgattgctagcagcaatgcgacaaacatggcagattccagtgatgctgtatcaaaatgtgtttgcctgtttggtctgtgcacagctttaggtggtttcttggcaccatgctgtattctgattattttgggtatttctcagaatctctaatagttggctgtgcgttgagaagaggcgacga

SEQ ID NO: 102617 - DNA, 1485 bp, Zea Mays
atagccttagcccggcgcgagaagaaatcgtatcctcgccagctcttcaccaacagattcgtctcctcgcctccgccgggtttcgaccagaacgccgccgccagcccaccagtaattcctccgggcactggtctccgcctaggtcccaggaggccaggaccgcctccggccctccgcgactccgtcggtccaccgggactggcttgccgctgccaggggctccatcgcccagtaccggctccggtacacaagcggaaggcggccgagtaccaagacgcagcagcagcgcgaggcgcctggtctccacctcctctgggatcaccacccaagaaaagggtgcgcggcgcataggcgaccactgagattttattctctatataacatttggctgtaagtggattataatctctataactcttaaataagtgcaaatatctcaatgtcaagtgtttcaaattctattgctgtgggtcttccaagctatgggctatatctagagacaaggtttctcacgcagacctataggaacttcgcacagaaatcctcttacaagtattccagaatccgtgcagtgcagggaaatggtgggcgtcgaaggctggttgacataatccgaatcattccagaactctcaagggactattttaaaagtcgatcgaggcgagctctttttggtggcatctcgttgcttggcggcttttacgttgcacagacaatctcgctctctttcggtaccttgggtgtgaatgatgttatagcagcggttgtttgtgtcctgctgacagagtatgtgacaaagttctattacagtcggcctaaggttaccttccccattgctctcctcaacaatttcaagatgggtttcacatatggcctgtttattgatgccttcaagcttgctagctgagctgcactatgtcctgcttggctacttctttgcacgctcttgatcaccacaaacatgactatatatgacatacatcatttttgtattgttgtatgtgaagattgaatccagtttacatagccttttagtttacatggaattcatctctgctgtgcaattttgcaaacttgaggttaatccaagctaattctgaactgagcggcagtaaagttcctattgggttactgtctgttactgttgcctgccaaatttataaagtccttcagtaatatcagtgtgtcttgattgctagcagcaatgcgacaaacatggcagattccagtgatgctgtatcaaaatgtgtttgcctgtttggtctgtgcacagctttaggtggtttcttggcaccatgctgtattctgattattttgggtatttctcagaatctctaatagttggctgtgcgttgagaagaggcgacgatattattgtagcattattggaaatggatgtacactgaggcattgggaatggatgccattttatgtttgaaaattacacttcgtgaataatgatctgctttgggacgcgatatcaat

SEQ ID NO: 102618 - DNA, 1352 bp, Zea Mays
atagccttagcccggcgcgagaagaaatcgtatcctcgccagctcttcaccaacagattcgtctcctcgcctccgccgggtttcgaccagaacgccgccgccagcccaccagtaattcctccgggcactggtctccacctcctctgggatcaccacccaagaaaagggtgcgcggcgcataggcgaccactgagattttattctctatataacatttggctgtaagtggattataatctctataactcttaaataagtgcaaatatctcaatgtcaagtgtttcaaattctattgctgtgggtcttccaagctatgggctatatctagagacaaggtttctcacgcagacctataggaacttcgcacagaaatcctcttacaagtattccagaatccgtgcagtgcagggaaatggtgggcgtcgaaggctggttgacataatccgaatcattccagaactctcaagggactattttaaaagtcgatcgaggcgagctctttttggtggcatctcgttgcttggcggcttttacgttgcacagacaatctcgctctctttcggtaccttgggtgtgaatgatgttatagcagcggttgtttgtgtcctgctgacagagtatgtgacaaagttctattacagtcggcctaaggttaccttccccattgctctcctcaacaatttcaagatgggtttcacatatggcctgtttattgatgccttcaagcttgctagctgagctgcactatgtcctgcttggctacttctttgcacgctcttgatcaccacaaacatgactatatatgacatacatcatttttgtattgttgtatgtgaagattgaatccagtttacatagccttttagtttacatggaattcatctctgctgtgcaattttgcaaacttgaggttaatccaagctaattctgaactgagcggcagtaaagttcctattgggttactgtctgttactgttgcctgccaaatttataaagtccttcagtaatatcagtgtgtcttgattgctagcagcaatgcgacaaacatggcagattccagtgatgctgtatcaaaatgtgtttgcctgtttggtctgtgcacagctttaggtggtttcttggcaccatgctgtattctgattattttgggtatttctcagaatctctaatagttggctgtgcgttgagaagaggcgacgatattattgtagcattattggaaatggatgtacactgaggcattgggaatggatgccattttatgtttgaaaattacacttcgtgaataatgatctgctttgggacgcgatatcaatagtcatgttctttgtgtgctgattttccccctcaaa

SEQ ID NO: 102619 - DNA, 1453 bp, Zea Mays
tcaccaacagattcgtctcctcgcctccgccgggtttcgaccagaacgccgccgccagcccaccagtaattcctccgggcactggtctccgcctaggtcccaggaggccaggaccgcctccggccctccgcgactccgtcggtccaccgggactggcttgccgctgccaggggctccatcgcccagtaccggctccggtacacaagcggaaggcggccgagtaccaagacgcagcagcagcgcgaggcgcctggtctccacctcctctgggatcaccacccaagaaaagggtgcgcggcgcataggcgaccactgaggtaaccagcggcttattttattctctatataacatttggctgtaagtggattataatctctataactcttaaataagtgcaaatatctcaatgtcaagtgtttcaaattctattgctgtgggtcttccaagctatgggctatatctagagacaaggtttctcacgcagacctataggaacttcgcacagaaatcctcttacaagtattccagaatccgtgcagtgcagggaaatggtgggcgtcgaaggctggttgacataatccgaatcattccagaactctcaagggactattttaaaagtcgatcgaggcgagctctttttggtggcatctcgttgcttggcggcttttacgttgcacagacaatctcgctctctttcggtaccttgggtgtgaatgatgttatagcagcggttgtttgtgtcctgctgacagagtatgtgacaaagttctattacagtcggcctaaggttaccttccccattgctctcctcaacaatttcaagatgggtttcacatatggcctgtttattgatgccttcaagcttgctagctgagctgcactatgtcctgcttggctacttctttgcacgctcttgatcaccacaaacatgactatatatgacatacatcatttttgtattgttgtatgtgaagattgaatccagtttacatagccttttagtttacatggaattcatctctgctgtgcaattttgcaaacttgaggttaatccaagctaattctgaactgagcggcagtaaagttcctattgggttactgtctgttactgttgcctgccaaatttataaagtccttcagtaatatcagtgtgtcttgattgctagcagcaatgcgacaaacatggcagattccagtgatgctgtatcaaaatgtgtttgcctgtttggtctgtgcacagctttaggtggtttcttggcaccatgctgtattctgattattttgggtatttctcagaatctctaatagttggctgtgcgttgagaagaggcgacgatattattgtagcattattggaaatggatgtacactgaggcattgggaatggatgccattttatgtttgaaaattacacttcgtgaataatgatctgctttgggacgcgatatcaat

SEQ ID NO: 102620 - DNA, 1376 bp, Zea Mays
cagtaattcctccgggcactggtctccgcctaggtcccaggaggccaggaccgcctccggccctccgcgactccgtcggtccaccgggactggcttgccgctgccaggggctccatcgcccagtaccggctccggtacacaagcggaaggcggccgagtaccaagacgcagcagcagcgcgaggcgcctggtctccacctcctctgggatcaccacccaagaaaagggtgcgcggcgcataggcgaccactgagattttattctctatataacatttggcttgcaaatatctcaatgtcaagtgtttcaaattctattgctgtgggtcttccaagctatgggctatatctagagacaaggtttctcacgcagacctataggaacttcgcacagaaatcctcttacaagtattccagaatccgtgcagtgcagggaaatggtgggcgtcgaaggctggttgacataatccgaatcattccagaactctcaagggactattttaaaagtcgatcgaggcgagctctttttggtggcatctcgttgcttggcggcttttacgttgcacagacaatctcgctctctttcggtaccttgggtgtgaatgatgttatagcagcggttgtttgtgtcctgctgacagagtatgtgacaaagttctattacagtcggcctaaggttaccttccccattgctctcctcaacaatttcaagatgggtttcacatatggcctgtttattgatgccttcaagcttgctagctgagctgcactatgtcctgcttggctacttctttgcacgctcttgatcaccacaaacatgactatatatgacatacatcatttttgtattgttgtatgtgaagattgaatccagtttacatagccttttagtttacatggaattcatctctgctgtgcaattttgcaaacttgaggttaatccaagctaattctgaactgagcggcagtaaagttcctattgggttactgtctgttactgttgcctgccaaatttataaagtccttcagtaatatcagtgtgtcttgattgctagcagcaatgcgacaaacatggcagattccagtgatgctgtatcaaaatgtgtttgcctgtttggtctgtgcacagctttaggtggtttcttggcaccatgctgtattctgattattttgggtatttctcagaatctctaatagttggctgtgcgttgagaagaggcgacgatattattgtagcattattggaaatggatgtacactgaggcattgggaatggatgccattttatgtttgaaaattacacttcgtgaataatgatctgctttgggacgcgatatcaatagtcatgttctttgtgtgctgattttccccctcaaa

SEQ ID NO: 102621 - DNA, 1317 bp, Zea Mays
ctccactacatatgcttccaataaaaatgttgtatacgacatagccaggagggcaaccacaaccagccatcctatttaaaagtttataagcatatggataatccctggcattgcaataactatgcacaagagaattaaacaaggaggggtttggattgcaaccctcgttcatcatcatgctgattatcctcttgcaccagccaagctgcttcttttttaaaaatccagcaagcagtgttctatatgtgaccacattagggatgcaagagttacaccgcatcctatgaaggaatgaaattgcctcatcaaaaagggaggcctccatcagtccactgatcatctgggtgcacaacactgtgtcaagtttgaaatcctcccgctctatcatgacaagtgcgtcagaccatcgcccctccttacatagcgcctgtgcaaagcacccaactgtgaacttatccgtgcagaaccccaactctgacatctctttctgcacacgaaaacccatgtccatctgtccggcggttgcaagcacctggaccagagcattgtaggtcgcacctgacggcctgtacccaaaatccttcagtctcccgagctcctccagcgccttggcccaagctccgtggcggcagcatttccgtactatcacattgagcaatctgccgagtacctcacgatcatcctccccaatctccctcagcagcctctcggtggtcctagcacgatcgtcaaaatgcaatacttccgccagcgcgttgtagcaggcgccggtgtggctgtagcccacctgccgctcggcccaaaggaagaacctgacacagagctccggggtgcgcaccgacctgagcaccgcaactaccacggcgtcgttcaggaagtcccggtgccgccgcaggaaccgctccgccttcccgtcaaagtcggaggcgtaggctcggatcgccttggatataagaacagcctccggcggcgggagggccgcggcgtggaggacaggggtgggcacctgaagaaaggcgaagtccttggatgagaggcggggtccgcgctgcggctcaggggcttctaagaggccaagcagttggtcgtcagggtcggcggcgcgggaggaggaagagcaggcacgccgcacagaggcgcgtagggctgccgtggccgccgcgcggcggctaatcatggggtggaggtggtccaataaagggatacggaggtggaggtggaaagaagggacgaggaggcggcgggaattgaagccccggccatggaggttttggggcgccggaggtgggcataacggcctaaaccctagtgaaggag

SEQ ID NO: 102622 - DNA, 2817 bp, Zea Mays
cgtggctcaacgcggttttgtgtctctcaaacaacatggctagggtaggcgaagggcagggccaaggaagccgccgtagtcatggacaaattctttgcctcggatgaaatttgacaaataagagaccatggagagacttgaggtggacggggatttcattgccgctggcaattggaagctacatggggcactatgcaatgaactttacacagtagtccgtgaagttttggatgccattcctccttttgagactacacggtcaggatgcagtcctgggctcctggcattgagttccttgaggatatctgttgagaaagccaagaatttactccagtattgctcagagagtagcaagctttacttggctgttacagcagaaagcgttctaacaaaatttgagaattcaagacaaggacttctggaaagccttcaccaagtagaagaaacaattccggaagcagtcggttctaagatcactatgattgcacaagagctggaaaaggctggttttgtcttggaccagtccgaaaagcaagttggtgatgaagtgagtgaactaatccagaacgagccaaaatccaatggattccttgatgagaatgagcttgaatttctccaccaaattgctttccgggttggtattacatcatccgtggcagctctcactgaaagaagagcacttaggaggcttcttgagagagcccatgcagaggaggacttgaaaaaggaatcaattgcagcctatctactgcaccttattaggaaatactcgaatatatttaagagtgaaacaaacgatagtaccaactccctgtgctcaagcccttcctgctcctccagtaaactgtccagctcaactgatctccatggaaactgtcagatcctcgagaagcggctcccaagtgttggctccttaagtccgaagcagattggagggttatcagggacagggagtatgcccttgccacctgaggagctgaggtgtccaatctccctgcagctcatgtatgaccctgttgtcattgcatccggtcagacatatgaacgagcttgcatcgagaagtggttccacagtggcaacacaacctgcccgaaaactcgcaagcagctgtcccagctcttgagaacacctaattactgcattaagggtctgatagcatcttggtgcgaacagaacggggttccagttccagctgggccgccagaatctcccaagctagaacatctgagcatctcatcgctggaaagcaccacatgtgcggcgactgatggcgctaacactaacactgtcttgtttgaagacacaacagccaaggatgacgccaagtcggagagtgaagtttccaaggagatgttctctcgtcaaaactccggagaggccacgtccaaactacgtatacacgaagaagtctcaccggagaactgctctgctcttcagagctccaaggaggctgcacctgacgcatgtggggttgaagactccgtggacgtggagaagggcaagggctctcaccaagactccaaagacgatgtacctgtcagtgagagatgtgaacagtggctccatgtgctgaacaagaacgatgctgagagcatgagtgagaaacataagttggttgagcagatcaggatcctgttgaagaacgacgacgaacttcggaactatgcaggtgctaatggtattactgagccactaatccattttctgaagatggctatccacagaggaggtgtgcaatctcaggaggttgctacaatggctctgttcaatcttgctgtcaacaatgacgggaacaagagactgctcctgtcagctggagtcatcccgctgatggaacagatgatacagaaacatgaaacctgcgaggctgccatcgcaatgtacctgaacctctcctgcatccccgaggcacaggcgatcatcggctcgagcgtcgccatccatttcctcgtcaacagcctaggggaaggtggcccccggagcgacacctgccgcatggacgcgctgctcaccctgtacaacctgtccctgcacgcgcccaacatcccacccctcatggcgtccggcatcatcgagaacctccgccgcgtgctggtgccgtcctccccgtggacggacaaggccctagcggtcctgctgaacctggcgctgacccggagaggcaaggaggagatcgcggccagcgcggccatggtgggcgccatcgtgctcatcgtggacaacggcgagccgggggagaaggagaaggccgtgtcgtgcctgtatgtgatctgcagtggcgacgagggcagcagccagacagtgctccaggagggcgtgatcccggcgctggtgtccgtgacggccaacggcacggccagggcccgggacaaggcgcagcggctgctgaggctgttccgggagcagcggcagcgggagctggagctggaggagatgcagccgcgggtggagctgcacgaggtggcgagccgggcggccgtgcagcagcagcgggaggaggaagaggaagagatggcgctggccgtgttgccggccgccgcgcccagtaagccgagcggcggcggcaaaaagccacgactgtgcaggtcagggtccaggaggttcaccaaggtcttcacgtgcctgctcaagaagtggagtctgcgttgaaccgagaaggatcgggcagtcgaccggtgcaactgagctgtgctcaaactgtagagctgtaattatccgtctttgacaagcgcgttgcgttcgcagtgattaatgatggtttcttgaaatgagcatgagcaaacgaaagcaaaacgaccaatttccttcgaattagg

SEQ ID NO: 102623 - DNA, 1944 bp, Zea Mays
aaacgatcgcaacacaatcgaaagaacgacgtgggatagcgagcgataaaagccagagcaagagcaagagcaagagaggagcgatcgatcgagaggagaagacgaaagagtcggattgccatggacgacggcaccgtgatcatcctcttcttcttcttggccttcttcatgttcaccttcgccgcgtccctcttcttgtggttcacgatatggtggccctggctctgccgcgttatcaccctgacgcggaacctgctgagtaacctctttaccctgtgccaagccagcatggaggccgacgagtagatccgcacgctctcctgccgccacgtcaagtgcgatgtcatcgacgaatggcttcgcactggacggatgacgtgctaccgtggaagcggttgccgcggacgtcgtcgacgcgggatttgaaggaggcgcggctagttgctttccggcgcacaacgacaaactacctgtagcgtcgtttctttttatgcatctatcatttcgtcatttcttttccggcatccttggaactggtcgagggtgggtagtgcgtctttctgatagtcaggaactcaggatctgttcttcacgtactccttagttgtttccgtttttgctgcgttggaactgatcgacattagctacattcctgttcttttgttcagacttcagagttgagttcaccttaaaatgtttgaatgcctagaaacgatgacttgttagttcttgcatcagctataatgttccgacagaagctaatagatccttggttttgatttctctcatactctgtttaattctttagaaccttaatgtgagaatggtctcagtatgaactgttagtgcttggcatcagttacttcatctgctttcatgatcgagagccaaaaccttgtaggtttggtatctgaacatatggttcgtagttcgctgcttgtttgctttatatcgcgttttttcgttcttgctattgccggtattgtacatctacgaatatatgataactgaaaatcattatagtgcatagccctctactcttcagttttttccctgtatatggaacacctgatcaatttgagatataagttgaacctgtatcaggacgatatgagcaggttttgatttaaacctgaatccgcttgtgatatattgcgtatgatgccattattgttttttttcagttgccattatttttttttcagtttcttatgcaggaatagtaccagcaagctttactgaaaatcttagttctgtcaaacctgaattacttaacagctctctgtgcttgtctatctgttcctccacattttttccgtcagttgatgaagtttgtcatgtactattagtattaggcataatcagttcgtttcgtcggaaacttggaacgcaataattttcagccacagaagtaaaggaattttgattaattgtagatacttaagaacggattggcacaaaaggcagttgaactgaagacacgattaacaatttttagaaaatcttgcagtacgctttgcttgtttggattatttgttttcttgcgttccagcattcaggtgaatatcgtaagtgcagcttgttgggatcgcccagtttagcccggcgacggagacgaagcagaaggactgaagaacacacacacaacaaagactgaaaacaagttttgcactacaaaacatgcagagagtagaacgccgctggagggaacgagcgatcgtggcatagactcaatgtgggtctatgcctaatgaatctcagcacagctgcacttatacgatagctgaaggtgtaatgtaatttgtttgtagaaattgttttcagtgtttttgttgtccaaattgatgtatggtactcatgggaggcatgggagcacgttaaattagtggagactagtaggaaaaggatcacttcaaaggaaaacattatggagttgtttgggtc

SEQ ID NO: 102624 - DNA, 106 bp, Zea Mays
catataaataagatacaatatatttttaaccttcatgtatgcatatttttaacatacttttaccatttaaacaccatatattattataggtctgttagacccgtcg

SEQ ID NO: 102625 - DNA, 110 bp, Zea Mays
ataatccacctaataatctatgttgtttgtttacctctcaacttatttaaactagattatataatctcgagggtacaaacagggcctgaaatatcaagccaggctgaacc

SEQ ID NO: 102626 - DNA, 115 bp, Zea Mays
ctcgaaacacgcaggagagctgcgtgtaatttatattaagaaagagaaaggtctgagaacagaccggggtacagacaactccttacggaggtcgaaaacacaaatacagaaacac

SEQ ID NO: 102627 - DNA, 94 bp, Zea Mays
acaaataactcaaaggagaggccagatgtttggattgagagccctgataagtcagtcataatatctgtaacaagtgacattcgtacaatcaagt

SEQ ID NO: 102628 - DNA, 774 bp, Zea Mays
aagcagttgtagacatagtgcattcaagtaatggtacaatacaaagggtggcaaatgataaaagcctgaagaatgatgacacaaaatgctcaagagtattccttatcttacttagattttgtcaacattccatcatcatgtaatctcgaatattttcataaactggttatgtaaaatggggggtctttctccatgaatctcaatgactttgttgcgcactccatagctgcggagaagaaaggtatttacctttgtttttaggagtttctttttctttgataatgggatattgaatacatatagtttgaattatatgtgcttgttaatttttctaggtatcaaataacaggcaactttacgatagggaaggatcatccactatgagtgaatgttagactttgtaaggaaaacgtcttcatttgcatcctaggaagttgaatgatcattctcttttttggcactactgaaggtgatgttgtccacccaactgagtgtatgtaccagctacttgagcaagttcggcatcgcaaagtgaatatcatttgcaatgattgtactgccatggtgactacattggttcttgaggttgaggatttgtctgcacaacaagtgtatgagaagctcctagaagttgtacaaccttaggcactcgagcggtggagcaatgtggtatgctgagggcataggaggtttgtcgagatgaggtcgaaacatggcccaaatgtaactagaccaaagcatttgacaatttgggcagtatccactatccggtcc

SEQ ID NO: 102629 - DNA, 605 bp, Zea Mays
gtattcctggaggagaacgagttctacgtcaagtacctggagccgcggcaccccgggatggaggcgtacgacgtgtcctacaccacgaaggtgcgcgacttccgggacctgctggaggcggcgggagcagcgagggccaaggagtgtcggcccgtgcagaacctgctcttctccgagtgccgcctcgccatcaatgacctgcccaacgacctctacgacgtggcctgggacgtggtcctcatcgacgggccgtccggctggaaccccaactcacccggccggatgccgtccatctttaccaccgccgtgctggcgcgctccggcgccaccgcggccaagggccccaccgacgtgctcgtgcacgacttccagttcgaggtggagcaggtgctgagcagggagttcctgtgcgacgagaaccgggtcaccggcagcggcaccccgtcgctcggccacttcgtcatccgcgggggcagggccggggccggcgatgccttctgctctgcccaggaggacggctcgtcgggggagaagacgtgccgccgccgcagccacaagtaaattttacttgtccgctgtccgtctatcttgccacggagacgggc

SEQ ID NO: 102630 - DNA, 2208 bp, Zea Mays
gtattcctggaggagaacgagttctacgtcaagtacctggagccgcggcaccccgggatggaggcgtacgacgtgtcctacaccacgaaggtgcgcgacttccgggacctgctggaggcggcgggagcagcgagggccaaggagtgtcggcccgtgcagaacctgctcttctccgagtgccgcctcgccatcaatgacctgcccaacgacctctacgacgtggcctgggacgtggtcctcatcgacgggccgtccggctggaaccccaactcacccggccggatgccgtccatctttaccaccgccgtgctggcgcgctccggcgccaccgcggccaagggccccaccgacgtgctcgtgcacgacttccagttcgaggtggagcaggtgctgagcagggagttcctgtgcgacgagaaccgggtcaccggcagcggcaccccgtcgctcggccacttcgtcatccgcgggggcagggccggggccggcgatgccttctgctctgcccaggaggacggctcgtcgggggagaagacgtgccgccgccgcagccacaagtaaattttacttgtccgctgtccgtctatcttgccacggagacgggcagacggcattagccgccagcgacctctcccttcttcgtggcgaatggcccagtctccgatgggtacatggatgctcgctgctccattccgggcgttcgcgctttggatgcgccatgccggagcgcacgtgtgccatgctggatccggtggccacggtggggaaggggggaagggcgtggtctccggtgtgcgccaagccggatccggtggggaagggcgcaatctcagtgttccacctccgcaagggtgccaagtgcaggagcaacatcgacgactggctccgcgagaaccgcatgcgctgccccgcctgctacaagcctgtccactctgtgctgccgtgcaaagcgctgacgacatcggcgccactgcccgcgccagtgccactgccaacgcactcgcagttgtcgacgtcttttttgattccaggacgcgctacagtttgggtctccgtcgtaactaataaagacgcatgatcgagcttggatgggatgggacagtgttggagcgtcttttgggcccgtatggatcagttcttcgaaagattctttaaggatccattagtcgtttctttctatgtcttcttggaactgatcgaaggagtccttcgttacttctgttttttgttttctcggaactgatcaaacttatagcccctatggcgttgtctactaggttgtgcgtcgcagtatccctggtatgacgtcgcgtcttgtccgttcgtcaatgggtttttgtagctattctgatatagacgtagtggtgcttagtaggtctggtcgagtcagctcgaggtgaggtttagggatgtcttcagtacaacttcatcttccgtcatccccttagcgtcacctttaataatgcgtaggcgtatgcttggtacagcgtattgccctgtccctttcggcgtatgggttattgtagagactccggtgctgaggtccctgtgggtggggttgtccggtcccactagtcatggtgatacatatctggcgtcgtgcctgatagagacccttcgataccgcttccatggtctaggcatggctcgatgatggtttgccccatcgtgccgacatggcttgatactgatagtactaggtcggctctgcccttcagtagaggagttcgcttgagagccgactctcgtcttgctgggttgttcagcgcgcaagttggtcggcagccccgcttcaccatgttgctcggcaagtaggctggttggcagccccgcctcaccgggttgctcggcaggcaggctggtcggtagcctcgcctcgctgggttgttcggcaggcacactggtcaacaaccctgcctcactgggttgctcggcaggcaggctagtcggcagcccggtcggtcagttagtgggccgttattgggaggcatttgggccttctttgggtacccggttctaagatatccaacatatatacttcttaggcctcgtttggtttgagggactaaagattagtttctctattttagcttaatttagtcactaaattgacaaacggtatcacaaaatagagactaaattattttggtctctagtccctcaagggatgactaaaaagggaataaaccatattaatttcaccttttg

SEQ ID NO: 102631 - DNA, 360 bp, Zea Mays
atgccggagcgcacgtgtgccatgctggatccggtggccacggtggggaaggggggaagggcgtggtctccggtgtgcgccaagccggatccggtggggaagggcgcaatctcagtgttccacctccgcaagggtgccaagtgcaggagcaacatcgacgactggctccgcgagaaccgcatgcgctgccccgcctgctacaagcctgtccactctgtgctgccgtgcaaagcgctgacgacatcggcgccactgcccgcgccagtgccactgccaacgcactcgcagttgtcgacgtcttttttgattccaggacgcgctacagtttgggtctccgtcgtaactaataaagacgcatga

SEQ ID NO: 102632 - DNA, 1208 bp, Zea Mays
atgtgcacggaaaggcatctattgcctttctcccaacccgccaaaccctacttgccaccgccaaacttccgccttcgtccgcgccggcgccgctctatcgctctaaaataacctttccagttccaccgggactagctgaaaggagagggaacggagggggatggcgtcgccggacgacgagataagccggctcttccgcatccgccgcacggtgtatgagatgctgcgcgaccgcggatacggtgtccgcgacgaacaaatcaagctcgaaaggcacaagttcatcgaacgctacggcaaccccgtccgccgtgacgagctcaccttcaacgccacaaagttgaacggcccatcggaccagatctacgtgttctttcctaatgaggcaaagcccggggtgaagacaatcaggaactacgtcgagaagatgaagaacgagaacgtcttcgccggcatactcgtcgtgcagcaggcgctcagcgccttcgcacgcagcgccgttcaggaggtctcccagaagtaccacctcgaggaagctgagcttcttgtcaacattaaggaccatgtcctagtgccagagcatgtgctcctgacaccggaagacaagaagactcttctagagcggtacaccgtgaaggaaacccagctgccccggattcagattacagacccgatagcaagatactatgggatgaagcgtgggcaggtcgtgaagatcacaagagccagtgagactgctggaagatacatcacctaccgctacgttgtctgagttttgctacattctcatggcttaagcttccgcaccaagcgaaaatgacctctacttgctaatcctgctgtgtactcggaatatctgttgccctggtgcccttccttgagaactgatctcgggctgttctggcgatagtaataggccgctgttccttaagctgtgttccatctcattttaggccctgttcggttgcagataggtgtgatattggggggtgatattggatcgtgatccaaatgtttcttcacaaattattagggtcataaattatttttagttaaaaaatgaataggaatagggtctgatcctaatccgatctttatgttttatagtttaaaatttagagtctattattacctattattacctctagttgtacagttatagaatattggaggggttaggtggggattaaatccctttctgtttaaaa

SEQ ID NO: 102633 - DNA, 1928 bp, Zea Mays
atgtgcacggaaaggcatctattgcctttctcccaacccgccaaaccctacttgccaccgccaaacttccgccttcgtccgcgccggcgccgctctatcgctctaaaataacctttccagttccaccgggactagctgaaaggagagggaacggagggggatggcgtcgccggacgacgagataagccggctcttccgcatccgccgcacggtgtatgagatgctgcgcgaccgcggatacggtgtccgcgacgaacaaatcaagctcgaaaggcacaagttcatcgaacgctacggcaaccccgtccgccgtgacgagctcaccttcaacgccacaaagttgaacggcccatcggaccagatctacgtgttctttcctaatgaggcaaagcccggggtgaagacaatcaggaactacgtcgagaagatgaagaacgagaacgtcttcgccggcatactcgtcgtgcagcaggcgctcagcgccttcgcacgcagcgccgttcaggaggtctcccagaagtaccacctcgaggtcttccaggaagctgagcttcttgtcaacattaaggaccatgtcctagtgccagagcatgtgctcctgacaccggaagacaagaagactcttctagagcggtacaccgtgaaggaaacccagctgccccggattcagattacagacccgatagcaagatactatgggatgaagcgtgggcaggtcgtgaagatcacaagagccagtgagactgctggaagatacatcacctaccgctacgttgtctgagttttgctacattctcatggcttaagcttccgcaccaagcgaaaatgacctctacttgctaatcctgctgtgtactcggaatatctgttgccctggtgcccttccttgagaactgatctcgggctgttctggcgatagtaataggccgctgttccttaagctgtgttccatctcattttaggccctgttcggttgcagataggtgtgatattggggggtgatattggatcgtgatccaaatgtttcttcacaaattattagggtcataaattatttttagttaaaaaatgaataggaatagggtctgatcctaatccgatctttatgttttatagtttaaaatttagagtctattattacctattattacctctagttgtacagttatagaatattggaggggttaggtggggattaaatccctttctgtttaaaattgaatatggagatactcctctaaccgaataagctctagtgaatgattgtgctgttttttaaagacatgccctacatgtactaggagtgtgcataccactctagtcataccattccaatccttctcaatgtgaaccccatggacttttatttggttgtccattttaaaacccattaattcagcacaaaccaaaatttcatcaaccttaacattttcactgctccaacgagggcacacaaccaaagccatttctagggctaaaataggatggatattagttgatcctatgtcttactctaatgtattttagttggatatatgatctaatatgaatagtttgaaataggacggatacagatacagtggcatgatatttattcgggcggataagtgacatacggatgttatttggtcggatatcagatagttgttggatatttgttcgggcagataagtgacatatacagatgttatttggtcggatatcagatagttgttggatatttgttcgggcagataagtgacatatacagatgttatttggtcggatatcgaatagttgttggataatacatgaattgcttatcattcattatattttatttcttatatagccttaagcccctacatgaaaatgataaagttaagtattgattatgttggaactcggataaatagagtgatttaacgtgtaactcatacaataagtga

SEQ ID NO: 102634 - DNA, 1077 bp, Zea Mays
gcacggaaaggcatctattgcctttctcccaacccgccaaaccctacttgccaccgccaaacttccgccttcgtccgcgccggcgccgctctatcgctctaaaataacctttccagttccaccgggactagctgaaaggagagggaacggagggggatggcgtcgccggacgacgagataagccggctcttccgcatccgccgcacggtgtatgagatgctgcgcgaccgcggatacggtgtccgcgacgaacaaatcaagctcgaaaggcacaagttcatcgaacgctacggcaaccccgtccgccgtgacgagctcaccttcaacgccacaaagttgaacggcccatcggaccagatctacgtgttctttcctaatgaggcaaagcccggggtgaagacaatcaggaactacgtcgagaagatgaagaacgagaacgtcttcgccggcatactcgtcgtgcagcaggcgctcagcgccttcgcacgcagcgccgttcaggaggtctcccagaagtaccacctcgaggtcttccaggaagctgagcttcttgtcaacattaaggaccatgtcctagtgccagagcatgtgctcctgacaccggaagacaagaagactcttctagagcggtacaccgtgaaggaaacccagctgccccggattcagattacagacccgatagcaagatactatgggatgaagcgtgggcaggtcgtgaagatcacaagagccagtgagactgctggaagatacatcacctaccgctacgttgtctgagttttgctacattctcatggcttaagcttccgcaccaagcgaaaatgacctctacttgctaatcctgctgtgtactcggaatatctgttgccctggtgcccttccttgagaactgatctcgggctgttctggcgatagtaataggccgctgttccttaagctgtgttccatctcattttaggccctgttcggttgcagataggtgtgatattggggggtgatattggatcgtgatccaaatgtttcttcacaaattattagggtcataaattatttttagttaaaaaatgaataggaata

SEQ ID NO: 102635 - DNA, 1025 bp, Zea Mays
acggaaaggcatctattgcctttctcccaacccgccaaaccctacttgccaccgccaaacttccgccttcgtccgcgccggcgccgctctatcgctctaaaataacctttccagttccaccgggactagctgaaaggagagggaacggagggggatggcgtcgccggacgacgagataagccggctcttccgcatccgccgcacggtgtatgagatgctgcgcgaccgcggatacggtgtccgcgacgaacaaatcaagctcgaaaggcacaagttcatcgaacgctacggcaaccccgtccgccgtgacgagctcaccttcaacgccacaaagttgaacggcccatcggaccaggaactacgtcgagaagatgaagaacgagaacgtcttcgccggcatactcgtcgtgcagcaggcgctcagcgccttcgcacgcagcgccgttcaggaggtctcccagaagtaccacctcgaggtcttccaggaagctgagcttcttgtcaacattaaggaccatgtcctagtgccagagcatgtgctcctgacaccggaagacaagaagactcttctagagcggtacaccgtgaaggaaacccagctgccccggattcagattacagacccgatagcaagatactatgggatgaagcgtgggcaggtcgtgaagatcacaagagccagtgagactgctggaagatacatcacctaccgctacgttgtctgagttttgctacattctcatggcttaagcttccgcaccaagcgaaaatgacctctacttgctaatcctgctgtgtactcggaatatctgttgccctggtgcccttccttgagaactgatctcgggctgttctggcgatagtaataggccgctgttccttaagctgtgttccatctcattttaggccctgttcggttgcagataggtgtgatattggggggtgatattggatcgtgatccaaatgtttcttcacaaattattagggtcataaattatttttagttaaaaaatgaataggaata

SEQ ID NO: 102636 - DNA, 2120 bp, Zea Mays
cgacgaaaaacacgcgcacttcgagttgtacaggagctgcactgcacgctcctcaaattcccacgccgcatcgccacccagtgccctgctcaccgccgaacggtttcaatggccgcaagcacagcggcgccatgctacgacgcgcccgagggcgtggacgtccgcgggcggtacgaccgggagttcgcgggcatcctcacccgcgacgcgctggacttcgtggccggcctgcagcgcgagttccgcgccgccgtccgctacgccatggagcagcggcgggaggcccagcgccggtacgacgccggcgagctgccgcggttcgacccggccacgacgctcgtgcgcgagggggactggacgtgcgcgcccgtgccgccggccgtcgcggaccgcaccgtggagatcacgggccccgccgagccgcggaagatggtcatcaacgcgctcaactccggcgccaaggtcttcatggctgacttcgaggacgcgctgtcgccgacgtgggagaacctgatgcacgggcaggtgaacctgcgggacgccgtggctggcaccatcagcttccgcgacgcggcgcgcgggcggacgtacgagctcaacgaccgaaccgccaagctcttcgtccggccccgcggctggcacctccccgaggcgcacatcctcatcgacggcgagccggccattggctgcctcgtcgacttcggcctctacttcttccacaaccacgctgccttccgcgcaggccagggcgccggcttcgggccgttcttttacctgcccaagatggagcactccagggaagcgaggatatggaacggggtgttccagagagcggagaaagctgctgggatcgagctcgggagcatccgggcaacggtgctggtggagacgttgccagcggtgttccaaatgaacgagatcctgcacgagctgcgcgagcactcggcggggctcaactgcggccgctgggactacatcttcagctacgtcaagacgttccgcgcccacccggaccgcctcctccccgaccgcgccctcgtcggcatggcccagcacttcatgcgctcctactcccacctcctcatccacacctgccaccgtcgcggagtccacgccatgggcggcatggcggctcagatcccgatcaaggacgatgcggcggcgaacgaggcggcactggagctggtgcgcaaggacaagctgagggaggtgcgcgcgggccacgacggcacgtgggcggcgcacccggggctcatcccggcgatacgggaggtcttcgagggccacctcggcgggaggccgaaccagatcggcgacgccgcagggcacgagggtgccagcgtcaacgaggaggacctcatccagccgccgcggggcgcgcgcactgtggacggtctgcggctcaacgtccgcgtgggcgtgcagtacctcgcggcgtggctggccggctccggctccgtcccgctgtacaacctgatggaggacgcggctacggcggagatcagccgcgtccagaactggcagtggctgcgccacggagcggcgctggacgccggcggtgtggaggtgcgcgcgacgccagagctactcgcacgcgtcgtcgaggaggagatggcgagggtcgaggcagaggtcggccccgacaggttccgaaaggggcggtacgcggaggcgggcaggatcttcagccggcagtgcaccgcgccggagctggacgacttcctcacgctggacgcgtacaacctcatcgtggcgcaccatccaggtgcgtcaccgtgcaagctctgaatacatgcatgccttttgtggcagtggagtcagctttcaaaaataacacatcgctgtccaatgcagccatcgaaataaggacggatgaccaacaaacatgatagacatgaacagccttgtaaagcgcactgcatattctctgctctgggacttttagtcgtgcttatgatagtacagggtggtctatgtaataaactgagcttctgttgaactctcgggaaggacaactgcacaaccctgtatgagtgtaccgagactatcttttcaccctcagaactaccgctctacaacgtgtatctttctaattttataaatcaaacttatttaacttt

SEQ ID NO: 102637 - DNA, 2031 bp, Zea Mays
cgacgaaaaacacgcgcacttcgagttgtacaggagctgcactgcacgctcctcaaattcccacgccgcatcgccacccagtgccctgctcaccgccgaacggtttcaatggccgcaagcacagcggcgccatgctacgacgcgcccgagggcgtggacgtccgcgggcggtacgaccgggagttcgcgggcatcctcacccgcgacgcgctggacttcgtggccggcctgcagcgcgagttccgcgccgccgtccgctacgccatggagcagcggcgggaggcccagcgccggtacgacgccggcgagctgccgcggttcgacccggccacgacgctcgtgcgcgagggggactggacgtgcgcgcccgtgccgccggccgtcgcggaccgcaccgtggagatcacgggccccgccgagccgcggaagatggtcatcaacgcgctcaactccggcgccaaggtcttcatggctgacttcgaggacgcgctgtcgccgacgtgggagaacctgatgcacgggcaggtgaacctgcgggacgccgtggctggcaccatcagcttccgcgacgcggcgcgcgggcggacgtacgagctcaacgaccgaaccgccaagctcttcgtccggccccgcggctggcacctccccgaggcgcacatcctcatcgacggcgagccggccattggctgcctcgtcgacttcggcctctacttcttccacaaccacgctgccttccgcgcaggccagggcgccggcttcgggccgttcttttacctgcccaagatggagcactccagggaagcgaggatatggaacggggtgttccagagagcggagaaagctgctgggatcgagctcgggagcatccgggcaacggtgctggtggagacgttgccagcggtgttccaaatgaacgagatcctgcacgagctgcgcgagcactcggcggggctcaactgcggccgctgggactacatcttcagctacgtcaagacgttccgcgcccacccggaccgcctcctccccgaccgcgccctcgtcggcatggcccagcacttcatgcgctcctactcccacctcctcatccacacctgccaccgtcgcggagtccacgccatgggcggcatggcggctcagatcccgatcaaggacgatgcggcggcgaacgaggcggcactggagctggtgcgcaaggacaagctgagggaggtgcgcgcgggccacgacggcacgtgggcggcgcacccggggctcatcccggcgatacgggaggtcttcgagggccacctcggcgggaggccgaaccagatcggcgacgccgcagggcacgagggtgccagcgtcaacgaggaggacctcatccagccgccgcggggcgcgcgcactgtggacggtctgcggctcaacgtccgcgtgggcgtgcagtacctcgcggcgtggctggccggctccggctccgtcccgctgtacaacctgatggaggacgcggctacggcggagatcagccgcgtccagaactggcagtggctgcgccacggagcggcgctggacgccggcggtgtggaggtgcgcgcgacgccagagctactcgcacgcgtcgtcgaggaggagatggcgagggtcgaggcagaggtcggccccgacaggttccgaaaggggcggtacgcggaggcgggcaggatcttcagccggcagtgcaccgcgccggagctggacgacttcctcacgctggacgcgtacaacctcatcgtggcgcaccatccagccatcgaaataaggacggatgaccaacaaacatgatagacatgaacagccttgtaaagcgcactgcatattctctgctctgggacttttagtcgtgcttatgatagtacagggtggtctatgtaataaactgagcttctgttgaactctcgggaaggacaactgcacaaccctgtatgagtgtaccgagactatcttttcaccctcagaactaccgctctacaacgtgtatctttctaattttataaatcaaacttatttaacttt

SEQ ID NO: 102638 - DNA, 2243 bp, Zea Mays
cgacgaaaaacacgcgcacttcgagttgtacaggagctgcactgcacgctcctcaaattcccacgccgcatcgccacccagtgccctgctcaccgccgaacggtttcaatggccgcaagcacagcggcgccatgctacgacgcgcccgagggcgtggacgtccgcgggcggtacgaccgggagttcgcgggcatcctcacccgcgacgcgctggacttcgtggccggcctgcagcgcgagttccgcgccgccgtccgctacgccatggagcagcggcgggaggcccagcgccggtacgacgccggcgagctgccgcggttcgacccggccacgacgctcgtgcgcgagggggactggacgtgcgcgcccgtgccgccggccgtcgcggaccgcaccgtggagatcacgggccccgccgagccgcggaagatggtcatcaacgcgctcaactccggcgccaaggtcttcatggtaagtaagcgcgcgcgcaaacgtggctgccgtattctctctctctctctctctctctctctctctctctctctttttcccgttctgagctgagaccgcgagagagagaaaaacgtggcaggctgacttcgaggacgcgctgtcgccgacgtgggagaacctgatgcacgggcaggtgaacctgcgggacgccgtggctggcaccatcagcttccgcgacgcggcgcgcgggcggacgtacgagctcaacgaccgaaccgccaagctcttcgtccggccccgcggctggcacctccccgaggcgcacatcctcatcgacggcgagccggccattggctgcctcgtcgacttcggcctctacttcttccacaaccacgctgccttccgcgcaggccagggcgccggcttcgggccgttcttttacctgcccaagatggagcactccagggaagcgaggatatggaacggggtgttccagagagcggagaaagctgctgggatcgagctcgggagcatccgggcaacggtgctggtggagacgttgccagcggtgttccaaatgaacgagatcctgcacgagctgcgcgagcactcggcggggctcaactgcggccgctgggactacatcttcagctacgtcaagacgttccgcgcccacccggaccgcctcctccccgaccgcgccctcgtcggcatggcccagcacttcatgcgctcctactcccacctcctcatccacacctgccaccgtcgcggagtccacgccatgggcggcatggcggctcagatcccgatcaaggacgatgcggcggcgaacgaggcggcactggagctggtgcgcaaggacaagctgagggaggtgcgcgcgggccacgacggcacgtgggcggcgcacccggggctcatcccggcgatacgggaggtcttcgagggccacctcggcgggaggccgaaccagatcggcgacgccgcagggcacgagggtgccagcgtcaacgaggaggacctcatccagccgccgcggggcgcgcgcactgtggacggtctgcggctcaacgtccgcgtgggcgtgcagtacctcgcggcgtggctggccggctccggctccgtcccgctgtacaacctgatggaggacgcggctacggcggagatcagccgcgtccagaactggcagtggctgcgccacggagcggcgctggacgccggcggtgtggaggtgcgcgcgacgccagagctactcgcacgcgtcgtcgaggaggagatggcgagggtcgaggcagaggtcggccccgacaggttccgaaaggggcggtacgcggaggcgggcaggatcttcagccggcagtgcaccgcgccggagctggacgacttcctcacgctggacgcgtacaacctcatcgtggcgcaccatccaggtgcgtcaccgtgcaagctctgaatacatgcatgccttttgtggcagtggagtcagctttcaaaaataacacatcgctgtccaatgcagccatcgaaataaggacggatgaccaacaaacatgatagacatgaacagccttgtaaagcgcactgcatattctctgctctgggacttttagtcgtgcttatgatagtacagggtggtctatgtaataaactgagcttctgttgaactctcgggaaggacaactgcacaaccctgtatgagtgtaccgagactatcttttcaccctcagaactaccgctctacaacgtgtatctttctaattttataaatcaaacttatttaactttaa

SEQ ID NO: 102639 - DNA, 853 bp, Zea Mays
atgcgtggccccacacggccacacaaccgttgggcgcgccggtccttaaaatgcccccgcacctgtccaccgccgtgagcacacatccgtccagccgtccacccactcaccaggaccggtcaacgctacgatacctgtgcactgcgcagcccccgccgctgcactagccgttgcttctcccttccgttcgcgttcccattcccaaggagttgtcctcgccggcggatccggggcgccgtcgcaagacgaggaaggcggaggagaggataccagaatggcgtcgcgaacggcgtccaaggatatcatcgctctgcgaggctccgccgccatcgtcagcgagttcttcggctacgcggcgaacaggtacgctacatcctacagtgtcctgcaggctgcaggcggcggcagcggtgccaatccggcgaggaaggttcgggattttgtattgacttgactgattgatccggttccgtttggtttttggtggactgcagcatcctctacaaccgcgccgtgtacccgggggagagcttcgccaaggtgaagaagtacgggctcaccatgccgctcacgcaggacgagtgggttaacttcatcactagcgccacctccaagaactcagagtggctgggggcaggaaagctgcaggggatcgtgatggtcataatgagcaaggccaccagcgaggtgatcgagcgctggaacttcaacatcgacacctaccccgaggtcgtcgagaaggggtgcgccaccctaaccaatccatggtagccggtgctcattgtgtcagtcagtaatggcttgattgcgtcttcgtctgatgttcgtcaggtctatcaaggagaagagcgac

SEQ ID NO: 102640 - DNA, 1866 bp, Zea Mays
atgcgtggccccacacggccacacaaccgttgggcgcgccggtccttaaaatgcccccgcacctgtccaccgccgtgagcacacatccgtccagccgtccacccactcaccaggaccggtcaacgctacgatacctgtgcactgcgcagcccccgccgctgcactagccgttgcttctcccttccgttcgcgttcccattcccaaggagttgtcctcgccggcggatccggggcgccgtcgcaagacgaggaaggcggaggagaggataccagaatggcgtcgcgaacggcgtccaaggatatcatcgctctgcgaggctccgccgccatcgtcagcgagttcttcggctacgcggcgaacagcatcctctacaaccgcgccgtgtacccgggggagagcttcgccaaggtgaagaagtacgggctcaccatgccgctcacgcaggacgagtgggttaacttcatcactagcgccacctccaagaactcagagtggctgggggcaggaaagctgcaggggatcgtgatggtcataatgagcaaggccaccagcgaggtgatcgagcgctggaacttcaacatcgacacctaccccgaggtcgtcgagaaggggtctatcaaggagaagagcgacaaaaagatcatgagggagattcgggccatcaagcgccagatcgactcttgcatcaccgacctcccctgcctcgacgagccatgcgtgtttgatatgctggcctacacggacacggacgttgacgctccggacacctggatcgaaagcgacaccaagctcatccacaacacgcagatggttaagctgcactcgttcgacacgaaggtccacaaggtcgacacggtggtgtcgtacaagaagaatgaggacgacacctcttcgtcgtcaagctcagtaataagagaagcaagaatagagcttcttgaagctgaacttggaagatttgtgatgcttgctaatgagtcagctgaagagatgtatacaagattgaaaaaaatcatcaagaaaattagaagctatggaagtaagaaatggacagatcatgaagtggtgaaaataatgctaagggcttattttctaagaaactcggtattatgttttatgataagagatagtcctaattatgagaagatgacgccagaagtagtacttggtagatttatccgtcatgaaatgatggaaaatgaagggcttcttgaagctgaacttggaagatttgtgatgcttgctgatgagtcagctgaagagatgtacacaagattgaaaaaaatcatcaacaaacttagaagctatggaagtaagagatggacagatcatgaagtggtgaaaataatgctaagggcttattttctaagaaactcggtattatgttttttgataagacaaagtcctaactatgagaagatgacgccggaagtagtacttagcaaatttatcgatcatgaaacgttgttagaagaagccaaatatgttgatatcatgtccaaaagtgtcactgcatcaaagaatcaagacattgcactcaaggcaaacaagaagcaaaaggggaaatgtgtttttgaagaatcaacaagtgaagataatgaagatagttcaagtcttgatgaagaaaaaatagcactcatcaaaagcttcaaaaagataatgaagagccgcaactacaagagcaacaaaaagaatgacaaagaataaaagaaggaagaaaaaagagctatgtcaagaatagacatagtggtggagctcacattagaaagtaatgacacttgaatggtgagagtttcgactcctccaaaattgaagaacattggccttgtggcaaaatttggtacaaagaaagtaaaatttggtaggac

SEQ ID NO: 102641 - DNA, 2172 bp, Zea Mays
atgcgtggccccacacggccacacaaccgttgggcgcgccggtccttaaaatgcccccgcacctgtccaccgccgtgagcacacatccgtccagccgtccacccactcaccaggaccggtcaacgctacgatacctgtgcactgcgcagcccccgccgctgcactagccgttgcttctcccttccgttcgcgttcccattcccaaggagttgtcctcgccggcggatccggggcgccgtcgcaagacgaggaaggcggaggagaggataccagaatggcgtcgcgaacggcgtccaaggatatcatcgctctgcgaggctccgccgccatcgtcagcgagttcttcggctacgcggcgaacagcatcctctacaaccgcgccgtgtacccgggggagagcttcgccaaggtgaagaagtacgggctcaccatgccgctcacgcaggacgagtgggttaacttcatcactagcgccacctccaagaactcagagtggctgggggcaggaaagctgcaggggatcgtgatggtcataatgagcaaggccaccagcgaggtgatcgagcgctggaacttcaacatcgacacctaccccgaggtcgtcgagaaggggtctatcaaggagaagagcgacaaaaagatcatgagggagattcgggccatcaagcgccagatcgactcttgcatcaccgacctcccctgcctcgacgagccatgcgtgtttgatatgctggcctacacggacacggacgttgacgctccggacacctggatcgaaagcgacaccaagctcatccacaacacgcagatggttaagctgcactcgttcgacacgaagttcctgtgctggagtggcaggtccacaaggtcgacacggtggtgtcgtacaagaagaatgaggacgacacctcttcgtcgtcaagctcagtaataagagaagcaagaatagagcttcttgaagctgaacttggaagatttgtgatgcttgctaatgagtcagctgaagagatgtatacaagattgaaaaaaatcatcaagaaaattagaagctatggaagtaagaaatggacagatcatgaagtggtgaaaataatgctaagggcttattttctaagaaactcggtattatgttttatgataagagatagtcctaattatgagaagatgacgccagaagtagtacttggtagatttatccgtcatgaaatgatggaaaatgaagggcttcttgaagctgaacttggaagatttgtgatgcttgctgatgagtcagctgaagagatgtacacaagattgaaaaaaatcatcaacaaacttagaagctatggaagtaagagatggacagatcatgaagtggtgaaaataatgctaagggcttattttctaagaaactcggtattatgttttttgataagacaaagtcctaactatgagaagatgacgccggaagtagtacttagcaaatttatcgatcatgaaacgttgttagaagaagccaaatatgttgatatcatgtccaaaagtgtcactgcatcaaagaatcaagacattgcactcaaggcaaacaagaagcaaaaggggaaatgtgtttttgaagaatcaacaagtgaagataatgaagatagttcaagtcttgatgaagaaaaaatagcactcatcaaaagcttcaaaaagataatgaagagccgcaactacaagagcaacaaaaagaatgacaaagaataaaagaaggaagaaaaaagagctatgtcaagaatagacatagtggtggagctcacattagaaagtaatgacacttgaatggtgagagtttcgactcctccaaaattgaagaacattggccttgtggcaaaatttggtacaaagaaagtaaaatttggtaggacatatcaagttcctctcataaatatacatctagtactgattatgatgcctctagtagtagtagttctagtgatgatgatcagttaacatgtgtcttaccttaataaaaaatactatttctaaatttgaaaagatatgatggaattaaataatatatatgagcttgtggagacgcaagaagatttgcttattcaagaaaagaaaaagaatctaaaacttgaaaagctcttagctcaaaaaagaaaagcgcaatataaataaagagctccttagttcttatcattaatt

SEQ ID NO: 102642 - DNA, 2734 bp, Zea Mays
gccagccgctgcctcggcccccaccagagcagaggccgccacaccctcacgtcccttcccggcttccccacccctcctcctcctcctcctccgcttccctcgcgcggcgcggaacaagtccaaggggacggcaggaaggaagaggaggcttccagattcttgcggaactcccgcgccacccctctccacgccaccaccaccgccttctcctcatagccagccagcctcccgcgtagggtttccgcgcgccaccatctccactccaaccccagcacccacccgtcctaccgccgtcgcatttggacctctgcgtctgcctgcagccctgttcgccaatcgccaccgacaccccctcgtcgtaccggtttggggatttcgttttccctttctcactgttgccggttgtatcggggatctgggagggaagtgtttgtcttggtgctgattgtttctgacgatttgggcgtcattatccaggtcgagtggtgttggtgatgtcgggtgattagatttgggggtggattggtagaggggatactgattagctgttttggggcgcctggcttatctgctattggattgggatccatgatcgagactgctccgtgaagtttttggtcctagggattgtgttttttgatcggcccggaccaggaatagagggttctcttgagggaggagatctagggccgcgtgttctatcgttctctgtagataaaatcaaaaaaaaaggagagagagatagaggtagtggaagggagactggaggctatggctctgaattgctcatcacgctcgctctgggtggccgatgattgtgccagcatgatgcttggttgtgggtgctggtcggaggaggcctcccctctgtcatcccgcggggtgaattcgctgtggtgggatgacctggagctggaagaggaggagtcggatcctgtggatctcttacccacggacccctttgggatgaacctggagactacgttcacagctgcgattgccagttgcatcggggacctcacaggcatgtctggtgctgggcatttgggaagcggtgacgatgatggtttctatgccgacctgagttattacttgaatcaggcttttgtgctcactccggagccatggagtggtgcctataccagtgtttttgaggattcttttgtgtctggatgcctctcgggcgctggaggcatggaacagttttcacggttgcctcctagctcgttctgctcagagcctattggggtcacggatgacccatctagctcttgtgacacagctttgccatgctgtgatatggttgatgtagctcctgtccaggagggaaatgatgcacatgaagcaatggtgtttgtcttgagctatcttggcttacgtgacatcctctctattgagatggtgtgcaagtcattgcgttcagctgtccggaacgaaccctttttatggaagtgcatccacattgactcgcacttgggtgagaagatgtctgatgctgatcttctgtgcctgacacagaagtccccaggttctttgcagtgcctgagtcttatgtgctgtgtaaacatcacagatcagggattgaaagctgttttagagagtaatctgcagttaacaaagttgggcattttcggtgctttccggattactcatcaaggtcttgttgacagtctgaggtcatttagtatggaagcagatattggtatcaagaaactcagagttgcaaatcgtgtcactgcatcagaagtgcaatatgtagagctgttgtccttgatgaaaatagacaaggagatgccattacacaaacaggagcctcggatctttcatgctgatcgtcttttaccagatcttcatggtggatatgttcctgattctttcgtaccagatcttcatgatgagtatgctcttgatattgagaagtgtcctctttgtccgaactacaagcttgtttatgattgcacatcaaaggaatgcaagaccagcggatctagtatttgcagagggtgtgttgtttgcatctctagatgtttgcgatgtgggagatgtatcgacagtgagtttgaatttgaagagacattttttctggggagcatttgccatgactgtgtcaagtattcaccccaccacagaaaaatagatgtttgattctgttatccattggatggatacagttgtaacattggatttctgtgattgatgctcccatccatcagacatcttgactgagtatttctaacaaggaaaaaaagagaaaggtctaccagtttgctatcggtgtaggtgcagcagctgatatattgtttttgcttgcaagaaaaacgaaaaaaaaacagtataacccaggaaatcagaagatcaaagtatggtttccgtatcatggtgtcagcagtgaatggtgacaactgacaattgctgtagggatgtttccttctggaataatgggagtgctctgctcaggagtgttgaagtacaacatcatactttttttctttctctccagccggttgcttgatgctgcatgttcctggaacgtcagaagtaatttaattcattggcccaaaaataaaatcagatgtatctatctgtcccttacgttacctatctaattgcgtggctgtgtgctattacttgacaattgacaaatgtaatactagttactttctaggttatagacactttgtaccacgtgatttattagaataaaataaagacaaacctctaacccaactagatt

SEQ ID NO: 102643 - DNA, 2730 bp, Zea Mays
gccagccgctgcctcggcccccaccagagcagaggccgccacaccctcacgtcccttcccggcttccccacccctcctcctcctcctcctccgcttccctcgcgcggcgcggaacaagtccaaggggacggcaggaaggaagaggaggcttccagattcttgcggaactcccgcgccacccctctccacgccaccaccaccgccttctcctcatagccagccagcctcccgcgtagggtttccgcgcgccaccatctccactccaaccccagcacccacccgtcctaccgccgtcgcatttggacctctgcgtctgcctgcagccctgttcgccaatcgccaccgacaccccctcgtcgtaccggtttggggatttcgttttccctttctcactgttgccggttgtatcggggatctgggagggaagtgtttgtcttggtgctgattgtttctgacgatttgggcgtcattatccaggtcgagtggtgttggtgatgtcgggtgattagatttgggggtggattggtagaggggatactgattagctgttttggggcgcctggcttatctgctattggattgggatccatgatcgagactgctccgtgaagtttttggtcctagggattgtgttttttgatcggcccggaccaggaatagagggttctcttgagggaggagatctagggccgcgtgttctatcgttctctgtagataaaatcaaaaaaaaaggagagagagatagaggtagtggaagggagactggaggctatggctctgaattgctcatcacgctcgctctgggtggccgatgattgtgccagcatgatgcttggttgtgggtgctggtcggaggaggcctcccctctgtcatcccgcggggtgaattcgctgtggtgggatgacctggagctggaagaggaggagtcggatcctgtggatctcttacccacggacccctttgggatgaacctggagactacgttcacagctgcgattgccagttgcatcggggacctcacaggcatgtctggtgctgggcatttgggaagcggtgacgatgatggtttctatgccgacctgagttattacttgaatcaggcttttgtgctcactccggagccatggagtggtgcctataccagtgtttttgaggattcttttgtgtctggatgcctctcgggcgctggaggcatggaacagttttcacggttgcctcctagctcgttctgctcagagcctattggggtcacggatgacccatctagctcttgtgacacagctttgccatgctgtgatatggttgatgtagctcctgtccaggagggaaatgatgcacatgaagcaatggtgtttgtcttgagctatcttggcttacgtgacatcctctctattgagatggtgtgcaagtcattgcgttcagctgtccggaacgaaccctttttatggaagtgcatccacattgactcgcacttgggtgagaagatgtctgatgctgatcttctgtgcctgacacagaagtccccaggttctttgcagtgcctgagtcttatgtgctgtgtaaacatcacagatcagggattgaaagctgttttagagagtaatctgcagttaacaaagttgggcattttcggtgctttccggattactcatcaaggtcttgttgacagtctgaggtcatttagtatggaagcagatattggtatcaagaaactcagagttgcaaatcgtgtcactgcatcagaagtgcaatatgtagagctgttgtccttgatgaaaatagacaaggagatgccattacacaaacaggagcctcggatctttcatgctgatcgtcttttaccagatcttcatggtggatatgttcctgattctttcgtaccagatcttcatgatgagtatgctcttgatattgagaagtgtcctctttgtccgaactacaagcttgtttatgattgcacatcaaaggaatgcaagaccagcggatctagtatttgcagagggtgtgttgtttgcatctctagatgtttgcgatgtgggagatgtatcgacagtgagtttgaatttgaagagacattttttctggggagcatttgccatgactgtgtcaagtattcaccccaccacagaaaaatagatgtttgattctgttatccattggatggatacagttgtaacattggatttctgtgattgatgctcccatccatcagacatcttgactgagtatttctaacaaggaaaaaaagagaaaggtctaccagtttgctatcggtgtaggtgcagcagctgatatattgtttttgcttgcaagaaaaacgaaaaaaaaacagtataacccaggaaatcagaagatcaaagtatggtttccgtatcatggtgtcagcagtgaatggtgacaactgacaattgctggatgtttccttctggaataatgggagtgctctgctcaggagtgttgaagtacaacatcatactttttttctttctctccagccggttgcttgatgctgcatgttcctggaacgtcagaagtaatttaattcattggcccaaaaataaaatcagatgtatctatctgtcccttacgttacctatctaattgcgtggctgtgtgctattacttgacaattgacaaatgtaatactagttactttctaggttatagacactttgtaccacgtgatttattagaataaaataaagacaaacctctaacccaactagatt

SEQ ID NO: 102644 - DNA, 1989 bp, Zea Mays
cgaccggccgagagaaacaccgacccgaccgaactcaactcgttctcgacccgaagccccaaatccctctcagaaaacccttccctcccgatggcaaccgccgccaccgccatggtggtacccgagcagccgcgccgccggaagccggccccggggcgcgggggagtggccctccctgcgggtctctcggaggaggaggccagggtgcgggccatcgccgagattgtctcggcgatgggggagctctcgcggcgcggggaggacgtggacctcaacgcgctcaagtccgccgcgtgccggagatacggtctggcgcgagcgcccaagctggtggagatgatcgctgccgtgcccgaggccgaccgcgccgcgctgctgccgcggttgcgcgctaagcccgtgcgcacggcgtcgggtatcgccgtcgtcgccgtcatgtcgaagccgcaccgttgcccccacatcgctaccaccggtaacatctgtgtctactgcccgggcggtcccgactccgacttcgagtacagcacgcaatcctacactggatacgaacccaccagcatgcgtgccattcgggcaaggtataatccatatgtgcaagccaggagcaggatagatcagctcaagaggttagggcatagtgtggataaggtcgagttcatcttgatgggtgggactttcatgtccttaccagctgattatcgcgattattttatcagaaatcttcatgatgctttgtcggggcacacttcagcaaatgttgaggaggctatttgttattccgaacatagtgctgtcaaatgtattggtatgacgattgaaacgagacctgattattgcttggggcctcatctgcgccagatgctatcttatggttgtactcgcctggaaattggtgtccagagtacatatgaagatgttgcccgtgacacaaacagaggacacacggtggctgctgttgctgattgcttctgtttggcaaaagatgctgggtttaaggtggttgcccacatgatgccagatttacctaatgttggagttgaaagagacttagaaagtttcagagagttttttgaaagtccagcattccgggctgatggtctgaagatttatccaacacttgttattcgtggaactggtctttatgagctctggaaaactggcagatatagaaattatccacctgagctcttggtggatatcgtggcaagaattctgtctatggttccaccatggacacgagtgtatcgggtccagagagatattcctatgcctcttgtcacttctggtgttgagaaaggtaaccttcgtgagctagctttggctcgaatggatgatctgggcctaaaatgccgagatgtcagaacccgtgaagcagggattcaggatatccatcacaagatcaggcctgatgaagtagagcttgttagacgtgactatgctgcaaatgagggctgggagacgttcctctcttatgaggatacacgacaggatatcctgatcggcctgttgcgcttgcgtaaatgtggccgtaatgttacatgccctgaacttgtagggaggtgttcaattgttcgtgagcttcatgtctatggaactgcagtccctgtgcatggccgtgatgtagacaagctacagcaccaggggtatggaactctgttaatggaagaagcagaaaggattgctcaaaaggagcaccgttcagagaaattggctgtcatttcgggggttggtactcgccactactaccgcaaactgggttatgagctagaaggaccttatatggtcaaatgtttggcataataccgtttcattttttttcgtgctcatgtagaacagactagtgtttataatgtaacttgtgtagttttttcaaaaaaaaaaaatttgttatacccttcttttaatattgagtcgtccaaatgaaaatggagacagctcagcgtgtaatattaaatgatagcaaaattccaccctagccccaaaaaa

SEQ ID NO: 102645 - DNA, 237 bp, Zea Mays
atggaaagaggcttcttctgcttcttccccatcccctccctgcaggggacatgggctcgggtgttcagcttagtacagcagcaaggggatagaattcgcaaggcggcaggcatacctcgcgcgaatgctcttcgccggaaagcggccgacgaagacctgtgcaactggcgtaggtcggcggcggcgcgaggtgaacgggagaaggaaaacggcaaagaggtgcgagtgcaggactag

SEQ ID NO: 102646 - DNA, 189 bp, Zea Mays
gatggatggatgaatggatcatggttcatggatgagtgcttgtcgatgtagtgatgtctgaaatctagattgtttgtgctacatgttagtacctagttatcccttaattggggatggggacccattggggacccgaaacccgaatggggatgggtatgggatgagttttgtacccatgatgggtatggg

SEQ ID NO: 102647 - DNA, 2819 bp, Zea Mays
attatttttccactgctcgaaggcccggggcgcccaccggagccaatcagttccgttcacctttccaccggaatccaccccaccgccaccggtggatgatttgatggagttgccgttttgcggaccgtggtaactactctctcccaccaccaacaatcaagagtccgctctcctccaacctcctgccaacagcacgcctgcctctctctctctgtgtgtgtgtgtgtgtgtgtgtgtgtgtcaccgagggtccgaggcggtcctactccctctgtcttggtgtcttcttgcgcacgccgcttggtggttctcctcctcacggttccatctccgggtccttgggtctggatggaactggagacacggtagaggagcccgcggtttcccttttcccctcccaacaaggtattcctgggttcttgcttgcctttcgagctctgcgggattgacaattctgacaggaccggcgtggaggaagggttgatagggaggattttttggattgatctataagccttttggtggctaacggttgggagctttggaggagaactcgagtccttgggctctaggttggtctggacgaggccggaggaagttgccaatggagccgccgactgggttctgggcctcgcttctgagcttcctcaagttcctcccctacttctgcggcctcctcgtccttggactcatcaaaggtgttttgttgtgcccttgggcatgtctgattatggcgattggaatatctgccctggtcctgggcttatggcctatgcatctgatttggacatactactgcattgtcagaaccaagctggttggacctgtggtaaagcttctgcttcttattgctgcgactgcagtcttgatcatatggttgataattggcatcccgggaagcatatttgctggattggtatatggttttctagcacccataatggctacatttgatgctgtaggagaaggcaaagaaaagccatttgttcattgctttgtggatggaacatggagtactatcactggaagctgtacagtagtcagggacgtgaaagatttgcttttccactcctatttttcacttatggatgaccttcgtcttcagaaacctcctgacggggagccatatgagataagattgcttgatattcctggtgcactaatagcggctgcatttgggcttctacttgatggaataatgttcacattaattgccttctataagtgccccgtgatgcttttcaaaggatggaaacgactgatccaggacatgattgggagagaagggccctttctggagactgcttgtgtgccatttgctggtcttgctattcttctttggccatttgctgtagtaggagccgttctggcatccatactctccagtgcccctttaggtgcttatgctgcagttgtagcttatcaggaatcctcccttatcctgggaattgcctatgtgttctcgtcggtgtctatatttgatgaatacacaaatgatgttcttgacatggcgcctggttcttgttttccaagatttaaatatcggaagggcaaagatgagtcttcacacgggcacagtgttccattatccagaccagcctcattcaatagggagaagcaagaagggaaaaggcctccgtctcgtgttacttcatttaagaacagcattgatgatttcaatccattcaagctgctggaccacctatttgccgaatgcaggaaccagggggaggatttggttaacagaggagtgataacaatgaaggacattgaagaaacgaagtctggcaaagttggcagcggtgttcttaatgttggtctaccagcgtatgttattcttaatgcactccttcggtctgcgaaagctgattctgtcgggctaatcttaagtgacggctctgagattacatctgacaatagacctaaaaacaccatctttgattggttctttgaccctcttatggttataaaggaacagatcaaagctgagaatctcactgacgaagaggaagagtatctgaaaatgcgagtgctattggctggtgatcccagtcgcctgaaaggctctctgcctcatgttccatccttgactgaacgtaaaaaggcagatatagacgcattcgctcgcaggttgcaaggaatcacaaagtcgatatctagatatcctacatcaaagcgccgcttcgacgtccttgtgaaggcgctcttgtcagagctggagaggacgatgggccaatctggcaatggatcccagtcccaggcgcagaggctgcgaaactcggtagcccggatgttgagccagaaatctatgggcaagactgccaacattagggatgaagacccagaagcgcagatgacgagactgtctcgcaccccgtgatcgtctgtttgttagtttgacgatgccgtatcacatgctattccagccttgtacaaatgatgagtagatagaatgctgcggcttgaactgatgctcttacatctcatgtatgatctgtatattttaggcactatatgtatcgtgtatgcaatgtttttttgctcccgaaaagaaaagagtatgcacagaggagaacaataaataaaaatacgcaatcctcaacggataacgccggcgcgcatgtgttttagacaaattgtgggaggttaagctacagcaattgcaaagcacaccggctttggggctcgcatgaaacttgcaccgtattaggtggataattgcaaaaggttgacgcatgttcaaccccgaagaccatccgtgggctggctatcaggcacaatggtgtcatcatcgtctaacagctcctccagcttctttc

SEQ ID NO: 102648 - DNA, 834 bp, Zea Mays
cccttaaaggttcatcttcattgttttgcttactttctgcagcaattgatggatcatcattcatattgctgcagctaaaatgatcgaggaaattgattccatcattagcacgatgaaaaacggtgtggtaatcagtcctgccgttcaccaaatctgcagtgaaaccatgttccagggcacaatcctgactttgaagttcagaattcgaagatgttttcctttgcttttgagaattagtgttggcagatttgagaaccattgcatatttctgaacttcatgcaaggttggagttcctgcagcattttcattatcatgggtttcaatgatgtcagttacatacacaccctggttgtccttagttgtgtgactatccagcccatgagtagaacaattagtttttcgtattttaggagtcggtatctgagaagacttgcctttctgctctacttccccaacagtgcttaaaggagtgtcaactacataacctccctgaaccaaattttcttctgcatcatttgtttccttcaatgccaatgtatcacatacctgcttaacagagcccttcttcctttgacgcttagtggttttgcgcttatcatcagcttgtgcaaccacatttccagttactatatcctcaggatcacttgttttatcagcaaacctcaaagaatcagattctgttaattctctattagcatcttcttcggatacaccacttgattgatgagaagagtcagtcatggttgatagcactttcgattttttccccttagacttcttttgtctaggtgagctaacaggagaagcaaagtgaaccgctgcagggcattttg

SEQ ID NO: 102649 - DNA, 348 bp, Zea Mays
atgtcggggaaggcggcagcgtgctccgcggccacctgcgctgcgcataggccaacacaccaatcagttccgttgggcactcgcggtacgaagaggcggaagaagaggcgcgaggggagtacacttgaggccgcggatgccggtgtccggggcgacgagcagggcgaggtgggtgccgagatcggtgtcaaggaagagggagatgggggcggctccgcctttgcggtgtgccattcgcggccgcggcgacggggcggcggccatagcgagcaagcggacgccaataccaatgaggcgaaggcaggggcgagggaggcggggaggcccgccgaggggccgagaccgtga

SEQ ID NO: 102650 - DNA, 2915 bp, Zea Mays
ctgcggccgataaataaaacgagaaactccggcgagtctcgcccccctcttccccccactcgctcgcaactcgccgcgcggcggaaacgccacgcccggggtgagatccgcgcgggccctcgcctgcctcgtcaccgtcccgcggcctccgatctccacagggcggccggaggagtcggaggggcagagtgagatggcggcggaggagggggccatgtcgccgacgaggatgcttgcggaggggcacctgcgggtggccaccggcgggggcgcgccggcggacggcgggatcgccgtcagacacctcccgcaccatcaccccactaagaaagacaatgttggtgggaaaactgaaaaagacaatcatgaaggtgtaaattctttactatctgaggagttggaaaaactagctaatgggaatagcaagattcctggtacattagatgagtatagaaagcttgtcgttccaataattgaggagtattttagtacaggagatgtggaattggcagcttctgagctgaagtgtcttggatctgatcagtttcatcattactttgtgaagaagcttatatctatggcaatggatcgccatgacaaagaaaaagaaatggcatcgattctgttatcatctttgtatgctgatctactgagctcctacaggatcagtgaaggttttatgatgcttctggagtctacagaagatctaactgttgatataccggatgctactgatgtattggcagtttttattgcacgggctattgttgatgaaattttgcctcctgttttcctcactcgagctagggcactacttccagaattttccaagggcattcaagttctgcaggttgttgaaaagagctatttgtcagctccccaccatgcagaattagttgaacgcaaatggggtggaagcacacactctactgtagaagaagcaaaaagtaagattaagaatattctaagagaatatattgagaatgaagacatagatgaagcctttaggtgtataagagagctcagccttccatttttccatcatgaggttgtgaagcgtgctctcacctttggtatagagaacgtatcctcgcaaccatcaatccttaagttattgaaggaggcagctgcaagttgcttgatcagtcctaatcaaatctcaaagggtttttctagactagctgagggtgttgacgacttgagtcttgatattccttctgctaaagttctttttgacaagctggtttcaacagctatatctgaaggatggcttgatgcttcttttggtaaatcagctgcccctgatgaagagatacaaagtacaagcgttgtaaaggtgaagcgttttaaagaagaatgtggccacataattcatgagtattttctctcagatgatgtcccagaacttattcgaagccttgaagagctttctgctccagaattcaatcccattttcctcaagaagcttgtgacgcttgctatggatagaaagagcagagagaaggagatggcctcagtactcctttcttcattgagattagaattgttttcaactgatgacatcattgagggttttgtaatgctcttgcagtcagcagaagacactgcactcgacattgtggatgctcctagtgaacttgctctcttcctagctagggcagtgattgatgaagtattaattccgctcaatttggatgaaatcagcattaagcttcggccgaacagcagtggcagccaaactgtccagatggcgcgtgctctactgtcagctcgccattctggtgagcggatactgcggtgctggggcggtggcactggatgggctgtggaagatactaaggacaagatcactaagctattggaggaatacaacactggtggtgacctaggagaagcctgcagatgcatccgtgatcttgggatgcccttcttcaaccatgaggtggtaaagaaggcactggtcatggcgatggagaagcagaatgacaccagcatcttggtcctgctgcaggagtgtttcggcgaggggctcataaccatcaaccagatgaccaaaggctttgcccgtgtcaaggaaggccttgatgatctgatcctcgacatcccaaatgcccaggagaagtttggagagtatgtggagctggcaacagagcgcggctggctgctgccgaccttcgcctccgttccctgagcatccaccactggcgataccttccttatgtgtacatttgtgcccatgatgtcattagctccgtaccaaagttttcctattcctagtttacttatgttaccgtatactggaggattgtaggatggatgtggtgtcggttgttgagatagtgtcctattggtctagtctgggagggtacttttgagagttaaaagaataaagccatttcgtttcaggttatgagatgtacgctgcaacctttgtccctggatggacctggtggtaccatattcttaatatgatttattgccgatctgggaagtggaagtgcttggaactattgcatggatatcaacacaatacatgatgtaattctcgcgatgtactaacttgattcagatttagacagcaaggactatgaaatggtgtagaaggaaagtttagctaatcagcaaaaagtaagttggatttattttgtcttacgatggatgactgagttgtgagccttcaaaattttgatgaagacagtctactgtagttgctctaccatctgtctttatcaaattcttttcggtttcaccatttactgcgattttctttccccaataaatgttaattgtttgtgctaaacaataggaacctggaattattgttgcaaataaactactagctactttaggatcatgcatgttaagtcttagataaatttggttattttatttccataattaaaagaacttaaaaa

SEQ ID NO: 102651 - DNA, 2237 bp, Zea Mays
attgactacatgcaatgcttttgtaggagagtttcttgttattcacttcactttaatcaatggttcatgctagtaacctctaactctggttttatttcagacaatgttggtgggaaaactgaaaaagacaatcatgaaggtgtaaattctttactatctgaggagttggaaaaactagctaatgggaatagcaagattcctggtacattagatgagtatagaaagcttgtcgttccaataattgaggagtattttagtacaggagatgtggaattggcagcttctgagctgaagtgtcttggatctgatcagtttcatcattactttgtgaagaagcttatatctatggcaatggatcgccatgacaaagaaaaagaaatggcatcgattctgttatcatctttgtatgctgatctactgagctcctacaggatcagtgaaggttttatgatgcttctggagtctacagaagatctaactgttgatataccggatgctactgatgtattggcagtttttattgcacgggctattgttgatgaaattttgcctcctgttttcctcactcgagctagggcactacttccagaattttccaagggcattcaagttctgcaggttgttgaaaagagctatttgtcagctccccaccatgcagaattagttgaacgcaaatggggtggaagcacacactctactgtagaagaagcaaaaagtaagattaagaatattctaagagaatatattgagaatgaagacatagatgaagcctttaggtgtataagagagctcagccttccatttttccatcatgaggttgtgaagcgtgctctcacctttggtatagagaacgtatcctcgcaaccatcaatccttaagttattgaaggaggcagctgcaagttgcttgatcagtcctaatcaaatctcaaagggtttttctagactagctgagggtgttgacgacttgagtcttgatattccttctgctaaagttctttttgacaagctggtttcaacagctatatctgaaggatggcttgatgcttcttttggtaaatcagctgcccctgatgaagagatacaaagtacaagcgttgtaaaggtgaagcgttttaaagaagaatgtggccacataattcatgagtattttctctcagatgatgtcccagaacttattcgaagccttgaagagctttctgctccagaattcaatcccattttcctcaagaagcttgtgacgcttgctatggatagaaagagcagagagaaggagatggcctcagtactcctttcttcattgagattagaattgttttcaactgatgacatcattgagggttttgtaatgctcttgcagtcagcagaagacactgcactcgacattgtggatgctcctagtgaacttgctctcttcctagctagggcagtgattgatgaagtattaattccgctcaatttggatgaaatcagcattaagcttcggccgaacagcagtggcagccaaactgtccagatggcgcgtgctctactgtcagctcgccattctggtgagcggatactgcggtgctggggcggtggcactggatgggctgtggaagatactaaggacaagatcactaagctattggaggaatacaacactggtggtgacctaggagaagcctgcagatgcatccgtgatcttgggatgcccttcttcaaccatgaggtggtaaagaaggcactggtcatggcgatggagaagcagaatgacaccagcatcttggtcctgctgcaggagtgtttcggcgaggggctcataaccatcaaccagatgaccaaaggctttgcccgtgtcaaggaaggccttgatgatctgatcctcgacatcccaaatgcccaggagaagtttggagagtatgtggagctggcaacagagcgcggctggctgctgccgaccttcgcctccgttccctgagcatccaccactggcgataccttccttatgtgtacatttgtgcccatgatgtcattagctccgtaccaaagttttcctattcctagtttacttatgttaccgtatactggaggattgtaggatggatgtggtgtcggttgttgagatagtgtcctattggtctagtctgggagggtacttttgagagttaaaagaataaagccatttcgtttcaggttatgagatgtacgctgcaacctttgtccctggatggacctggtggtaccatattcttaata

SEQ ID NO: 102652 - DNA, 240 bp, Zea Mays
ctgctccaccccagagcagctctactctaaaactctgggtggagcagctctgctccagagtttagattgtttctcataaccagtggcaatggcgggtaaataactcaaaactccatgactaggttgtttttttggagttttcagagcagcaaaagaggtactccaaaaaattgtactgcagctccaaaaactccatagaatttacaactctggagttagggtgtttggcatgctctggcc

SEQ ID NO: 102653 - DNA, 1494 bp, Zea Mays
aaaagcgttcgcgcccctgcgcccctcactgcgcatccgcatcactgcgtgtcctcctcctctccccctcactgcggcgcatccacatctgccaatttctccacctcctcctcctcgcccctgtgcctcgacatctcgcatccgctccatctatggaaggccaccacgcgccatggatcgccgctctctaccgccacctcaattgaaggttcaccgctctctacgcggatccgccacctcctcctcggccgccgtcaatagaaggtcccagatctcctctcccattacttctctccccattaccgcgctcgaggtctgccatttttggaggtccgccacttccgcctctgctcgccgtcaatggaaggtcctagatctcctctccctattaccgcgctcgagtcagtgggaggtccgccatttttggaaggtccgccacctcctcctcgacccgcggcaaaaatggcgtgggagatccgccacctcctcctcggcccgcggcaaaaatggtgtgggagatccgccacctcacctcctcccattctcacgcccgcgcctgatatggaaggtccgccgaagggactcggacgtcgaggccatggctgagccgcaccccttctccccctgcctcgcgcgcggcggccgagatggtgttggctgggttgttcgggatggtggtcctacctgccctccctgctatcctcgccccaaatcgacgagaatcatgcagcccaaatctgaggtggaggcgcctgcactgtcgatggaggtgtcgagtctgcggtggtgtctgtagatgggaaggcatggtgtgcagcagcagtggccaggtggtgtcgctgagcctgtcctcctacgggctcactagcacgctctccacggccatcggggacctcacgttcctacgtatgctgaacctgagctccaattggttccacggggaggtcccagcgaccatcgttcgccttgcgcatctgcaggcgctagacctgagctacaacgccttcactgaattccagagatgcaattcccgaggccatggagcagcagacaatatcaattgccaaagcagccattacaatagtactcattttagggacttcatttcttgcagctgccaatccaattacaggatgctatgacgctcttaaggttcgtaaacatgtatttattgatgcaataattatccattgtataaagtataaattgttctagctatacaggcaagccaattaatttgacaaaatttcttttgttatttgcaagccaaactaacttgtatatcttttcttataaattccatttcaagcatatgttgctttctgataagtcatatgcttcaattcacgcggttggttatacagttcttggtggtgattattgaaattgtatttaactattttacaatatttagaaagcctatttggtttcaatagagttcatgtatcttttcattcttgatgaaattctggtatagagtttgatgtttgaagc

SEQ ID NO: 102654 - DNA, 2007 bp, Zea Mays
actgcgcatccgcatcactgcgtgtcctcctcctctccccctcactgcggcgcatccacatctgccaatttctccacctcctcctcctcgcccctgtgcctcgacatctcgcatccgctccatctatggaaggccaccacgcgccatggatcgccgctctctaccgccacctcaattgaaggttcaccgctctctacgcggatccgccacctcctcctcggccgccgtcaatagaaggtcccagatctcctctcccattacttctctccccattaccgcgctcgaggtctgccatttttggaggtccgccacttccgcctctgctcgccgtcaatggaaggtcctagatctcctctccctattaccgcgctcgagtcagtgggaggtccgccatttttggaaggtccgccacctcctcctcgacccgcggcaaaaatggcgtgggagatccgccacctcctcctcggcccgcggcaaaaatggtgtgggagatccgccacctcacctcctcccattctcacgcccgcgcctgatatggaaggtccgccgaagggactcggacgtcgaggccatggctgagccgcaccccttctccccctgcctcgcgcgcggcggccgagatggtgttggctgggttgttcgggatggtggtcctacctgccctccctgctatcctcgccccaaatcgacgagaatcatgcagcccaaatctgaggtggaggcgcctgcactgtcgatggaggtgtcgagtctgcggtggtgtctgtagatgggaaggcatggtgtgcagcagcagtggccaggtggtgtcgctgagcctgtcctcctacgggctcactagcacgctctccacggccatcggggacctcacgttcctacgtatgctgaacctgagctccaattggttccacggggaggtcccagcgaccatcgttcgccttgcgcatctgcaggcgctagacctgagctacaacgccttcactgaattccagagatgcaattcccgaggccatggagcagcagacaatatcaattgccaaagcagccattacaatagtactcattttagggacttcatttcttgcagctgccaatccaattacaggatgctatgacgctcttaagtgatcatgaacttatacattgaaataatggtgggcctcgagaggccaggaggtggagaggagttcaacaagtactacatcttgtctgctctcctatccgtggattgatgtctttagtagaggatccaaataatggcctgcaaggtttattgaatcggatcgcacaaaactccatctgcttcagaattgagctaagcgcatcctaacatcttgactcctatatcgatcaattatttttgttacacatttgattctttagtttcgtagagggaggaacatcgtgggatgcaggccccacggaacaccagatattttgaggtagaccgcggcgaggtgcccaagggcagcgcctagatcttcttctggatggtcaagttctgtaacgacaatgtggcagaggagatgccctgatcttcgtacgctgaaggatgtatgcatggaatagaagtcagataaatcttttgtgcaacaggctgaagtcattcttgttgatgggaaattaacagaggctaaggctaaccagcttgctaaggtttaaatgcaggttggagaactcccttgttcaggcttttgtctttcttctgcagaaggagagatgacgtgctgcatgacatgatggcatgtgaggcagcaacctcttctccgcaacccttgtcatggcctggagttggtgttctaggaaggagcacaattttattagggtagccaccagagttgaggtcccttttcaatggacgaacttggtgctgtggacgacatctgctattgtagctaggcgcatacatgttttcctataaatgctagctctgcaatcaccaaaggaaaacacaagagtactcttggaggaaagtttagcattcagtttaacaaaccttaccaactc

SEQ ID NO: 102655 - DNA, 2060 bp, Zea Mays
actgcgcatccgcatcactgcgtgtcctcctcctctccccctcactgcggcgcatccacatctgccaatttctccacctcctcctcctcgcccctgtgcctcgacatctcgcatccgctccatctatggaaggccaccacgcgccatggatcgccgctctctaccgccacctcaattgaaggttcaccgctctctacgcggatccgccacctcctcctcggccgccgtcaatagaaggtcccagatctcctctcccattacttctctccccattaccgcgctcgaggtctgccatttttggaggtccgccacttccgcctctgctcgccgtcaatggaaggtcctagatctcctctccctattaccgcgctcgagtcagtgggaggtccgccatttttggaaggtccgccacctcctcctcgacccgcggcaaaaatggcgtgggagatccgccacctcctcctcggcccgcggcaaaaatggtgtgggagatccgccacctcacctcctcccattctcacgcccgcgcctgatatggaaggtccgccgaagggactcggacgtcgaggccatggctgagccgcaccccttctccccctgcctcgcgcgcggcggccgagatggtgttggctgggttgttcgggatggtggtcctacctgccctccctgctatcctcgccccaaatcgacgagaatcatgcagcccaaatctgaggtggaggcgcctgcactgtcgatggaggtgtcgagtctgcggtggtgtctgtagatgggaaggcatggtgtgcagcagcagtggccaggtggtgtcgctgagcctgtcctcctacgggctcactagcacgctctccacggccatcggggacctcacgttcctacgtatgctgaacctgagctccaattggttccacggggaggtcccagcgaccatcgttcgccttgcgcatctgcaggcgctagacctgagctacaacgccttcactgaattccagagatgcaattcccgaggccatggagcagcagacaatatcaattgccaaagcagccattacaatagtactcattttagggacttcatttcttgcagctgccaatccaattacaggatgctatgacgctcttaagtgatcatgaacttatacattgaaataatggtgggcctcgagaggccaggaggtggagaggagttcaacaagtactacatcttgtctgctctcctatccgtggattgatgtctttagtagaggatccaaataatggcctgcaaggtttattgaatcggatcgcacaaaactccatctgcttcagaattgagctaagcgcatcctaacatcttgactcctatatcgatcaattatttttgttacacatttgattctttagtttcgtagagggaggaacatcgtgggatgcaggccccacggaacaccagatattttgaggtagaccgcggcgaggtgcccaagggcagcgcctagatcttcttctggatggtcaagttctgtaacgacaatgtggcagaggagatgccctgatcttcgtacgtcagtttgcctactaagcatccacaaaatctcattataagttctgagaaggccaagtcaattgttcagtatattacaaaagtcaggttggagaactcccttgttcaggcttttgtctttcttctgcagaaggagagatgacgtgctgcatgacatgatggcatgtgaggcagcaacctcttctccgcaacccttgtcatggcctggagttggtgttctaggaaggagcacaattttattagggtagccaccagagttgaggtcccttttcaatggacgaacttggtgctgtggacgacatctgctattgtagctaggcgcatacatgttttcctataaatgctagctctgcaatcaccaaaggaaaacacaagagtactcttggaggaaagtttagcattcagtttaacaaaccttaccaactcatgccttgtttgaatgcaataatgcatgttatgttgccctgttgttgcttggacacatgcttggcatggctattttctggttatgtcacaa

SEQ ID NO: 102656 - DNA, 865 bp, Zea Mays
gcgcatccgcatcactgcgtgtcctcctcctctccccctcactgcggcgcatccacatctgccaatttctccacctcctcctcctcgcccctgtgcctcgacatctcgcatccgctccatctatggaaggccaccacgcgccatggatcgccgctctctaccgccacctcaattgaaggttcaccgctctctacgcggatccgccacctcctcctcggccgccgtcaatagaagaattccagagatgcaattcccgaggccatggagcagcagacaatatcaattgccaaagcagccattacaatagtactcattttagggacttcatttcttgcagctgccaatccaattacaggatgctatgacgctcttaagtgatcatgaacttatacattgaaataatggtgggcctcgagaggccaggaggtggagaggagttcaacaagtactacatcttgtctgctctcctatccgtggattgggtgcctgaaatatcctatagatgtctttagtagaggatccaaataatggcctgcaaggtttattgaatcggatcgcacaaaactccatctgcttcagaattgagctaagcgcatcctaacatcttgactcctatatcgatcaattatttttgttacacatttgattctttagtttcgtagagggaggaacatcgtgggatgcaggccccacggaacaccagatattttgaggtagaccgcggcgaggtgcccaagggcagcgcctagatcttcttctggatggtcaagttctgtaacgacaatgtggcagaggagatgccctgatcttcgtacgtatgttacttactcccactctcaacatagcagtagtaagtgcttgtttc

SEQ ID NO: 102657 - DNA, 1445 bp, Zea Mays
gcgcatccgcatcactgcgtgtcctcctcctctccccctcactgcggcgcatccacatctgccaatttctccacctcctcctcctcgcccctgtgcctcgacatctcgcatccgctccatctatggaaggccaccacgcgccatggatcgccgctctctaccgccacctcaattgaaggttcaccgctctctacgcggatccgccacctcctcctcggccgccgtcaatagaagaattccagagatgcaattcccgaggccatggagcagcagacaatatcaattgccaaagcagccattacaatagtactcattttagggacttcatttcttgcagctgccaatccaattacaggatgctatgacgctcttaagtgatcatgaacttatacattgaaataatggtgggcctcgagaggccaggaggtggagaggagttcaacaagtactacatcttgtctgctctcctatccgtggattgggtgcctgaaatatcctatagatgtctttagtagaggatccaaataatggcctgcaaggtttattgaatcggatcgcacaaaactccatctgcttcagaattgagctaagcgcatcctaacatcttgactcctatatcgatcaattatttttgttacacatttgattctttagtttcgtagagggaggaacatcgtgggatgcaggccccacggaacaccagatattttgaggtagaccgcggcgaggtgcccaagggcagcgcctagatcttcttctggatggtcaagttctgtaacgacaatgtggcagaggagatgccctgatcttcgctgaaggatgtatgcatggaatagaagtcagataaatcttttgtgcaacaggctgaagtcattcttgttgatgggaaattaacagaggctaaggctaaccagcttgctaaggtttaaatgcagtatattacaaaagtcaggttggagaactcccttgttcaggcttttgtctttcttctgcagaaggagagatgacgtgctgcatgacatgatggcatgtgaggcagcaacctcttctccgcaacccttgtcatggcctggagttggtgttctaggaaggagcacaattttattagggtagccaccagagttgaggtcccttttcaatggacgaacttggtgctgtggacgacatctgctattgtagctaggcgcatacatgttttcctataaatgctagctctgcaatcaccaaaggaaaacacaagagtactcttggaggaaagtttagcattcagtttaacaaaccttaccaactcatgccttgtttgaatgcaataatgcatgttatgttgccctgttgttgcttggacacatgcttggcatggctattttctggttatgtcacaactcacatctcccatgtaaatttatggctatgatatgcatcaaacaagcttatattttgctctt

SEQ ID NO: 102658 - DNA, 1428 bp, Zea Mays
gcgcatccgcatcactgcgtgtcctcctcctctccccctcactgcggcgcatccacatctgccaatttctccacctcctcctcctcgcccctgtgcctcgacatctcgcatccgctccatctatggaaggccaccacgcgccatggatcgccgctctctaccgccacctcaattgaaggttcaccgctctctacgcggatccgccacctcctcctcggccgccgtcaatagaagaattccagagatgcaattcccgaggccatggagcagcagacaatatcaattgccaaagcagccattacaatagtactcattttagggacttcatttcttgcagctgccaatccaattacaggatgctatgacgctcttaagtgatcatgaacttatacattgaaataatggtgggcctcgagaggccaggaggtggagaggagttcaacaagtactacatcttgtctgctctcctatccgtggattgggtgcctgaaatatcctatagatgtctttagtagaggatccaaataatggcctgcaaggtttattgaatcggatcgcacaaaactccatctgcttcagaattgagctaagcgcatcctaacatcttgactcctatatcgatcaattatttttgttacacatttgattctttagtttcgtagagggaggaacatcgtgggatgcaggccccacggaacaccagatattttgagaccgcggcgaggtgcccaagggcagcgcctagatcttcttctggatggtcaagttctgtaacgacaatgtggcagaggagatgccctgatcttcgctgaaggatgtatgcatggaatagaagtcagataaatcttttgtgcaacaggctgaagtcattcttgttgatgggaaattaacagaggctaaggctaaccagcttgctaaggtttaaatgcagtcaggttggagaactcccttgttcaggcttttgtctttcttctgcagaaggagagatgacgtgctgcatgacatgatggcatgtgaggcagcaacctcttctccgcaacccttgtcatggcctggagttggtgttctaggaaggagcacaattttattagggtagccaccagagttgaggtcccttttcaatggacgaacttggtgctgtggacgacatctgctattgtagctaggcgcatacatgttttcctataaatgctagctctgcaatcaccaaaggaaaacacaagagtactcttggaggaaagtttagcattcagtttaacaaaccttaccaactcatgccttgtttgaatgcaataatgcatgttatgttgccctgttgttgcttggacacatgcttggcatggctattttctggttatgtcacaactcacatctcccatgtaaatttatggctatgatatgcatcaaacaagcttatattttgctctt

SEQ ID NO: 102659 - DNA, 1428 bp, Zea Mays
gcgcatccgcatcactgcgtgtcctcctcctctccccctcactgcggcgcatccacatctgccaatttctccacctcctcctcctcgcccctgtgcctcgacatctcgcatccgctccatctatggaaggccaccacgcgccatggatcgccgctctctaccgccacctcaattgaaggttcaccgctctctacgcggatccgccacctcctcctcggccgccgtcaatagaagaattccagagatgcaattcccgaggccatggagcagcagacaatatcaattgccaaagcagccattacaatagtactcattttagggacttcatttcttgcagctgccaatccaattacaggatgctatgacgctcttaagtgatcatgaacttatacattgaaataatggtgggcctcgagaggccaggaggtggagaggagttcaacaagtactacatcttgtctgctctcctatccgtggattgggtgcctgaaatatcctatagatgtctttagtagaggatccaaataatggcctgcaaggtttattgaatcggatcgcacaaaactccatctgcttcagaattgagctaagcgcatcctaacatcttgactcctatatcgatcaattatttttgttacacatttgattctttagtttcgtagagggaggaacatcgtgggatgcaggccccacggaacaccagatattttgaggtagaccgcggcgaggtgcccaagggcagcgcctagatcttcttctggatggtcaagttctgtaacgacaatgtggcagaggagatgccctgatcttcgctgaaggatgtatgcatggaatagaagtcagataaatcttttgtgcaacaggctgaagtcattcttgttgatgggaaattaacagaggctaaggctaaccagcttgctaaggtttaaatgcaggttggagaactcccttgttcaggcttttgtctttcttctgcagaaggagagatgacgtgctgcatgacatgatggcatgtgaggcagcaacctcttctccgcaacccttgtcatggcctggagttggtgttctaggaaggagcacaattttattagggtagccaccagagttgaggtcccttttcaatggacgaacttggtgctgtggacgacatctgctattgtagctaggcgcatacatgttttcctataaatgctagctctgcaatcaccaaaggaaaacacaagagtactcttggaggaaagtttagcattcagtttaacaaaccttaccaactcatgccttgtttgaatgcaataatgcatgttatgttgccctgttgttgcttggacacatgcttggcatggctattttctggttatgtcacaactcacatctcccatgtaaatttatggctatgatatgcatcaaacaagcttatattttgctctt

SEQ ID NO: 102660 - DNA, 1415 bp, Zea Mays
gcgcatccgcatcactgcgtgtcctcctcctctccccctcactgcggcgcatccacatctgccaatttctccacctcctcctcctcgcccctgtgcctcgacatctcgcatccgctccatctatggaaggccaccacgcgccatggatcgccgctctctaccgccacctcaattgaaggttcaccgctctctacgcggatccgccacctcctcctcggccgccgtcaatagaagaattccagagatgcaattcccgaggccatggagcagcagacaatatcaattgccaaagcagccattacaatagtactcattttagggacttcatttcttgcagctgccaatccaattacaggatgctatgacgctcttaagtgatcatgaacttatacattgaaataatggtgggcctcgagaggccaggaggtggagaggagttcaacaagtactacatcttgtctgctctcctatccgtggattgatgtctttagtagaggatccaaataatggcctgcaaggtttattgaatcggatcgcacaaaactccatctgcttcagaattgagctaagcgcatcctaacatcttgactcctatatcgatcaattatttttgttacacatttgattctttagtttcgtagagggaggaacatcgtgggatgcaggccccacggaacaccagatattttgaggtagaccgcggcgaggtgcccaagggcagcgcctagatcttcttctggatggtcaagttctgtaacgacaatgtggcagaggagatgccctgatcttcgtacgctgaaggatgtatgcatggaatagaagtcagataaatcttttgtgcaacaggctgaagtcattcttgttgatgggaaattaacagaggctaaggctaaccagcttgctaaggtttaaatgcagtcaggttggagaactcccttgttcaggcttttgtctttcttctgcagaaggagagatgacgtgctgcatgacatgatggcatgtgaggcagcaacctcttctccgcaacccttgtcatggcctggagttggtgttctaggaaggagcacaattttattagggtagccaccagagttgaggtcccttttcaatggacgaacttggtgctgtggacgacatctgctattgtagctaggcgcatacatgttttcctataaatgctagctctgcaatcaccaaaggaaaacacaagagtactcttggaggaaagtttagcattcagtttaacaaaccttaccaactcatgccttgtttgaatgcaataatgcatgttatgttgccctgttgttgcttggacacatgcttggcatggctattttctggttatgtcacaactcacatctcccatgtaaatttatggctatgatatgcatcaaacaagcttatattttgctctt

SEQ ID NO: 102661 - DNA, 1384 bp, Zea Mays
gcgcatccgcatcactgcgtgtcctcctcctctccccctcactgcggcgcatccacatctgccaatttctccacctcctcctcctcgcccctgtgcctcgacatctcgcatccgctccatctatggaaggccaccacgcgccatggatcgccgctctctaccgccacctcaattgaaggttcaccgctctctacgcggatccgccacctcctcctcggccgccgtcaatagaagaattccagagatgcaattcccgaggccatggagcagcagacaatatcaattgccaaagcagccattacaatagtactcattttagggacttcatttcttgcagctgccaatccaattacaggatgctatgacgctcttaagtgatcatgaacttatacattgaaataatggtgggcctcgagaggccaggaggtggagaggagttcaacaagtactacatcttgtctgctctcctatccgtggattgggtgcctgaaatatcctatagatgtctttagtagaggatccaaataatggcctgcaaggtttattgaatcggatcgcacaaaactccatctgcttcagaattgagctaagcgcatcctaacatcttgactcctatatcgatcaattatttttgttacacatttgattctttagtttcgtagagggaggaacatcgtgggatgcaggccccacggaacaccagatattttgaggtagaccgcggcgaggtgcccaagggcagcgcctagatcttcttctggatggtcaagttctgtaacgacaatgtggcagaggagatgccctgatcttcgtacgctgaagtcattcttgttgatgggaaattaacagaggctaaggctaaccagcttgctaaggtttaaatgcagtcaggttggagaactcccttgttcaggcttttgtctttcttctgcagaaggagagatgacgtgctgcatgacatgatggcatgtgaggcagcaacctcttctccgcaacccttgtcatggcctggagttggtgttctaggaaggagcacaattttattagggtagccaccagagttgaggtcccttttcaatggacgaacttggtgctgtggacgacatctgctattgtagctaggcgcatacatgttttcctataaatgctagctctgcaatcaccaaaggaaaacacaagagtactcttggaggaaagtttagcattcagtttaacaaaccttaccaactcatgccttgtttgaatgcaataatgcatgttatgttgccctgttgttgcttggacacatgcttggcatggctattttctggttatgtcacaactcacatctcccatgtaaatttatggctatgatatgcatcaaacaagcttatattttgctctt

SEQ ID NO: 102662 - DNA, 1376 bp, Zea Mays
gcgcatccgcatcactgcgtgtcctcctcctctccccctcactgcggcgcatccacatctgccaatttctccacctcctcctcctcgcccctgtgcctcgacatctcgcatccgctccatctatggaaggccaccacgcgccatggatcgccgctctctaccgccacctcaattgaaggttcaccgctctctacgcggatccgccacctcctcctcggccgccgtcaatagaagaattccagagatgcaattcccgaggccatggagcagcagacaatatcaattgccaaagcagccattacaatagtactcattttagggacttcatttcttgcagctgccaatccaattacaggatgctatgacgctcttaagtgatcatgaacttatacattgaaataatggtgggcctcgagaggccaggaggtggagaggagttcaacaagtactacatcttgtctgctctcctatccgtggattgggtgcctgaaatatcctatagatgtctttagtagaggatccaaataatggcctgcaaggtttattgaatcggatcgcacaaaactccatctgcttcagaattgagctaagcgcatcctaacatcttgactcctatatcgatcaattatttttgttacacatttgattctttagtttcgtagagggaggaacatcgtgggatgcaggccccacggaacaccagatattttgaggtagaccgcggcgaggtgcccaagggcagcgcctagatcttcttctggatggtcaagttctgtaacgacaatgtggcagaggagatgccctgatcttcgctgaagtcattcttgttgatgggaaattaacagaggctaaggctaaccagcttgctaaggtttaaatgcaggttggagaactcccttgttcaggcttttgtctttcttctgcagaaggagagatgacgtgctgcatgacatgatggcatgtgaggcagcaacctcttctccgcaacccttgtcatggcctggagttggtgttctaggaaggagcacaattttattagggtagccaccagagttgaggtcccttttcaatggacgaacttggtgctgtggacgacatctgctattgtagctaggcgcatacatgttttcctataaatgctagctctgcaatcaccaaaggaaaacacaagagtactcttggaggaaagtttagcattcagtttaacaaaccttaccaactcatgccttgtttgaatgcaataatgcatgttatgttgccctgttgttgcttggacacatgcttggcatggctattttctggttatgtcacaactcacatctcccatgtaaatttatggctatgatatgcatcaaacaagcttatattttgctctt

SEQ ID NO: 102663 - DNA, 2038 bp, Zea Mays
cctcctcctctccccctcactgcggcgcatccacatctgccaatttctccacctcctcctcctcgcccctgtgcctcgacatctcgcatccgctccatctatggaaggccaccacgcgccatggatcgccgctctctaccgccacctcaattgaaggttcaccgctctctacgcggatccgccacctcctcctcggccgccgtcaatagaaggtcccagatctcctctcccattacttctctccccattaccgcgctcgaggtctgccatttttggaggtccgccacttccgcctctgctcgccgtcaatggaaggtcctagatctcctctccctattaccgcgctcgagtcagtgggaggtccgccatttttggaaggtccgccacctcctcctcgacccgcggcaaaaatggcgtgggagatccgccacctcctcctcggcccgcggcaaaaatggtgtgggagatccgccacctcacctcctcccattctcacgcccgcgcctgatatggaaggtccgccgaagggactcggacgtcgaggccatggctgagccgcaccccttctccccctgcctcgcgcgcggcggccgagatggtgttggctgggttgttcgggatggtggtcctacctgccctccctgctatcctcgccccaaatcgacgagaatcatgcagcccaaatctgaggtggaggcgcctgcactgtcgatggaggtgtcgagtctgcggtggtgtctgtagatgggaaggcatggtgtgcagcagcagtggccaggtggtgtcgctgagcctgtcctcctacgggctcactagcacgctctccacggccatcggggacctcacgttcctacgtatgctgaacctgagctccaattggttccacggggaggtcccagcgaccatcgttcgccttgcgcatctgcaggcgctagacctgagctacaacgccttcactgaattccagagatgcaattcccgaggccatggagcagcagacaatatcaattgccaaagcagccattacaatagtactcattttagggacttcatttcttgcagctgccaatccaattacaggatgctatgacgctcttaagtgatcatgaacttatacattgaaataatggtgggcctcgagaggccaggaggtggagaggagttcaacaagtactacatcttgtctgctctcctatccgtggattgggtgcctgaaatatcctatagatgtctttagtagaggatccaaataatggcctgcaaggtttattgaatcggatcgcacaaaactccatctgcttcagaattgagctaagcgcatcctaacatcttgactcctatatcgatcaattatttttgttacacatttgattctttagtttcgtagagggaggaacatcgtgggatgcaggccccacggaacaccagatattttgaggtagaccgcggcgaggtgcccaagggcagcgcctagatcttcttctggatggtcaagttctgtaacgacaatgtggcagaggagatgccctgatcttcgctgaaggatgtatgcatggaatagaagtcagataaatcttttgtgcaacaggctgaagtcattcttgttgatgggaaattaacagaggctaaggctaaccagcttgctaaggtttaaatgcaggttggagaactcccttgttcaggcttttgtctttcttctgcagaaggagagatgacgtgctgcatgacatgatggcatgtgaggcagcaacctcttctccgcaacccttgtcatggcctggagttggtgttctaggaaggagcacaattttattagggtagccaccagagttgaggtcccttttcaatggacgaacttggtgctgtggacgacatctgctattgtagctaggcgcatacatgttttcctataaatgctagctctgcaatcaccaaaggaaaacacaagagtactcttggaggaaagtttagcattcagtttaacaaaccttaccaactcatgccttgtttgaatgcaataatgcatgttatgttgccc

SEQ ID NO: 102664 - DNA, 1907 bp, Zea Mays
ctcgacatctcgcatccgctccatctatggaaggccaccacgcgccatggatcgccgctctctaccgccacctcaattgaaggttcaccgctctctacgcggatccgccacctcctcctcggccgccgtcaatagaaggtcccagatctcctctcccattacttctctccccattaccgcgctcgaggtctgccatttttggaggtccgccacttccgcctctgctcgccgtcaatggaaggtcctagatctcctctccctattaccgcgctcgagtcagtgggaggtccgccatttttggaaggtccgccacctcctcctcgacccgcggcaaaaatggcgtgggagatccgccacctcctcctcggcccgcggcaaaaatggtgtgggagatccgccacctcacctcctcccattctcacgcccgcgcctgatatggaaggtccgccgaagggactcggacgtcgaggccatggctgagccgcaccccttctccccctgcctcgcgcgcggcggccgagatggtgttggctgggttgttcgggatggtggtcctacctgccctccctgctatcctcgccccaaatcgacgagaatcatgcagcccaaatctgaggtggaggcgcctgcactgtcgatggaggtgtcgagtctgcggtggtgtctgtagatgggaaggcatggtgtgcagcagcagtggccaggtggtgtcgctgagcctgtcctcctacgggctcactagcacgctctccacggccatcggggacctcacgttcctacgtatgctgaacctgagctccaattggttccacggggaggtcccagcgaccatcgttcgccttgcgcatctgcaggcgctagacctgagctacaacgccttcactgaattccagagatgcaattcccgaggccatggagcagcagacaatatcaattgccaaagcagccattacaatagtactcattttagggacttcatttcttgcagctgccaatccaattacaggatgctatgacgctcttaagtgatcatgaacttatacattgaaataatggtgggcctcgagaggccaggaggtggagaggagttcaacaagtactacatcttgtctgctctcctatccgtggattgatgtctttagtagaggatccaaataatggcctgcaaggtttattgaatcggatcgcacaaaactccatctgcttcagaattgagctaagcgcatcctaacatcttgactcctatatcgatcaattatttttgttacacatttgattctttagtttcgtagagggaggaacatcgtgggatgcaggccccacggaacaccagatattttgaggtagaccgcggcgaggtgcccaagggcagcgcctagatcttcttctggatggtcaagttctgtaacgacaatgtggcagaggagatgccctgatcttcgtactttgcctactaagcatccacaaaatctcattataagttctgagaaggccaagtcaattgttcagtatattacaaaagtcaggttggagaactcccttgttcaggcttttgtctttcttctgcagaaggagagatgacgtgctgcatgacatgatggcatgtgaggcagcaacctcttctccgcaacccttgtcatggcctggagttggtgttctaggaaggagcacaattttattagggtagccaccagagttgaggtcccttttcaatggacgaacttggtgctgtggacgacatctgctattgtagctaggcgcatacatgttttcctataaatgctagctctgcaatcaccaaaggaaaacacaagagtactcttggaggaaagtttagcattcagtttaacaaaccttaccaactcatgccttgtttgaatgcaataatgcatgttatgttgccctgt

SEQ ID NO: 102665 - DNA, 996 bp, Zea Mays
gcccaacaacctttccgactggcccaaaccaactcccaagtcccatcccaaccgaggcgacgcagccgccgccggctgaacctaaacccctcgacgcagccgccgccggcgtaggggagaggggcacgggcacggcacggggacggaaatggcggaggggaacggcggcagtcgcgccgaggctggcgtccgcgagtcctccgagccctcgccgaagcgctcctcgatccccgccatgccgcacgaagaatgcgtcgagggcatccgctccgcgctcaaacatcccacggtgcggttcctgagggagcggatggagagtgccgggtgcctggtgtggccgcgcctcatccgggcggcgacctgctcctccgccggcggctacgctagccagcaagggatacaagtttgctgcaatcacatgacctgtcaagatgagataactcaggtcatgattcatgaactgatacatgcttatgatgactgtgttgccaaaaatctgaactggacgaattgtgctcaccatgcttgctctgagattcgagccaatcaccttagtggtgattgccattacaaacgtgaattgttgcgtggtttcatgaagataaagggtcatgagcctgaatgtgtcaaaaggcgggctctgatgtctgtgaaaaacaacccatactgctcagagggtgctgcaaaagatgcaattgatgctgtatgggatatatgctacaatgacacacgcccatttgatagagccccatgaaatattttcagaacctgggatacattagctattttgtgcacacctgcattgatattctgagccccttcagaaacttgtatttcagcaacctgtgtcagcaaagtacagaaattttctgctgtagccaaggcgtgctgcatcccgcgatgagtctgcacacactaacgatttaattcgtgtaattcaattcttttacacgatatcccgacaaagtttaataaattataaacgtaaagtttgtt

SEQ ID NO: 102666 - DNA, 779 bp, Zea Mays
gtcccatcccaaccgaggcgacgcagccgccgccggctgaacctaaacccctcgacgcagccgccgccggcgtaggggagaggggcacgggcacggcacggggacggaaatggcggaggggaacggcggcagtcgcgccgaggctggcgtccgcgagtcctccgagccctcgccgaagcgctcctcgatccccgccatgccgcacgaagaatgcgtcgagggcatccgctccgcgctcaaacatcccacggtgcggttcctgagggagcggatggagagtgccgggtgcctggtgtggccgcgcctcatccgggcggcgacctgctcctccgccggcggctacgctagccagcaagggatacaagtttgctgcaatcacatgacctgtcaagatgagataactcaggtcatgattcatgaactgatacatgcttatgatgactgtgttgccaaaaatctgaactggacgaattgtgctcaccatgcttgctctgagattcgagccaatcaccttagtggtgattgccattacaaacgtgaattgttgcgtggtttcatgaagataaagggtcatgagcctgtaagtctcttttcatattgagctacaaaccacgtgtgcctctgatacctagctgttttctctctgttatctacatgcataatgtttgtgcatatctacttgcttcctccgtttcaaattatagttcatattgactttggacaaatccaagatggaatataaatttgtaatggagtatgaactatcaaattcaatttat

SEQ ID NO: 102667 - DNA, 594 bp, Zea Mays
aggaggaggtagtagtaggtgagagcagtgagaccggccggccgtgagaaggaagacaggtgactggtggtgaaagagctagcagcaccagcatggtggtggggatcgtgattaggctggtcgtcgctttcgtgcttttggtactagtcttcagttcgtcactgcatcgacaagcaggcgttggcgctattcggctgcacgacagaaggcagcacgcgcagcagtgggcggaggagaggaaccagctgaggtcgtacatgaccatggactacgccccatggcaccgccgcgtgcccaagcacaactgatctgattgatccactgcactgccagcagtactgctcttttcgtcggcagcgctagcaatctgcatctgtgcgaagcatggtgacacacaggagaagaagttgatagtaggtttcattctttttcgtcgttgttagctgtatgtcagtatgtgtatctacgtactacgtgtcgtccacgcagctagcgtgcagatatatgcacgcaaattttgccacccccactgcaccctgacctactaatgatggtattgctaggataaatataatatatacgcagttatatata

SEQ ID NO: 102668 - DNA, 1056 bp, Zea Mays
aaacaaaaactaaacaagcagaagctgaaattgccatcagattgggagactcacttcactcactcgggagtcgggtcctcctcgactcagctcctccacaaacaaagccaccaccatcccaacccaaacacatcggccgaccacgggcgccgccatgtccaccgctgacgcggcgagcccggccctggcgccggactgggacgcgccggcgggcgaaggcctggccctggcccagttcgccgcgggctgcttctggagcgtggagctggtgtaccagcgcctcccaggcgtggcgcgcacggaggtggggtactcgcagggccaccgccacgcccccacctaccgcgacgtctgcggcaacggcacgggccacgccgaggtggtccgcgtgcactacgaccccaaggcctgcccctacgacgtcctcctcgacgtcttctgggccaagcacaaccccaccacgctcaacagacagggcaacgacgtcgggacgcagtaccggtcgggcatctactactacacggcagagcaggagacgctggcgcgcgagtcgctggctgcgaagcagaaggagtggcaggacgcgatcgtcaccgaggtcctgccggcgcgacggttctaccccgccgaggagtaccaccagcagtacctcgagaagggcgggcagtccgccaagaagggctgcagcgatcccatccgctgctacggttgagtaccgaccgacccctgtccggagcaccgaagacgccgtgaatgaactgtgctgcatcgatgcgttgtactacctccacctccgctctcgaatagttgttgcccgctagttcattttataactaaacgaccataaataaaaaagaacggagggaagatattgtaactaaagtgtaagatgacttttttgtgttgtgtatcgtactactgcttgttcagagatctacgttgatacaaatgatgcttgtgctggaataaacgcatgggtcgtgcagaggctatgttgatgttcagtttgtgctgggaaaaccgtgaaggtttaacgttgagaacaggcacttgcgt

SEQ ID NO: 102669 - DNA, 2209 bp, Zea Mays
aatacaggttgagtgaaaaaagaaaccccatactgtactgcattactctgcctcgagccgacagtgcaccaacatctgggtcacagcttgatcgggacctggaggatgcgcacacacccgttcatcacatcgggcattgacgcggcagcgactcacagtcacagccaccgcttccagagtccaggctccgacaccctgtcccgaccgcgtgccgacgggtcacgtcaggtcgatctggaccgtccaaggtctcctcacacacgtgcttccgcggcccgggccgtcggatgcccagtcccgggggtgccccgcgccttgtacaaatagactcgcgtggcagtcgagcggcgagcctcggcggctggcctgtcattcactcgttctactcgaggtctcgagctgtgcctgtgccagccaacatccagaagcccacaaagaccaagtggtaacccgtcacactcctaatgcagcttcttccgcgcctctgcatggccaacggcaccggcgacggagacgggaaggggaacgccaacagcagcaagctggccaccgcggtgtcgtcgtcctcctcgaccgtctccaccacgtcgtccgccgcgacggcggccgccgtgtcggaggcgtcgtcctcgacgacgtcgctcccttcgctctcctcagcgacgggcggcagcgtcaccgcgtccttggtccacgtcaccacgctcctccctccgtccgcgccgtccgctgccgccgccgtcgcggcggcgggggactccccccacggcctcgtcgtggcccggccggcgtgcgtggcgttccacgacctgtcgacgctggaggcgacgtccacctccgacgccgcggacggcgccgcggccgcgggctcggtcaagtgcgtgacgcacctcccgggcggcggcggcacggccgccgtgacaggccaccaggacgggcgcctgcgcctgtggcgggcgtcctcgcgctcgcgcgccaggctgcgcctcgccgcggcgctccccacggtctccgaccgcctccgcaggttccccgtgccgtccaaccacgtggccgtccgccgccaccaccgccggctctggatcgagcacgccgacgccgtggcgggcgtggcggcgtccgccgacgggcgcctcctcttctccgtctcctgggaccggacgctcaaggtgtgggcggtcccgtcgctgcggtgcctgcagtcgctggcggcgcacgacgacgccgtgaacgccgtcgccgtggcgcccgacggcaccgtgtacacggcctccgccgacaagcgcgtccgcgtgtgggcgcccgacaacaagccgccgtcccggcgcgccgcgcgcggcaagaggcaccagcagcagcctgtctaccacctggtcgccacgctgtcccgccacacggcggcggtgaacgccctggctgtcgggtgcgggggccaggcgctgtactcggggggcaacgaccgctccgtcctggtgtgggagcgggaggacagcgccagccacatggtcgcgatcggggccctgaggggccaccgcaaggccgtgctctccgtcgcgtgcgcgccgggcgggctggtcgtcagcgggtcagcggaccagacggtgcgcgcctggcgccgcgccgcggacggtaggggctacgcctgcgttgccgtcatcgacggccaccacaccgccgtcaggtccgtcgcggcggcgcctgtgccgatccagctgaagcggtctcgggcagctggtggtgtagacggcggtgacgaggagtggagggtgtgcagcgcgagcttcgacggcgaggtgcgggtctggtcgctgcgtgtgtcgggtttgtttggcgccatcttttgacgtagggcagtgtattctttttttttcttactactacacgactattattatacaccaatgtttggtttggctcttgggcacggcacgctgtcgtatcgtacgttgatgtattatgtatatacagaagagagctagctagtggggacagtggagtgtgtctaggtacttttttttgcgttcttgcaaatttgctgagaaaaattctaagtacctttttttcatatcttgtttacggtttattacatttcgtaactttttacagctttctgataattgtgtgtcgactgtcgccaaaagcgggcaggcatggaaacatcctggttgcttgtttaggtcgatgtcccgctgtcgatcgttgctttttg

SEQ ID NO: 102670 - DNA, 578 bp, Zea Mays
gctccttccttccttgccccgtaccccgccggcgcgccctgagccaaatcgcaggctgccattgtgccatggacgaaggtgcgacgacgagcgactcgtccgctgccgagacatttgatccggacctgattcacgccatcttcaagctggtgtggaggcggcgggcggggaagggggccggcggcggcggcagcattgaggacatcgatgcggagcgtgctccagagacatcgaggagaaatcggagcacaactgccaatgcgactgctcttaaagtcagctgcgaacttctacggatatttgtaacagaggctattcaacgctctgcttttatcgctgaagcggaggatggtgctgttattgaacccacccacctagagcgtgtgttgccgcagctgctcttggacttctgaggtaccccatggagcctccaaaagcatttatctaggcgtgtctgctatggaaggatacagatgcctggatgcatcaacagaatcttattgctgatctatgtcttgtaatctgtaaacacacgagatttctatatggctttataaaaatgcatgcatttcttggaa

SEQ ID NO: 102671 - DNA, 667 bp, Zea Mays
ctccgcgctccacatcgtcggcgcgctccgcgccatggccgaggcgcgcggacgcacagtgctgctcagcatccaccagccgggagcgtgcatcgtcaagatgttcgactccgtcctcctcctagccgtcggctccgtcctccaccatggcatcgtcgaccagctccgcgccctgctcggggacgcgggcctccacctgcccccgcacgtcgacgacgtcgagttcgccatcgactccgtggacgcgctccgccgccacgcacgtcgtcctccggagaccgagagggctgcagcgtctgttccagctgcacggcaagcaggtggcggacgcccccgtgaccatgatggctagccgctacgccaactcgagggcgcgggaggtggcggtgtggctgcgcttcttcaagaacgtggcgcggacgcgacagctcttcgcgtgccgcaccgtgtgcatgctggtggcgggccttgcgctgggctccatcttctacgacctcggggcaggacaaggtggcggagcgcgtgggtttctccgccttcctgctcaccttcctcctgtcatccaccacggaggcgctgcccatcttcctgcaggagcgcgacatcttggccagggaggcggcgtcgggggcgtcgagtccggcaccgcggcctggggatgacggcg

SEQ ID NO: 102672 - DNA, 1371 bp, Zea Mays
ggccgtggccggtgtcccgtggcggtagaacgcgtgcgtcggcaggagcccccccacctgtcgagacgaggcttctccaaaccgccaccgcagccgacccctgctgccccggctttgttataacggatttttttcccgacacggctggtcggctgccatcgccatgtgcctcgccgccgcgtgcgcgtccgccaccctagcccgccgcctctcgccctccaccgcgctcccgcgccgcttcctcctcggcgcccccacgaggccttccccgccaccgcctctgctgcggcgctgcctcccgttccacttctaccatatggcgcaatattggactcaaccatcactggacaggaacaaagctatggttgagtacctaaagcagtatggtgctgttagaactgataaagtgaaggaagtaatggaaacgattgatagagcactatttgtaccagagggtaccccttacattgacagtcctatgcctattggtttcaacgcgacgatatctgctcctcacatgcatgcgacctgcttagagctattgaaggatcatttgcaaccaggaatgcatgctctggatgtcggatcaggtagtggctacctgacagcttgttttgccatgatggttggaccagaaggccgtgcagtgggaattgaacacgttcccgagatcgttgcttcttctgttgaaaatgtgcagagaagtgctgcagctccactactgagggatggatcgctctcttttcatgttacagatggcaggcttggctttccagacgcggcaccctacgacgctatccatgttggtgcagcggcacctgagatccctcagcctctgcttgatcagctaaagcctggcggccggatggtgataccggttggcacctactcccaggacctgcaggtggtggacaagaacacggatggatcattcagcgtccggagcgacgcggctgtgcgctacgtcccactgaccagccgcgccgcgcagttgcagggcccctaaataaggttctctatgctctgtacctcgaaatgcctgtacatatatatatatggtggtcgctacgttcttacctgttcgtgtttcttcttctgagtagctaggtggtctcagtccgttcgtgtttcacgaacgacgacggtgaaaaaagagtggttctttctgtaataagaaggatcgctagcatgtttctgaatcagatggtcggtggatgatgttttgagcttctgaacgaacttgcatctgcccgccgctgagctagacagctaatgctgaagtgtgcatgtacaagtacaaactagctttgcaccagtagtgattctatagatcgtatgcactgcatatcgcaatgctgcacgggttctgtc

SEQ ID NO: 102673 - DNA, 1871 bp, Zea Mays
ctgtaaacgacatgcggacggtactgccggagttcaacgtctgacgcctttcctacatggcgctgatgaggctgctcatgattgcctcgctcccgctcccgctcccgtctctatcgtataagacgtcgcgctgctgctgccaccgcagtcgccgactcgtccgcagtgcaatgccgggggcctgccaggacctcagcaccatcacgcccacaccacggcggcagagtatggcgcagctccagcgcgggtccgtgctggttggtgggcgcgagctcctcgtccgcgccccgcccaacgtcaacctacggcccgccggtgccggcgtcgccgacggcggggccgcctcgggcgccgcgttcctcggagccagggctccggccgcgtccagccgccacgtgttctccgtcggaaacctggctagtgggtggaggtggttgtcgttgttcaggttcaagatctggtggatgatcccggccacgggcgtcggcgcggcggctgtgccggcggagacgcagatgctgcttctggagtacaggagcgaggcgggtcctgcggccgcgacggagcgtggctcactgtacgcgctggtgctgccggttcttgacggcggcttccgagccagcctccaggggagccccgaggacgagctacagttctgcttcgagagcggtgatcctgatgtccagacgatggaagcagttgatgcagtgttcgtcaactcaggggacaaccccttcaagcttctgaaagaatccatcaagatgttgtccaagatcaaaggaactttcagtcatatagaggacaaggagatcccttcaaatttgaactggtttgggtggtgcacttgggatgcattttacaaagctgttaacccaagtgggattgaggagggccttcaaagtctgcgtgaaggtggtgtgccaccaaggtttctgattatagatgatggttggcaagaaacagttgacgaaatcaaggaagtggatgaagccctccgtgagcagactgtatttgcgcagaggctggctgatctgaaggagaatcataagttcaggggggaaacctgcaagaatcttgaggaccttgttaaaacgataaaagaaaaacatggagtcaagtgcgtctacatgtggcatgctttacttggatattggggaggcaccttagcagcatccaaagtgatgaagaagtataatccaaagcttgtttatccagtccaatcgcggggtaatgttgcaaatctgagggatattgccatggatagcttggagaaatttggagtgggtatcgttgatcctgacaagatatatgagttctacaatgatcagcacagctacctttctagtgtgggtgtggatggcgtgaaggttgatgttcagaacgtgttggaaactcttggacgcggatttggtggtcgtgttgcagtaactcgaaagtaccagcaggctcttgaggaatcaattgcccagaacttcaaaacaaacaacctaatctgttgcatgagtcacaattcagacagcatctttagtgccttgaagagtgcagttgctagagcctcagaagatttcatgcctcgggaaccaacactgcaaactctgcacattgcgtctgtggcattcaatagcctattgttgggagaaatcttcatacctgactgggatatgttccatagcaagcatgaatcagcggaattccacggagcagctagagccctgagtggaggtggtgtttatgtcagtgacaaacctggggtgcatgatttcagtgttctaaaaaagcttgttctaccagatggttcgattctaagagcaaggtatgctggtcgtcctacacgcgattgtctgttcactgacccagtcatggatggcaaa

SEQ ID NO: 102674 - DNA, 1961 bp, Zea Mays
atgctcataaccaaaacagcagggtgtgcatggagaccctccgcgcttacgatgagctgtttccatgggccctccttgtcctcgttaccaccattaccatcctctacctgaagcaactgttggtcgcagcgttcaagagacgcgccaccagctctccttctctcccatgcccaagaggcctcccgctcatcggcaacctccaccagctgggcacggtcccgcatgacgccctcgccgcgctcgccgccaagcacgcagcgccggtgatgctgctccggctagggtcggtgcgcacgctcgtggtgtccaccgccgacgcgctgcgcgccgtgttccagcccaacgacagggcgatgtccggccgcccggcgctgtgcgcggccaccaggatcacctacggcctgcaggacatcgtgttctcgcccccggacggcgggttctggcgcacggcgcgccgcgcgtcgctgtcggagctgctgagcgccccgcgcgtgcgcagcttccgcgaggtccgggagcaggaggccgccgcgctcgtcgccgccgtaacggacatgtccaggagcggctctcccgtgaacctgagcgaggagcttatggcgacgagcaacaagatcctgcggcgcgtcgcgttcggcgacggcggcggggaggaagagagcatccgggccagcgccgtcctcgaggagacgcagaagcttctgggcggcttctttgtggccgattacatgccgtggctggggtggctagacgcgctccggggcctccggaggcggctggagcggaacttccatgagctcgacgcgttctacgaaaaggtcatcgacgaccacctcagcaagcgcggtgacgacgacgatgcctccaagtccaagggcgaggacttggtggacgtgctccttcgcctgcacggcgatccggcttaccagagcacgttcaacagccgcgaccagatcaaaggcatccttacggacatgttcatcgccgggacagacacagcggcggcgacggtggaatggacaatgacggagctagtaaggcacccggacatcctcgccaaggcgcagaaggaggtgcgcggcgccgtggtcggcagagacgacgacatagtccgcgagtccgacctcccgcggctcaagtacctgaagcaggtgatcagggaggcgatgcgggtgcacccgccagtgccgctgctggtgccccgggagaccatcgagccctgcacggtgtacggctgcgagatcccggccaggacgcgggtgttggtgaacgccaaggccatcgggcaggaccccgacgcgtggggcgccgacgcggcgcggttcgtgccggagcggcacgaggagatcgcggacctcagcgaccacaagccgtggcacgacagcttctcgctggtgccgttcggggtcggccggaggagctgccccggcgtgcacttcgccacctccgtggtcgagctgctgctggccaacctgctgttttgcttcgactggcgcgcgccgcacggcggggtcgttgatctggagcaggagaccgggctcaccgtgcacaggaagcatcccctcgtgctcgtagctcgaagggtacgcgtgcaggcgccaagcgatgatgagctcgacggacgtttctccgccatgcattccgttcctagctagtttatttttaacgtaactaaaccggagggagtataatatacttgcatgttgctgtgatccaagtgacgtgtatatatatatgctactatctctgcgtttgtttgttctgttgtgaaatgaatatgttatcttcgattggaaggaacgatcgatttgctatcccatctagtgtatgttttgacaaaatcctgataaaactatgccttcgagtagcgcgcgcgcgcgcttgtgcgtgtgtgtatcgttttattttgaatttatttttcgagggataaaacaatgtaacaggaattcctaccttacgta

SEQ ID NO: 102675 - DNA, 518 bp, Zea Mays
atctgcatttggtcaataatgaattttactcggctcgcataagggtaagtgccgaacaaattcacatgagctacgagtaggaacaggcaccaagacagaacgaaatagcagcagaaggagcagacgggatcagtgcgtacttgtgctcggggtggggcttgaaggcgttgagcggcggcttcttgtgcgcgacggcgtggtcaatgagcgcgaggcggcaggcgcgggaccgcgcgtaggcctccttctcccgctccggcagctcgtgccccgtctccgcgcaccgccaccgcccgctgccgggccttcgctcttcgccatgaccatgacttcatgagggggttgttcgtaactgggggctggaaagtggaaaggccgaaaagatttgggagcgagggttttggccgttttgtactaggttgctcgtcagttgcaaaaatggtcaccgtccggctggctatcttcattgccaaagcaatcactcgtttattgcaagcgtgtaatcaaatgatttgtac

SEQ ID NO: 102676 - DNA, 1014 bp, Zea Mays
cgcatcccaccatccccgtgcgaccccttcaccgtgatgctcgcccacgcatgatagaaggcacgcccgcatctcgattctcaccaaccccgccccgccaccgcaatcttcgcctctcactgacttcgatggaaggcgtaccgctcgccctcacctgcccgcgacgctcacccctccccattgctggggccagtgtaggagaagaggacggaggttagcagatctcgttgcgcttccatcgaacgacgacattcacaggaggagcggtacctgtttgcctatgcaaacgacgacgtagggatcgctggatcagaggtcgcggacggcgaggttcaccccctcaccacgtgcagcttcagcagcccaacgagatggtccagcatggggatttccctcttcttcaccactgagttctctcttctctgactactatatattcatccaagcagatctcgtcgcgctggtggagatggccgaagccgcggagtgcgaggaggagcgggacctatttgccgatgcgaatgacgacgtagggatcgctggattggaggtcgcggatggcgaggttcacccccctcaccacgcgcagcttcagcagcccgacgagatggtccagcatggtgatttccctcttcttcaccactgagttctctcttctctgactactatatattcatccatcagaaacattagagaaacaaattgttgggtattttcctgacgtaactgaggtctttgttgaagtcacagaagaagaacagcagaatgttctttactggcacaacgagaagctgacagttgcttttgcattacttagttcagaacctaatactatgataagaattgtgaaaaacttgaggatgtgtttagactgccataacacaatcaaattgatttcaaggttgtatggaagggaggttgttgtgagggacaaaacacgcttccatcattttagacatggattctgctcttgtaaagactatcggtaactccttatgcatcaaccacataacg

SEQ ID NO: 102677 - DNA, 881 bp, Zea Mays
tcttttaaatctgcaaggtggtgtctgttttttattcaacaggaggtctacatggtggtgtctataggtctagatgtcaagcctggttccactgttaagtgtgagcctggatatggttttatgttgcacctttcccaggctgctcttgggaatcgaagaagagtgataatgcgctattgccttgatgtatgtcaaaattgatgatcagaaacttgccattggaaccctctctgttgacaagaacccacacatacaatttgatctggttttcgataaagagtttgagctgtcgcacacatcaaaaactaccatcgtcttcttcactggctacaaggttgagcaaccattcaaggaagatggaatggatcttgattctgaagatgaagacgaggagctgaatgttccagtagtcaaggaaaatggcaaagctagtgggaagatacagaaaagtcaagaaaaggcagttccttgattttttcaaaaagaaagatatttttaataatgacctcggtggaccctatgcatttcttgagccactttttgttcaaagaccccttctatataagatacagacaaggagaaaaaagaggattcagataactgtatcactttctgcaagtacaaatacacaagcacagaatatctttcccctttatgtacttttagctagacctaccagtaatatttcgcttgagggcattctccgatatatcgagcgggatgatgcttggtggacgtgtacatactaatattaatcggtctcgaagcttccgatacactcagttctcacatgaacgagtgggatggacctccctagaaaccaaacactcctgaatcgcagtcatcatcagcgaacgacaatctgtgtgatgttgcgatgt

SEQ ID NO: 102678 - DNA, 871 bp, Zea Mays
atggctaaaggtctagatgtcaagcctggttccactgttaagtgtgagcctggatatggttttatgttgcacctttcccaggctgctcttgggaatcgaagaagagtgataatgcgctattgccttgatatttttacagatatttttaataatgacctcggtggaccctatgcatttcttgagttcaacagcttgataagtgggttcaatatcgtgcctatgtctcctatgtttaatgtcatggcatgggcacagccaagagtggctagcccacacggagcgaaccacacgggaaaagttgatgggaagaaacaaaaaagtcaagaaaaggcagttcctgcagcttcaaaatcaagtccggcttccaagaagagcaaggatgacgatgattctgatgaggacgagactgatgattctaacgaggacgagacagacgattctgatgagggtgagggtttgtctcctgaagaaggcgatgatgatgattcaagtgatgaagatgataccagtgacgatgaggaggaagacacttcaactcctaagaagcatgaggcaggcaagaagagagctgctgaaagttccgtgctgaaaactcctctatctgataagaaagcaaaagttgccacaccgtcagctcaaaagacaggtgtgccattgaacggactaacaaaactgtcgtcgaagattgtataggtgtgactctgttcaaggatagtcttgaggttctagaacagaagagtagtggtgtgcatcagtgtatctgtttaccggataatagtggttggttaggtgtgtgcagaaaaagtttagtgttatggtttgtatgtgatacatattaactgtgccttggaatgttcatgtgttgtcctga

SEQ ID NO: 102679 - DNA, 2212 bp, Zea Mays
cagccaacaagacccccctgcctcgcctcgattccacccacacccacatcctcacctccctccgcctccgagtgccaccaaaccctagatctcgcaccggcggcagccatgtccaagccatggggtggcgtcggcgcgtgggcgctggatgccgagcgcgccgaggaggaggagcgcgagcaggtcctggccttcccggcgcccgagccacccgcggccgcgggcggcgccgccagcttcccgagcctccgcgaggcggcctctgctggcggcaagggcaaatcgaagaagaagaacaagggcaccacgctgtccctgtccgagttcaccaccttcggcgcggccgcggcccagcggcgcgcggcgcccgtcgagcccaagggcctgacccacgaggagatgatgctgctgcccacgggcccccgggaacgctcggccgaggagctggaccgctctcgcgggttccgctcctacggcggcggcggcggcggcggcttcggcgcaggcgctggaggggagcgccgcggcgggttcgacgacgagggccgccgcgggccgggcagaagctccgatcttgacatgacatcccgagcggacgaggctgacgactggggcgccactaagaagttcaccccggctcccgccgactccggccgccgcgataggttcggtgggccttcccctctcggccgcgctgatgatattgacgactggtcacgcgacaagaagccgctcccgtcgcgctaccccagccttggttctgcaggtggcttccgtgactcgccgggcttccgcgactcatcagcttcttctgacgctgaccgttgggtccgtggagccacccctatgccacacaacggccagggggcgggggagaggccacgcatcgtccttaatccacctaaacgtgacccgtcaactgcctctaccccacctgctgaggtggctcgcaaccggccaagcccttttggggctgcaaggccccgggaggatgtgctggctgagaagggggtggattggaagaagtttgagaatgagattgaccagaagaccagccgccctaccagttcgcactccagcaggccgaatagtgctcattcctcccgccctggcagccctgggtcacaggtttcggccgttgggagcgaaggagcaccaagggcacggccaaaggttaacccatttggtgatgccaagccaagagaagtggtgttgcaggagaaagggaaagactggaggaaaattgatgttgagctggagcatcgtgctataaataggccggagtctgatgaagaaagaaatttgaaagaagaaatcaacctcctgaaggtggatcttaaagaaatcgagggaaagatgagtaatggttctgagcagacatcggtagatgcaaaagatttgtctgagaagatatctatgttggaaagccagcttgagcagctttcaagggagttggatgacaagattcgatttgggcaaaggccacgttctggtgcaggcagggttacaacacttgcacccactagtttaggggaggaaccacaggctacagtggtggacagaccacgttctcgtggtggtatggaaccacccccaaggcaggaagaaagatggggatttcaaggaagccgagaaaggggctcgtttggtggaagcagaaattcagacaggccaatggcaagacagagatggtgaagttgggacaacaagcatctcttagggacacttctggatcgcagtcccttttttgttctgaaaggatgggcaaaaataagtcgttttctgtttgtcgtgtttgtttggtcttagaagattgttgagggtggagataactccacatgaagctattggttgtcaagtctgtatgccgtaggatgctttacatttccctttttgccgtcttccatgtcaaaacaatatctggcaacctccgatactaactgttattcatgggtcactgaattccggatcagcttttgtcataggtcgtttatttcagcattgagtaatggaaaccttgaatttgcacttttactactgccatgccttcattctgtccgttttttttaactagtgtctgtatgttgaggcaacgagctgtgactcccagtcgtctgtattagtttcagactgcgggaatgctttatcacgggtttatatgtgggagattggctggtggctgataagttacccacatgtagagcaaggggcg

SEQ ID NO: 102680 - DNA, 2029 bp, Zea Mays
ggctataaataacccttaaacattattttataagcctcttgattacataatttgattatgaactcactaatgaaagtttttaacatgcaatacgccaccagcacagaactcaaagcatcctggatacattattgaatcgtgtgatgaacaaaagatgttagaaataaaaaattaaaaagaaaaaaaggcccatctaaaagtccattacttgagaaacccaatttccaccagaccctaacctttccattgttccagcgaacgcacacagccgccgctgtttcttcatcttcctcgcagcgccggcgctgaggctcgggctctcagcgacggcggcagcggcagcggcttcccctcccgcctctcgccagtcgcctcgcgccctcgcctccggtcctccgcacaccggtcggtgaccctgcgataatggctcatcgtggacatctagatggactgactggccaagctcctgctcttatgcgccatggttccttcgctgcaggcagcctctctagccgctcacctttgcagtcttcatccacactggagatgctggagaacaagcttgccatgcaaactacagaagtggaaaagcttatcacggagaatcagcggttagcatcaagccatgtggtcttgaggcaggacattgttgatacggagaaagagatgcaaatgatccgcacccacctaggtgaagttcagacagagactgatttgcagattagagatttgttggagagaatcagattaatggaggtagatatacatagtggtaatgtagtgaacaaggagcttcaccaaatgcatatggaggcaaagagacttattactgaaaggcagatgctaacccttgagatagaggatgtgactaaagaattacagaaactctctgcctctggggacaataaaagccttcctgaattgctttctgagctagataggctacggaaagagcatcataatttacgatctcagtttgaatttgagaaaaatacaaacgtcaagcaagttgagcagatgcggacaatggaaatgaacttgataaccatgaccaaacaagctgagaagttacgtgttgatgtggcaaatgctgaaagacgggcacaagcagctgcggctcaagcagcagcacatgcagctggtgcacaggtgacagcttcgcagcctgggacagctcaagctaccacggtttcagcagcagcagccacagactcatatgcaggtgcatataccagctacccccctgcatatcagcagggagcccaggctggggcatatcagcagggtgctcaggctggggtatatcagcagggagcccaggctggggcatatcagcagggagcccaggctggggcatatcagcaggggggccaggatggggcatatcagcagggggctcaggctggggcatatcagcagggagcccaggctggggcatatcagcagggagcccaggctggggcatatcagcagggtgctcaggctggggcatatcagcagggagcccaggctggggcatatcagcagggggcccagtctggggcatatcagcagggggcccaggctggggcatatcagcagggagcccaggatggggcatatcagcagggagcccaggatggggcatatcagcagggtgctcaggctggagcatacaactatgcttatgatgctggcacggcttatgcatatgcaggttactctggctatccagttgcaggctacgcgcaaagtgcagtgcccaactattcctatgctgcacctccgcagccaacaagcagcggtgcagctacgaacgccgcaggaggccagtatggggcagttggtagtgctggatatcctactgggcaagttcagccgagcagtggcactgcaaatgcagcgcaagcacctcctcctccaccaccaccggcagcaccatatccccccagcacatatgaccaaaccagaggagcccagagataaaatctgggatgtaaaccagatggatgtttgccatgcacatttgttgagcagacaaatatggtga

SEQ ID NO: 102681 - DNA, 2400 bp, Zea Mays
ggctataaataacccttaaacattattttataagcctcttgattacataatttgattatgaactcactaatgaaagtttttaacatgcaatacgccaccagcacagaactcaaagcatcctggatacattattgaatcgtgtgatgaacaaaagatgttagaaataaaaaattaaaaagaaaaaaaggcccatctaaaagtccattacttgagaaacccaatttccaccagaccctaacctttccattgttccagcgaacgcacacagccgccgctgtttcttcatcttcctcgcagcgccggcgctgaggctcgggctctcagcgacggcggcagcggcagcggcttcccctcccgcctctcgccagtcgcctcgcgccctcgcctccggtcctccgcacaccggtcggtgaccctgcgtgcgtgcctctctagtggctcctggttcagatggcgggctgctgacacggccgcgccgcccgcggcctgagggcagcgggagccaccagctgctgctccaccaaggcggtctcgccgctttgaggagcgcttatgcccaaagcgaagcgttagcgcttcagcgcgctgaagcgtgcgcttagtgctgttttttagaaccctgatctttttcatcattccctaccattttttgtattttcaggataatggctcatcgtggacatctagatggactgactggccaagctcctgctcttatgcgccatggttccttcgctgcaggcagcctctctagccgctcacctttgcagtcttcatccacactggagatgctggagaacaagcttgccatgcaaactacagaagtggaaaagcttatcacggagaatcagcggttagcatcaagccatgtggtcttgaggcaggacattgttgatacggagaaagagatgcaaatgatccgcacccacctaggtgaagttcagacagagactgatttgcagattagagatttgttggagagaatcagattaatggaggtagatatacatagtggtaatgtagtgaacaaggagcttcaccaaatgcatatggaggcaaagagacttattactgaaaggcagatgctaacccttgagatagaggatgtgactaaagaattacagaaactctctgcctctggggacaataaaagccttcctgaattgctttctgagctagataggctacggaaagagcatcataatttacgatctcagtttgaatttgagaaaaatacaaacgtcaagcaagttgagcagatgcggacaatggaaatgaacttgataaccatgaccaaacaagctgagaagttacgtgttgatgtggcaaatgctgaaagacgggcacaagcagctgcggctcaagcagcagcacatgcagctggtgcacaggtgacagcttcgcagcctgggacagctcaagctaccacggtttcagcagcagcagccacagactcatatgcaggtgcatataccagctacccccctgcatatcagcagggagcccaggctggggcatatcagcagggtgctcaggctggggtatatcagcagggagcccaggctggggcatatcagcagggagcccaggctggggcatatcagcaggggggccaggatggggcatatcagcagggggctcaggctggggcatatcagcagggagcccaggctggggcatatcagcagggagcccaggctggggcatatcagcagggtgctcaggctggggcatatcagcagggagcccaggctggggcatatcagcagggggcccagtctggggcatatcagcagggggcccaggctggggcatatcagcagggagcccaggatggggcatatcagcagggagcccaggatggggcatatcagcagggtgctcaggctggagcatacaactatgcttatgatgctggcacggcttatgcatatgcaggttactctggctatccagttgcaggctacgcgcaaagtgcagtgcccaactattcctatgctgcacctccgcagccaacaagcagcggtgcagctacgaacgccgcaggaggccagtatggggcagttggtagtgctggatatcctactgggcaagttcagccgagcagtggcactgcaaatgcagcgcaagcacctcctcctccaccaccaccggcagcaccatatccccccagcacatatgaccaaaccagaggagcccagagataaaatctgggatgtaaaccagatggatgtttgccatgcacatttgttgagcagacaaatatggtgaaatctgggatgtaaaaccagatggctgtctgtgcctccatcccattgactagggcgtattttcaccaatattgtgcctccagtgcaatttcttctgtgttatatatcaccaccatttgttgagcaccgt

SEQ ID NO: 102682 - DNA, 2158 bp, Zea Mays
ggctataaataacccttaaacattattttataagcctcttgattacataatttgattatgaactcactaatgaaagtttttaacatgcaatacgccaccagcacagaactcaaagcatcctggatacattattgaatcgtgtgatgaacaaaagatgttagaaataaaaaattaaaaagaaaaaaaggcccatctaaaagtccattacttgagaaacccaatttccaccagaccctaacctttccattgttccagcgaacgcacacagccgccgctgtttcttcatcttcctcgcagcgccggcgctgaggctcgggctctcagcgacggcggcagcggcagcggcttcccctcccgcctctcgccagtcgcctcgcgccctcgcctccggtcctccgcacaccggtcggtgaccctgcgataatggctcatcgtggacatctagatggactgactggccaagctcctgctcttatgcgccatggttccttcgctgcaggcagcctctctagccgctcacctttgcagtcttcatccacactggagatgctggagaacaagcttgccatgcaaactacagaagtggaaaagcttatcacggagaatcagcggttagcatcaagccatgtggtcttgaggcaggacattgttgatacggagaaagagatgcaaatgatccgcacccacctaggtgaagttcagacagagactgatttgcagattagagatttgttggagagaatcagattaatggaggtagatatacatagtggtaatgtagtgaacaaggagcttcaccaaatgcatatggaggcaaagagacttattactgaaaggcagatgctaacccttgagatagaggatgtgactaaagaattacagaaactctctgcctctggggacaataaaagccttcctgaattgctttctgagctagataggctacggaaagagcatcataatttacgatctcagtttgaatttgagaaaaatacaaacgtcaagcaagttgagcagatgcggacaatggaaatgaacttgataaccatgaccaaacaagctgagaagttacgtgttgatgtggcaaatgctgaaagacgggcacaagcagctgcggctcaagcagcagcacatgcagctggtgcacaggtgacagcttcgcagcctgggacagctcaagctaccacggtttcagcagcagcagccacagactcatatgcaggtgcatataccagctacccccctgcatatcagcagggagcccaggctggggcatatcagcagggtgctcaggctggggtatatcagcagggagcccaggctggggcatatcagcagggagcccaggctggggcatatcagcaggggggccaggatggggcatatcagcagggggctcaggctggggcatatcagcagggagcccaggctggggcatatcagcagggagcccaggctggggcatatcagcagggtgctcaggctggggcatatcagcagggagcccaggctggggcatatcagcagggggcccagtctggggcatatcagcagggggcccaggctggggcatatcagcagggagcccaggatggggcatatcagcagggagcccaggatggggcatatcagcagggtgctcaggctggagcatacaactatgcttatgatgctggcacggcttatgcatatgcaggttactctggctatccagttgcaggctacgcgcaaagtgcagtgcccaactattcctatgctgcacctccgcagccaacaagcagcggtgcagctacgaacgccgcaggaggccagtatggggcagttggtagtgctggatatcctactgggcaagttcagccgagcagtggcactgcaaatgcagcgcaagcacctcctcctccaccaccaccggcagcaccatatccccccagcacatatgaccaaaccagaggagcccagagataaaatctgggatgtaaaccagatggatgtttgccatgcacatttgttgagcagacaaatatggtgaaatctgggatgtaaaaccagatggctgtctgtgcctccatcccattgactagggcgtattttcaccaatattgtgcctccagtgcaatttcttctgtgttatatatcaccaccatttgttgagcaccgt

SEQ ID NO: 102683 - DNA, 2144 bp, Zea Mays
ggctataaataacccttaaacattattttataagcctcttgattacataatttgattatgaactcactaatgaaagtttttaacatgcaatacgccaccagcacagaactcaaagcatcctggatacattattgaatcgtgtgatgaacaaaagatgttagaaataaaaaattaaaaagaaaaaaaggcccatctaaaagtccattacttgagaaacccaatttccaccagaccctaacctttccattgttccagcgaacgcacacagccgccgctgtttcttcatcttcctcgcagcgccggcgctgaggctcgggctctcagcgacggcggcagcggcagcggcttcccctcccgcctctcgccagtcgcctcgcgccctcgcctccggtcctccgcacaccggataatggctcatcgtggacatctagatggactgactggccaagctcctgctcttatgcgccatggttccttcgctgcaggcagcctctctagccgctcacctttgcagtcttcatccacactggagatgctggagaacaagcttgccatgcaaactacagaagtggaaaagcttatcacggagaatcagcggttagcatcaagccatgtggtcttgaggcaggacattgttgatacggagaaagagatgcaaatgatccgcacccacctaggtgaagttcagacagagactgatttgcagattagagatttgttggagagaatcagattaatggaggtagatatacatagtggtaatgtagtgaacaaggagcttcaccaaatgcatatggaggcaaagagacttattactgaaaggcagatgctaacccttgagatagaggatgtgactaaagaattacagaaactctctgcctctggggacaataaaagccttcctgaattgctttctgagctagataggctacggaaagagcatcataatttacgatctcagtttgaatttgagaaaaatacaaacgtcaagcaagttgagcagatgcggacaatggaaatgaacttgataaccatgaccaaacaagctgagaagttacgtgttgatgtggcaaatgctgaaagacgggcacaagcagctgcggctcaagcagcagcacatgcagctggtgcacaggtgacagcttcgcagcctgggacagctcaagctaccacggtttcagcagcagcagccacagactcatatgcaggtgcatataccagctacccccctgcatatcagcagggagcccaggctggggcatatcagcagggtgctcaggctggggtatatcagcagggagcccaggctggggcatatcagcagggagcccaggctggggcatatcagcaggggggccaggatggggcatatcagcagggggctcaggctggggcatatcagcagggagcccaggctggggcatatcagcagggagcccaggctggggcatatcagcagggtgctcaggctggggcatatcagcagggagcccaggctggggcatatcagcagggggcccagtctggggcatatcagcagggggcccaggctggggcatatcagcagggagcccaggatggggcatatcagcagggagcccaggatggggcatatcagcagggtgctcaggctggagcatacaactatgcttatgatgctggcacggcttatgcatatgcaggttactctggctatccagttgcaggctacgcgcaaagtgcagtgcccaactattcctatgctgcacctccgcagccaacaagcagcggtgcagctacgaacgccgcaggaggccagtatggggcagttggtagtgctggatatcctactgggcaagttcagccgagcagtggcactgcaaatgcagcgcaagcacctcctcctccaccaccaccggcagcaccatatccccccagcacatatgaccaaaccagaggagcccagagataaaatctgggatgtaaaccagatggatgtttgccatgcacatttgttgagcagacaaatatggtgaaatctgggatgtaaaaccagatggctgtctgtgcctccatcccattgactagggcgtattttcaccaatattgtgcctccagtgcaatttcttctgtgttatatatcaccaccatttgttgagcaccgt

SEQ ID NO: 102684 - DNA, 2217 bp, Zea Mays
agagtacatatatttattttaaacgtcattatgtaaactgtatagtctaaaaaacaaaaggagtttttatgtggccatatacacatatcctacgaattgggggccgcagcgacaagcgtgaggacaaaatcgtacatctcacaatcgcaagcgccggcccgggcgatggatatgaggggccgccggccgccgcaccaggcaccaccgcaccgcaccgcaccacccaaacggctataattaggcggttccaaaggaaacgcccctctctcgctcttgcggcggcgaccccgcggtttcgagccaatcaccgccaagtcctcgactccagcgcccttgccttgccaccccggccccagctaccacggggagctgcaaataacctgcggccccgaggaccggacagcaaaagcgcccaaccgctggagctccgccccggcgatcacccgccgggaacgtagcgcccggctccacagccgcgccattcgagctgctgctcgcgcgcggctggttcttctcggggggattttctttttgcgggcaccctccgctccccctcaccgccctgccgtcagccgtctcgttttcggattcgtttgctccggcggtggccgacctgccgtgcggggcgcggtgatgccggaggtggggcagtacgggtacaagaagaccgacggcatctgcgacagcgtgtgcggcgagcctgtgtcaaagacagctctgacgatgtcaaggctaaagtgcgctctccggggatttgatttaagggcacttatggtcctcttgattggtgtgccaattctaatcctaatgatatatgcgcatggtcagaaggtcacatacttcctgcggcccatctgggaatctcctcccaagcccttcaagacaatccctcactactaccatgagaacgtcaccatggagaacctgtgcaagttacatggttggaaagtccgtgacttcccgcgtcgtgtctttgatgctgtactcttcagcaatgagcttgatatcctggagatccgctggaatgagcttagtccctatgtgtccgagtttgtgcttcttgaatccaactcaacctttactggcataaaaaagcccctccacttcaaggaaaacaagcaccgttttgggttcgctaaatcacggctgacatatggtaatattgggggaaggttcgtgaagggggagaacccatttgttgaggagtcatatcagagggttgccctggaccggcttcttaagcttgcaagaatagaagacgatgacctgctgatcatgtcggacgttgatgaaatcccgagcggccacacaatcgatctcttaaggtggtgcgacggcattccagacatacttcaccttcagctcaggaattatctctactcgttcgagtttttcctggacgacaagagctggagggcatcgatacacaagtaccaagctggaaagacgaggtacgcgcacttccggcaggcagacgagctcctcgccgattcagggtggcattgcagcttctgcttccgctacataagcgatttcgcattcaagatgcaagcgtatagccacgtcgaccggatcaggttcaagtacttcctgaaccctgagaggatccaagatgtcatctgcagaggggcggaccttttcgatatgcttccagaagagtacacgttccaagagatcatcgccaagctggggccgatcccgagcacgtattctggcgttcatcttcctagctatctgctaaggaatgtcgaccggtttagataccttctaccgggcaactgcaggagagaaagtggctaggttttatggcccactaccctgcaacctgttgtgcgtgggtgggtgggtgccagtgccacactgccccgctgcaaagctgctgtccatgggatatctgtggcagttcacctggtacggttgcctaacgtagttgaacaaatgctttggggaagaattggttcatggatgggggtgagcacatgattctctaatgtgtaatagaacatgggaggaggatctaacggcatagcgcacgcttggtcctggctgggtgtgcatgagctgagcggtttgtcattgtcattcattacttccctgattgatatatataaactcaaaaaggctgttgtagattgcaatccaagtggtatttcagaattacatattgtagaaccggaccttgctcgtcagatgattgatactccctcagttcttttt

SEQ ID NO: 102685 - DNA, 1665 bp, Zea Mays
ctctcacaagtttctctgccctctcttactactgctggggtgcgcggcgctccacccgcagcagcaacagccggctcccgctccgctgccccgccgggccgctcccggccatggatacttcgtggattatgaatgggttgggtcttgctgaaaaaataagaagcgcaacccagtcgttcaccctccgacttggtgagctttttgcaaaaccgcgtaccaaatgcacctactgcgactgcgtcattgacattagcaatgtttctttggtgtggccagcccttcctgctggtgtcaaatttgatcccacggaccttgaaattctgcagcatctacaagaaaaatccagcctgccgaattcagtgtcacatacgcttattgatgaatttatacctactataaaagaggaggagggaatttgctatacacatcccaaaaacttccctggtataaagatggatggtagctacctccatttctttaatagagtactaaacgcatatgacactggtacccgcaagcgtcgacggattattgccaccggcgacatttgtgatggtgttgttaacgggaacagcaggtggcataagactggagcatccaaacccgtatttgacgagaatggtgtgagaaaaggttggaagaagatcttggttctttataaagctcccaagaaagttggtgacagaccagaaagagagaactgggtgatgcatcagtaccatcttggtgtaaatgaagatgaaagtaatggggaattcgtagtctgtaaagtattctaccaatcgccattgaagaaaaacggcaagtctaaaacagatgttgtagtcgagtctgatgcatctgttgcaaaaatcaatcctaggaccccaatgacagatcctccccagcgccgtcggctgaacaacagctcatgcaataccgggcagcatacccccactcaggatgacagggggaagaagaatgtggcacatcaaagatgaagactgaagccgccgaatgctctgcatgctttgctgaatcatcaccggctattcctacctcggatgcacccgtgaggaccccaatgacagatcgtccacagccccgtcgcctgaacaacagccgatgcaacacccggcggtgtacccccattcagtcggatcagggggcagaagaatgtggcacatccaaggtgaagatcgaagcagccgaatgctcctctgcatgcattgctgaattatcacctgctattcctacctcggctgaacccatgcagcctacggatgccctggacgcgtctctgcctgtggatgacctgtttcatgggctgcttgacctggataacactcttccattcactgaaacaccttcaggtggtggtatcagtttagatgacatcttcggaccactggatagccttggggcctggccggacggcttcctctgacgcgaagaaggctcggagctggcggcagtgacgctgctgggaggagccagttctgtatatgactgcagtgtgttaatcatcgccttgcgagatgcttcgtgcgcaagattgcatttcggcatctcatgggaagttttgtacactaaatagaaccgagctgtttgtcttatccatgttgttgtgcaatgtatgtgtagtgacgttgtgatgccagccttataaaagaaatctatctatag

SEQ ID NO: 102686 - DNA, 2166 bp, Zea Mays
atggcgccgcccacctcccccgccgccgtggcggcggccgcccgcgcgtctccgacgccggccgctgcgctcgcgctcttcaagtcggcgctttccgcagaccgtgctctgtgcccgctttccgtgctcccgcacctctccgcgtccccgtcgctgccgcacctcctcctcaccgcctccgccgccgcgcgcccccacgccacctcactccgcctctacgcgcagctcaagtcgctctccgtccccatccccgtcgcctcgctccacccgctgctctcctccctcccctccgcccccgccttcgccctcttcgccgacatctaccgcctccgcctaccgctctgcaccaccaccttcaacatcatgctccgccacctctgcgccacgggtaagcccgtgcgcgcgctcgagctgctccgccagatgccccgcccaaacgccgtcacctacaacaccgtcatagccgggttctgcgcgcgcggccgtgtccaggccgcgctggaggtcatgcgcgagatgcgggagcgcggagggattgctcctgacaagtacacctatgccacactgatctccgggtggtgcaagatcggccgaatggaggacgccgtgaaggtgttcgacgaaatgctgaccaagggagaggtggcaccatctgcggtgatgtacaacgcattgatcggtggctactgtgacgtgggcaaactggatgtggctctgcaataccgggaggatatggtacagcgagggattgccatgacagttgctacatacaatttgcttatgcatgcgttgttcatggatgcacgtgcatcagatgcttatgctgtgcttgaggagatgcagaagaatggtttttccccagacgtgttcacgtataacatactaatcaatgggtattgcaaagagggcaatgagaagaaagcactggaggtgtttgaggagatgtctcagaaaggggtgcgtgcaactgcagtgacctacacgtcattgatatatgttttttccaggaaagggcaagttcaggagacggataggttgtttaacgtggctgtgaagaagggcatcaggcctgacgttgtcatgtacaatgctctgatcaatagccactgcacaggtggtgatatggaaagagcatatgagatcatggcagagatggagaagaagagaatccccccagatgatatgacatacaatacgctgatgagggggttttgcttgcttgggcgacttgatgaagctcgcacgctcattgacgagatgacaaagaggggtattcaaccggaccttgtcagctataacacgctgatcagtggctatagcatgaagggtgacataaaggacgctttgagagtccgggatgagatgatggataaggggttcaatccaacacttatgacatataatgcgcttatacaggggctgtgcaagattagacagggagatgacgccgagaacctgatgaaagagatggtggcgaagggtatcaccccagatgacagcacatatatctccctgattgagggacttaccactgaagatgaacgaatggctgcagcagatgctgcaaaagcttgagcttgctaggaagcacatcataagctcaatgttcgcagtggaccaaagacttgtttgttcaacatgtgctggattgtattatagcattttacaacgccatagcatttcctgacaaagcagtgaatacaagttgccagttccatgattagcagcattggcaataagggccaggtgacactagcattttatgcaccagtggcccttaacaaagttgcaggcctttgtcaacagtgctttcagtcaatctgtgatgaatacccgtaaacattaaggatggattaaaaaggcatacttgatgttttgaaggctttgaacaatagtaagtggagtctcctttcaatctggttagattacaagtcatcttgtttattttttttgtttctatgttccctacagtcataatcttctactccctctattatgaattgtaagccgttttggtttattaggcgcatatcttttgatatgtatctaggatatacaatttcatctaggtatagagtagaacttatgaatctatatatcaaaaaatgtatatgctatctaacacgtttaatcaagatagtatatgagtagaagatcatggatcgt

SEQ ID NO: 102687 - DNA, 558 bp, Zea Mays
cgcgcaatgaaaccagcggaggcaaagacgcgggatccggtcgccgacgtggagaagcagcagccgttgctgctgccgccttccacggcggccaaggagaatgcgccgtcgggagacgcctgcggctgcgaggcgctcccccgcgcctcgccaacggcggcgcgcacgctggcgctggtggtcctggtggcaggcgcggccttcgcggcgcagctggcggcgcgcgaggagtacgtgctcctggccgtcttcgcgtcgcagctggccagcttctgcctgttcacgtcgctgctggcgctgtgcgccctcccggagggcgccgggcgccgccgccgcgcgaggtgggcggccagggcggccgggcaggtgctgcagtggtccgtcgccatggcggtccccacgagcatggcgtgctgggtggtccagagcgcgccgcccgccgtcggtgccgcgctgctggggctcgccctggccgccgtcctagcctgcaacgcggagctcgtgcgcgccctgtggcctgtgcgtgcagggacctcgcctcacaccgacggcctatag

SEQ ID NO: 102688 - DNA, 936 bp, Zea Mays
catgctgatattgtcaatcaaggaaaactggtgtctgatgagatcatcataaatctgctgtcaagacgcctagaagagggagaagaaaagggtgaattggggttcatccttgatggctttcctcgaaccatgagacaagcgaaaatggctgatgccgaggatatccagcccctcgtctgcgacaacagaactggcatggtcaaggctgggttcgctggcgacgatgccccgagggccgtcttccccagcatcgtggggcgcccgcgccacactggtgtcatggtcgagatggggcagaaggacgcctacgtcggtgacgaggcgcagtccaagaggggtatccggaccctcaagtaccccatcgagcatgggatcgtcagcaactgggacgacatggagaagatctggcatcacaccttctacaacgagctccgcgtggctcccgaggagcaccccatcctcctcaccgaggcgcccctgaaccccaaggctaacaaggagaagatgacccagatcatgttcgagaccttcaacacccccgctatgtacgtcgccatccaggccgtgctctctctgtatgccagtggtcgtaccacaggtatcgtgctcgactcgggagatggtgtgagccacaccgcccccatctacgagggatacgccctcccccacgccatccttcgtcttgacctggccggtcgtgacctcatcgactgctcatctgcgctagactgtgtttgttcaaaagatattattcaaaatttaactgaaagattttattccttgcacaattattgtattgctttctttgttgaatattatttgcttggtgatgggctgctgttgctgctagcaggattgagaaccgatgggctgcaatctattgttggtgcctggtatcaaagagggagacaggggtgcacctgttcacaatcttga

SEQ ID NO: 102689 - DNA, 207 bp, Zea Mays
atggcgcggctgcagatgcagcacggcgtgaacggcggtggcagcggaggtgtgggcgcgtgtgagggagagggagagggaaatggggtgctggggcaaatggaaccgtcgtgggggagtcatgcgtggagggcggtttcggagaagataaacaggaggtggggcgtggggcagattggtgagtggggcccaagcgcaggacgatag

SEQ ID NO: 102690 - DNA, 744 bp, Zea Mays
atggacatggagctggagcacggagaggctgaagacgacagagggagttattcctcctcctccaagcggagcttcggcgcctcgtcggacgcaaccgccagcagcacgccaagcaagctgcaagctctgagcaagatgatcagcgccaaggccgccggagtccagagcacgggagccgccgaggcgagcaccgccggagcagccgtgactggttttctagacaaagtagtactgtttactgtctgcttcggcgccaccgccaccgacaccgccaccgacggcgccattcgtctcctccccggcagctctggtgctgttggtcgaccgtgggagtgctgtgactatgtcaccaaggacccgattatcagcaggccgccccggtggcgctgcaacgacgtggtggacaagtgctccgccgactgccaagagtgcgaggagtcgctggccggcgacggcttcgtctgcgatgactggatcttcagcctgctcgagcccccggtctgcacacccaggccgtgggactgttgcgacttcgccgtctgcacaagggaatacatccccaactgccggtgcggcgacgtgggggagtcgtgccccagcaactgcaaagtgtgcgagtttgtggagtcggaccctcctggctaccgatgcctagacgtcttccacggctatcctggccccaggtgcacgccatttggatcggtaaaagcaattagctcagctcagctacttgctagtacgtag

SEQ ID NO: 102691 - DNA, 109 bp, Zea Mays
atattttcttttcttatttactattcccttttttgtttacacatttcaaattcaaatgcaagataaagtttaagaattcaaatttaatgcacactcaaaattgatcatg

SEQ ID NO: 102692 - DNA, 253 bp, Zea Mays
ctaagggattgagcagggctcaagctgaatgggctgcgactgctactacccgcaatgtgaatgcctatgggcagaaggaagagggaccaagccgctggcaggagaggaaggaagccaagagtcagatgtatctgatgagtacagagaaggttgcgaagctgggcactgtgaagcaaaaagcttcagaaacttcttctgttggcgcatatacccaatgccagaagtgtttccagcatggtcactggacatatga

SEQ ID NO: 102693 - DNA, 1002 bp, Zea Mays
gcggcctaggcaggtttttcttattttctttcttctttttcctttcttttctatttttaggtttcaaattttgtttgaacaaaatgagatggatgtatattaatatgatcaacgactattcattttcagtagactactttattggatgatcatatccacactccctacaccgccacacatggggatgaaattaaatcgaacgagagtggcagcagctagcgatcgagctaggctaatcgtccatgtcgggacgaacaaccagatgttagctttgtacgctagccacttttatttttatttgtggacgtacgtatactagcaagtagccgcgcgcgctgcgctacgctacttttagcaagtagctgagctgagctagttgctcgtactgatccatgtcctgcacttgggaccaggatagccgtggaagatgtctcggcattggaagcgaggagggtccgaatgatacagaaactcgcaccgttcgcagttgctcgagcacgactccaccttgtccaggcacatgcagttggggatgtagtcccttgtgcaggccacgctgtcgcagcagtcccacggcctcggtgtgcagaccgggggctcggtcaggcttaagataaagtcaccgcagacgaagccgtcgccggccggcgacgcctcgcagtcctggcagtcggcggagcacttgtccaccacgtcgttgcagcgccacgccggcagggaggcgtccttgatagcggagtcgcagcaattccacggtcgaccaccagcgccaaagctgctggggagacgaatcgcgtcgtcggcgtcggtgtggcgggcgtggctggacctggcggcggtggcgccgaagcagacagcgacaagaagagcgacgaagagcatcgtcgcagggatgacggggctggtgcccatgccgctgcccgctgctatgcctttcttctttctccaagcctgaagttgttgctgatgattattcattcgcaggcgcatggaaataaatac

SEQ ID NO: 102694 - DNA, 2838 bp, Zea Mays
cccccctccctccctgcctccctcggcggctcctcgcggacggagagaaccccgctcccttgcctagggttcccggaaccctagccccgatccgtacgcgcgagggtccccggcgacgaggaggctgctgtgaggggagggggcagaaggcgcgggaggcggaggcctgtgctgtatgtcagatcgtgggagccggcgaggcggaggcggaggaggagactacggacacggtcagctcgcgaacccgctccaatggccgcagctaaggaaaaggcgtcggtatgctgccgcgatgcgcccgcgcgtgtcgctggcgccccagtcgtccccatgcgcgcgatcgccgcgtccccggtcggcaaggtcgtcgccctcgccgcgggaggcggtgagcgcgtttctgcgtcggctgctggctcaagcggcgccgtgatcgaggagatcgccgcggtccagcccaccaccgcgaaggcatcctccaaagggataccaataatgacaagagcccagaggtgtcaccctttggacccattatctgctgctgaaattgcagttgctgtagcaactgtaagagttgctggaagatctcctgaggaaagagacagcatgcgctttgttgaagctgtgctgttggagccagaaaagaatgttgtggcactggccgacgcctacttctttccacctttccaaccatcactgctccctagaagcaaaggttctgctgttattccaagcaggctacctcctaggagggccagacttgttgtctataacaaacaatcaaatgagacaagtatttggatagtggaactatctgaagtgcatgccgctactaggggtggacatcacagagggaaggtgatatcatctgaagttattccggatgttcaacctgccatggatgctatggagtatgctgaatgtgaggctactgtcaaaagttatcctccatttattgaagctatgaagagaagaggtgtggatgacatggatcttgttatggtggatgcttggtgtgctggctactacagcgaagctgatgctcctagtcgcagacttggcaagcctttgatattttgcagaactgagagtgatagccccatggagaatggttatgctcgtcctgtagaaggaatccatgttgttgttgatatgcagaataatgctgtgatagagtttgaagataggaagttggttcctctaccccctccagatcatttgagaaactatactcctggggagacaagaggaggtgttgatcgaagtgatgtaaaaccacttatcatcaatcagcctgagggtccaagttttcgaattaatggctattttgtggaatggcagaagtggaacttccgtattggcttcacccccaaagagggtttggttatctattctgttgcttatgttgatggtagccgtggacgtagacctatagcacataggctgagctttgttgagatggttgttccttatggagatccaagtgaaccacattatcgcaagaatgcatttgatgctggagaagatggacttggaaaaaatgctcattctcttaagaagggatgcgattgcttgggctacataaaatattttgatgcacatttcacaaacttcactggtggtgtggagacaattgagaactgtgtttgtttgcatgaggaggatcatgggatcctttggaaacatcaagactggagaactggtttagcagaagtaaggcggtcaaggaggctcactgtttcatttatctgtacagttgcaaactatgagtatggtttttactggcacttctatcaggatgggaaaatagaggcagaagtaaagcttactggaattctcagtttaggggccttgatgcctggggaatcgaggaaatatggcacaactattgcccctggtctgtatgcaccagttcatcagcatttctttgttgcccgtatggacatggctgttgattgcaaacctaatgaagctcataaccaggtggttgaggttaatgttaaagtggaaagtgcaggcacacataatgtgcataataatgctttctatgctgaagagaagttgctcaaatctgagttgcaagcaatgcgtgattgcgacccttcatctgcccgccactggattgtacgcaacacacgaactgtgaatcggacggggcagccaactggctacaggctcgtacctggttcgaactgcctgcctttggctctgcctgaggcgaaatttctgaggagggctgggttcttgaagcacaacctctgggtcactcaatacaagcgtggcgagatgttccctggaggggagtttcccaaccagaatcctcgcatccatgagggtctgccaacatgggtcaagaatgataggcctctggaggaaaccgacattgttctctggtacgtgttcgggctcacccatatccccaggctagaagattggccagtcatgccggtggagcacataggcttcatgctcatgccacatggattcttcaactgctcgcctgcggtcgacgtgcctcccagctcgtccgatgcggatgtcaaggaagccgagtcgcccaaggccatccagaatagcctcatatcgaagctgtgagctttgctgttctgccgaggaaaaaggatccgcgcgcggctgctctccctactatttttttatcgtattccgcgagtaaaaaggaaaactgctcgatgtccttttgtttgttgcttggtaataccgttctgtttgctataattatcgatcagcgggatgtgaagtactgtttacattgctcgcgttctaataaagtactgtttggacttgcttaaaaaaaaaaaaaaaaaaaaacaacaacaa

SEQ ID NO: 102695 - DNA, 2753 bp, Zea Mays
gaaggcgcgggaggcggaggcctgtgctgtatgtcagatcgtgggagccggcgaggcggaggcggaggaggagactacggacacggtcagctcgcgaacccgctccaatggccgcagctaaggaaaaggcgtcggtatgctgccgcgatgcgcccgcgcgtgtcgctggcgccccagtcgtccccatgcgcgcgatcgccgcgtccccggtcggcaaggtcgtcgccctcgccgcgggaggcggtgagcgcgtttctgcgtcggctgctggctcaagcggcgccgtgatcgaggagatcgccgcggtccagcccaccaccgcgaaggcatcctccaaagggataccaataatgacaagagcccagaggtgtcaccctttggacccattatctgctgctgaaattgcagttgctgtagcaactgtaagagttgctggaagatctcctgaggaaagagacagcatgcgctttgttgaagctgtgctgttggagccagaaaagaatgttgtggcactggccgacgcctacttctttccacctttccaaccatcactgctccctagaagcaaaggttctgctgttattccaagcaggctacctcctaggagggccagacttgttgtctataacaaacaatcaaatgagacaagtatttggatagtggaactatctgaagtgcatgccgctactaggggtggacatcacagagggaaggtgatatcatctgaagttattccggatgttcaacctgccatggatgctatggagtatgctgaatgtgaggctactgtcaaaagttatcctccatttattgaagctatgaagagaagaggtgtggatgacatggatcttgttatggtggatgcttggtgtgctggctactacagcgaagctgatgctcctagtcgcagacttggcaagcctttgatattttgcagaactgagagtgatagccccatggagaatggttatgctcgtcctgtagaaggaatccatgttgttgttgatatgcagaataatgctgtgatagagtttgaagataggaagttggttcctctaccccctccagatcatttgagaaactatactcctggggagacaagaggaggtgttgatcgaagtgatgtaaaaccacttatcatcaatcagcctgagggtccaagttttcgaattaatggctattttgtggaatggcagaagtggaacttccgtattggcttcacccccaaagagggtttggttatctattctgttgcttatgttgatggtagccgtggacgtagacctatagcacataggctgagctttgttgagatggttgttccttatggagatccaagtgaaccacattatcgcaagaatgcatttgatgctggagaagatggacttggaaaaaatgctcattctcttaagaaggttattttattcagttcttgatgtgtatactttgacgttcaaaatttttctttgatttgactatgctctttaacctttttgtgcagggatgcgattgcttgggctacataaaatattttgatgcacatttcacaaacttcactggtggtgtggagacaattgagaactgtgtttgtttgcatgaggaggatcatgggatcctttggaaacatcaagactggagaactggtttagcagaagtaaggcggtcaaggaggctcactgtttcatttatctgtacagttgcaaactatgagtatggtttttactggcacttctatcaggatgggaaaatagaggcagaagtaaagcttactggaattctcagtttaggggccttgatgcctggggaatcgaggaaatatggcacaactattgcccctggtctgtatgcaccagttcatcagcatttctttgttgcccgtatggacatggctgttgattgcaaacctaatgaagctcataaccaggtggttgaggttaatgttaaagtggaaagtgcaggcacacataatgtgcataataatgctttctatgctgaagagaagttgctcaaatctgagttgcaagcaatgcgtgattgcgacccttcatctgcccgccactggattgtacgcaacacacgaactgtgaatcggacggggcagccaactggctacaggctcgtacctggttcgaactgcctgcctttggctctgcctgaggcgaaatttctgaggagggctgggttcttgaagcacaacctctgggtcactcaatacaagcgtggcgagatgttccctggaggggagtttcccaaccagaatcctcgcatccatgagggtctgccaacatgggtcaagaatgataggcctctggaggaaaccgacattgttctctggtacgtgttcgggctcacccatatccccaggctagaagattggccagtcatgccggtggagcacataggcttcatgctcatgccacatggattcttcaactgctcgcctgcggtcgacgtgcctcccagctcgtccgatgcggatgtcaaggaagccgagtcgcccaaggccatccagaatagcctcatatcgaagctgtgagctttgctgttctgccgaggaaaaaggatccgcgcgcggctgctctccctactatttttttatcgtattccgcgagtaaaaaggaaaactgctcgatgtccttttgtttgttgcttggtaataccgttctgtttgctataattatcgatcagcgggatgtgaagtactgtttacattgctcgcgttctaataaagtactgtttggacttgcttaaca

SEQ ID NO: 102696 - DNA, 1411 bp, Zea Mays
gtgtgtcggtctcttgtctcaccaaaccggcgacatggtacatggaggccagcccgtcgcttggcgccacaagtctcggtgccgtccgtccgacaagcggcgccagcgcacgctggctgctcgtgcacgcctctaaatacggccccggacccgccaccaagcgaaggccaatcccgtccgccgccccccaccaaccacgaaccacgcaagcgaacccggccggcgcggggcagcggcgatggcggagatcccggtgatcgacctgcgcctcgccggctcgtcgcccgacgagtcggcgcggctgcgcgacgcgtgcgagcgcctgggctgctttcgggtgaccggccacggcgcgcccgcggggctcctggccgacatgaaggccgccgtgcgcgcgctcttcgacctccccgacgacgccaagcgccgcaacgccgacgtcatccccggcagcggctacgtcgcgccctgccccgccaacccgctctacgaggccttcgggctcctcgacgccgccgcgcccgccgacgtcgacgccttctgcgcgcgcctcgacgcgccgcccaaagtcagggagaccgtcaagacctacgcggagaagatgcacgacgtgatcgtcggcgtcgccggcgagctggccaccagcctggggctgggcctggaggagcactcgttccaggactggccgtgccagttccgcatcaacaggtacaactacacgcaggagacggtgggctcctccggcgtgcagacccacacggactcgggcttcctcaccgtgctccaggaggacgagtgcgtcggcggcctcgaggtgctggaccccgccgccggtgagttcgtgcccgtggaccccgtcgccggctccttcctcgtcaacatcggcgacgtcggcacggtataccactcgccacacgacacgacacgcctcgctccctagcctagctttttttctgacgacgccgagcgtctcgtttcgtttcccaggcgtggagcaacgggaggctccacaacgtgaagcaccgggtgcggtgcgtcgcgcccgtgccgcgcatctccatcgccatgttcctgctggcgcccaaggacgaccgcgtgagcgccccggaggcgttggtcgacgcgggccacccgcgtcggtacaagccgttcaactacgacgactaccggaggctccggctgtccaccggcgagcgcgcaggcgaggcgctcgcgcggatggcggcgtgatgtcgtcacgcacgtgcaagccgttaattataggctcgcgcatgcatacgcctacacgagaggttgtctcgttaagccgttctattaaaatgtgtgggggagaaagatgactaccgtggtgccatgtggattgctatcgggtctgatcaataaaatcttgcaacacttgcacgtgcgattc

SEQ ID NO: 102697 - DNA, 1504 bp, Zea Mays
gtgtgtcggtctcttgtctcaccaaaccggcgacatggtacatggaggccagcccgtcgcttggcgccacaagtctcggtgccgtccgtccgacaagcggcgccagcgcacgctggctgctcgtgcacgcctctaaatacggccccggacccgccaccaagcgaaggccaatcccgtccgccgccccccaccaaccacgaaccacgcaagcgaacccggccggcgcggggcagcggcgatggcggagatcccggtgatcgacctgcgcctcgccggctcgtcgcccgacgagtcggcgcggctgcgcgacgcgtgcgagcgcctgggctgctttcgggtgaccggccacggcgcgcccgcggggctcctggccgacatgaaggccgccgtgcgcgcgctcttcgacctccccgacgacgccaagcgccgcaacgccgacgtcatccccggcagcggctacgtcgcgccctgccccgccaacccgctctacgaggccttcgggctcctcgacgccgccgcgcccgccgacgtcgacgccttctgcgcgcgcctcgacgcgccgcccaaagtcagggagaccgtcaagacctacgcggagaagatgcacgacgtgatcgtcggcgtcgccggcgagctggccaccagcctggggctgggcctggaggagcactcgttccaggactggccgtgccagttccgcatcaacaggtacaactacacgcaggagacggtgggctcctccggcgtgcagacccacacggactcgggcttcctcaccgtgctccaggaggacgagtgcgtcggcggcctcgaggtgctggaccccgccgccggtgagttcgtgcccgtggaccccgtcgccggctccttcctcgtcaacatcggcgacgtcggcacggcgtggagcaacgggaggctccacaacgtgaagcaccgggtgcggtgcgtcgcgcccgtgccgcgcatctccatcgccatgttcctgctggcgcccaaggacgaccgcgtgagcgccccggaggcgttggtcgacgcgggccacccgcgtcggtacaagccgttcaactacgacgactaccggaggctccggctgtccaccggcgagcgcgcaggcgaggcgctcgcgcggatggcggcgtgatgtcgtcacgcacgtgcaagccgttaattataggctcgcgcatgcatacgcctacacgagaggttgtctcgttaagccgttctattaaaatgtgtgggggagaaagatgactaccgtggtgccatgtggattgctatcgggtctgatcaataaaatcttgcaacacttgcacgtgcgattccatatcctagcacgggtgggcgccacgctagtaggtagagaccggagcggccaaaaaatggctacagcaccagtaggtgaactctcaagcaacactggctatcccacttctgacgttgtctctctcatcactatgtatgaccagcgaatgaagtgtttaaaaatctgacgccgtgaaatcaa

SEQ ID NO: 102698 - DNA, 1630 bp, Zea Mays
gtgtgtcggtctcttgtctcaccaaaccggcgacatggtacatggaggccagcccgtcgcttggcgccacaagtctcggtgccgtccgtccgacaagcggcgccagcgcacgctggctgctcgtgcacgcctctaaatacggccccggacccgccaccaagcgaaggccaatcccgtccgccgccccccaccaaccacgaaccacgcaagcgaacccggccggcgcggggcagcggcgatggcggagatcccggtgatcgacctgcgcctcgccggctcgtcgcccgacgagtcggcgcggctgcgcgacgcgtgcgagcgcctgggctgctttcgggtgaccggccacggcgcgcccgcggggctcctggccgacatgaaggccgccgtgcgcgcgctcttcgacctccccgacgacgccaagcgccgcaacgccgacgtcatccccggcagcggctacgtcgcgccctgccccgccaacccgctctacgaggccttcgggctcctcgacgccgccgcgcccgccgacgtcgacgccttctgcgcgcgcctcgacgcgccgcccaaagtcaggttggtcacgctcacgcacgcgcacgtgcccgcgcagaaaaaacgcgccttttcctagtcctttgctcccctttcctcccgaggatcggagcaaatactccggtagtaacgcaatcccgcgcgcagggagaccgtcaagacctacgcggagaagatgcacgacgtgatcgtcggcgtcgccggcgagctggccaccagcctggggctgggcctggaggagcactcgttccaggactggccgtgccagttccgcatcaacaggtacaactacacgcaggagacggtgggctcctccggcgtgcagacccacacggactcgggcttcctcaccgtgctccaggaggacgagtgcgtcggcggcctcgaggtgctggaccccgccgccggtgagttcgtgcccgtggaccccgtcgccggctccttcctcgtcaacatcggcgacgtcggcacggcgtggagcaacgggaggctccacaacgtgaagcaccgggtgcggtgcgtcgcgcccgtgccgcgcatctccatcgccatgttcctgctggcgcccaaggacgaccgcgtgagcgccccggaggcgttggtcgacgcgggccacccgcgtcggtacaagccgttcaactacgacgactaccggaggctccggctgtccaccggcgagcgcgcaggcgaggcgctcgcgcggatggcggcgtgatgtcgtcacgcacgtgcaagccgttaattataggctcgcgcatgcatacgcctacacgagaggttgtctcgttaagccgttctattaaaatgtgtgggggagaaagatgactaccgtggtgccatgtggattgctatcgggtctgatcaataaaatcttgcaacacttgcacgtgcgattccatatcctagcacgggtgggcgccacgctagtaggtagagaccggagcggccaaaaaatggctacagcaccagtaggtgaactctcaagcaacactggctatcccacttctgacgttgtctctctcatcactatgtatgaccagcgaatgaagtgtttaaaaatctgacgccgtgaaatcaa

SEQ ID NO: 102699 - DNA, 474 bp, Zea Mays
aaccccgtctctctcacgtgtctgttccttggagccgcccgtcgccagccgcccccaccgcccacaccaccggccgcccctgccttggccccttccgccgcggccgcggccgcccccgaccccggccccgcccggcgcttccgtttccttggataaccacaacgctcgcccgcccgccggcaagcgaaagcgaagcgagccaacctagccatggagaaggcgatcgatcggcagcgggtcctcctggcgcacctcctcccctccccctccgccacctcctcacagcctcagcttgcggcgtcggcgtgcgcggccggggatagcgccgcctaccagaggtcctcctccttcggggacgatgtcatcacgtaagcctccctccctcttgcctccaacggttcctcccccctctctctccgatatactcttttcttccttttctgttcctttcctccttttgtgatcctgctcgat

SEQ ID NO: 102700 - DNA, 915 bp, Zea Mays
tctgagtctcataggagagctgctgcagccacgacctctggaaaattcaaggatgagatcgtccccgtgccaacaaagcatgggactacaactgcaggcaattccagtcaagtgagtgatggtgctggagctgttcttctcatgaaaagatctgtggctctgaagaaagggctgcccattcttggtgttttcaggttgcccaacctgccctatcttgattagtccacattgtgtttgtcgtcgatgttcagacacattttgctcaattccttgttacatttaacgctgcttggcatcgtccattagaagctttgccactgttggagtggatctagctgttatgggcgctggtcttactgtggccattcctgctgctgtgaagtctacttacctgctatattttttctgagcaaagtcggttaaacttgtgattctttgtatgttcaggtgcccggcgcgtggctactcttctaaatgaaatgaagcgccggggcagagactgcagatttggtgttgtcaccatgtgtatcggatctagaatgggggcagcagctatgttcgagctgtgttcggcccggctggaggtatcgaccatcactcaacactgtaacccgatggtgatcggcgaccgtgagcttccatgttattgcgttctgatacttgagacttttattatgactatgtatgagatattgtctcttattagtactggatgatgagatgtgtcttattatgactatggatgagacttttgtgatgtaattgatgagacttttgtgatgtaattgatgagactatggatttaaatattgttatgtgattgtgtgtgagatgttttatgtgaaaatatgttgtgctatatagctgttgatatatttgttatgttgtggaatgtggtgtaaaataaaaataaac

SEQ ID NO: 102701 - DNA, 643 bp, Zea Mays
tctgagtctcataggagagctgctgcagccacgacctctggaaaattcaaggatgagatcgtccccgtgccaacaaaggcaattccagtcaagtgagtgatggtgctggagctgttcttctcatgaaaagatctgtggctctgaagaaagggctgcccattcttggtgttttcaggtgcccggcgcgtggctactcttctaaatgaaatgaagcgccggggcagagactgcagatttggtgttgtcaccatgtgtatcggatctagaatgggggcagcagctatgttcgagctgtgttcggcccggctggaggtatcgaccatcactcaacactgtaacccgatggtgatcggcgaccgtgagcttccatgttattgcgttctgatacttgagacttttattatgactatgtatgagatattgtctcttattagtactggatgatgagatgtgtcttattatgactatggatgagacttttgtgatgtaattgatgagacttttgtgatgtaattgatgagactatggatttaaatattgttatgtgattgtgtgtgagatgttttatgtgaaaatatgttgtgctatatagctgttgatatatttgttatgttgtggaatgtggtgtaaaataaaaataaac

SEQ ID NO: 102702 - DNA, 1022 bp, Zea Mays
agcctatccagaactgctgcagtcccacgccactatccaattcgagcagaggcaggcggggatgctctctctacccgcctgctcacccattccgcttaccccctacccgttgtggcgctcgccggaagagcgcggccgccgcgaccatcacgatgcgggaccgcagcaagaaccggaagccgacgcagcgagggcggtacctcagcaccgaggccatccaggctgtccagtccctcaagcgcgccgcgctccgcggcgcccccgccgcgtccgccgctgccgtggtggagcccaagctgcgacgcctcctcaaggcagacatggtcgccgtcttccgcgagctcgccgcgcagggcgaggccctcctggccctccaggtgtttgaggagatccggaaggagcattggtacaagccgaggttgctttggtacgtagatcttgttacagtgcttgcaagcaaaggtctccggactgaggtcgacagagcctgttcatatctgaagagggaacagttggagcctgacactgaaggtttcaatttgcttctgaaggcactcctagactctgggttcacacagttaacactggactgtttccgtctaatgaaattgtgggacagtgatcctgacaggataacgtatacaacattgatcaaaggccttgaatccctaggaaagatggagctatctgctggcattcggttggaggcagaaaatgattatggttccttggacttcctcgatgaagtggagatcgatgaggcttgcagaagtagaccttaacaggatgggtcaatcttgctctttgatgcaaccagcaggagtaaatctttgtgaagtgcagaatgagattatacagaaccttagtaaataattctttcctagatcttatacacaattttagaaattagaacagaccttgttgcagcaagtactagtattgactactaatatctagctgtttgttgtgtatccaaaatcttgaggggtcacctgttatcttaacttgatttttgtttgaca

SEQ ID NO: 102703 - DNA, 806 bp, Zea Mays
gacgttccaaacatccttatcctgtcacctccgctccacgaccgccccagcctccaggtcctagctccggcctccgccgccgcctctcacctccgctccccttcccttcccacatggcgaaggccgacgcccgtacccgaggccgggccgcctctcacgtccccactcccacatgggcgcagcgcactgaggccctgacccacgtcctgacccacccgtcccacgcgccgtcgctccagtcgcagctcttcctcgcctcccgcgtcccgtgcccgccgcggggcctcggctccaccacgtcgtacccgccgttcctctgccccggcgcctcgctcctccgctgggctctcgcctccgtgttcctcccgcgcgcggcgagcctctgcctcccgccctcgtcctggcggtcccggtgccccttccagctcccgccgccggtcgtgccctccgcggccatcgagccggcgcccgagcggtgggccgactccgagctcagggcctacgcgcgccggcggcgggagcggaggggcccgctgacggtgcggccgccggtggccgtggtgggagtggtgctcaccaccgtgcccaacgtcgtgatcgtcgtggccttcgtgaaggagtacttctggggcaggaccagccgtatctgaggcgtggtgtctgatgcttgttttgctcttgatgtaaaaaaaagaagcagtaaccccagtgtaatcggtgctgactaagacagcttcttgagctttcccttctattaaaagttgggtttcacctccagaagccattgtctgatgcttcttttgctc

SEQ ID NO: 102704 - DNA, 1011 bp, Zea Mays
atggcaagcaacacagctgctctcctcctcctgctgctgctatctttccagctcatcgccatgtcgctgtctcaaactcagctgtccactcaggacctcccggctcttatcaagatcaggcagcagctcggcaacccggacgcgctcgcgggatggcggcccgactcgctctgctgggggtggtggcccgcggcctgcaacgagcagggccgcgtcaccaagctcttcctcgagcgactcaacatcacgtccacgctcccgccggccatcggcgagctcgaccagctggagacgctcagcatcatcgagatgccgggcctgggcgggcgcatcccggactccttctgcaacctccggcacctctcactattcaacctcatggtcacctccgtgtcgggccccatcccggcgtgcctctcccgcaccaacctcacctccgccagcttcttccgcagcaagctcaacggcatcatccccgggtcgctctggaagctcccgtacttcacctacttcaacgccgcctacaacaacctcgtcgggcccatcccgccgctgctggtgcacggcggcacgcccgaccggccgctgggcctgatgctggacggcaaccggctcagcgggcctatcccctggacgttcgcgctcgagaggcacctgctgcagttcagggtggccaacaacaagctcaccggcgacccgtcgttcctcttcgggcggcgcaagacggtgaccggcaccatcgacctgtccgggaacaatttccggttcaacctcaccggcgtggagatgcccatgcagctgtctttcctgaacctgagccacaaccggatctacggcggcgtgccggtgtcgctccgggacaccagggtggcggtgctggacctcagctacaacgacctctgcgggaagatacctaccggcgggcatatggtgcagttcaaggcggcggcgtacgagcacaacaagtgcctctgtgggacaccgctgccaccctgcgcgaacggccgctga

SEQ ID NO: 102705 - DNA, 733 bp, Zea Mays
gacgcgatttcgtttgagtccccaccagacgggcgaaaccaactctctgcggcagagggcggacggcagagggttttggagcaggcaagcctggctcttcttgttcctccatctcttccgtcgccttgcgcgtgttggcggctgcgtacgcgaggccgccgcgtctggccggatggctcacgcggccgtcgtcgccttgctcgccgtcgctgtgatcttggcctgcttgccgccgcccgccgcctcgtcctaccggggagcggctgcattgcgacggctcgagacagcggagcccatggacaccgcgcagggcttgcgggagaaggcggacgtgaacaagggcgcggaggaggacctgagcacgacagggttcggcgccgagtcggagagggaggtgccgacgggaccggaccccatccaccaccacgcccgggggccaaggcggcagtcgccttgatcgtcatgcgcgcgcgacacggcggcggtggatcctcgcttcctggaagtttgtggtcttgatcaggcgggcgtgaaccggattccacgatgatcctgctctttctttgttcttaaatgtatctgccatgcacctttggttctaattccattgttgtagtagggaagcagcatccacctatcaactatcatcaaaacccccctatgttttggcgtgccaattagagaaagggaattacagcgcgattcatataataagtgtgtacaatgaattcca

SEQ ID NO: 102706 - DNA, 279 bp, Zea Mays
atagatgtcttgtactcttgtgtatgatttataatagcgggtacccgaattttacccaaacccaaacccgaaattgcgggtacccgaaattacgggtacccgaaagttcgggtacgagtacgggttctacttttggaaacccgaaatataaaaaacccaaaaaacccgacccgaaatttcgggtaaacccgaacgcccagtcctaggtatggcagattttgatacacatggttattttattcggtcatttgttatgcccatcgggtacggtgggtgtgg

SEQ ID NO: 102707 - DNA, 405 bp, Zea Mays
atggaggcagagagcaccgcccatcgccctctgtgcccggccacgcctgagcgagccaaggaatctacgggaacaaacaggcacctacgacgacatgggaggttatcaggctctcgcacccatgcccgatgttcttgtcgacgccgctatcgttcgcgtctgcatccgtccccgccaactgcaccaccaaatggatatgctgcaaaccttactgcgactccagcatccgtgattcaaactgaggcattattgacaaatgatatccttctaagtgatgggattcagagtccaagtagtgtttctgcaaaattagaagatcgtactaaccacaagttacttacattttgtatttctgtaaatcaaaatgctattgaaaaatatcgtgtttcttctgtagaatattga

SEQ ID NO: 102708 - DNA, 1930 bp, Zea Mays
aaaaccccccgcccgaacaatggttcgtaaaattccccagcatgggaatggcctgcatccgcgctccccaaaccctagcatcccgaattcgccagtcgccatggcgccgttccggcgctgggctgacctgccggcagatctactgtgccgcatcggagaccggctcgatctcaagtggtatgcgagcgcgcggggcgcctgcacggcgtggcgatgcgcgctcgcgccgccgtcgcccgcgctcctcgtggtcgccaacgacgcccgctggtgcccctacgccgcctccctccccacgcggaggtccttcgagctcaccgccatcgtttcgggaagccgctgcgtcggctccagcaacggctggctcgcactctccgttgtcctcttcagcggcgggaccattttcgtgctcctcaaccccatcgccgccgtggagatcctcctcccgccgctgatctacgaaagccgctgggtttccaaggtcgtcttcactccgaaccccgccaaggacgacttcgccgccgcggcaatctgcgatatcgataggatcgcgtacgtcaccgccggagccaggaggtgggccgtcatagaccccgtccgtctcaccaacggggaccagctcaccgatgtcgtctacactgacaaaggtagggtctactgcctcaccaagtgcggggacgtgcatgtgctccgtctccccgagcgacggtgccgaaagcctgccaacgccgatgaagcagggccatcggagccaccattctctgttctccagccgccacagcctgctgaacgcacaaataattgccgtccactgcgttggcaacatctgcgcaattttcggatgatgcgccatgaacaggcccaaacaagagatcaggatccaactattccactgagggtaacgttctgtgcagagacattcatcccatataagaaatttccacctgaatcgcaaggaccacacctaaatgcgccagccactgttgagcccctgttgtgtgaggccaacctcccgttcgaccctgccactgtcttccctccaccttatgacacagtgtcgtcgttcactagtgcaaagaacttggtgttctgtgagggcaatctgtaccaagtttggaggaacgcaagttgcactgttactctgcagctgcctacaggaggtcagcgtcgcgttgcggaaaatgagatattggtgctgaggtattatcctcgacggcagccttgctgggatgtggtgaagaacctgggaggtcactcactttttgttggaaggaacaatgcagtgtcaatgtatgcagagggtgtgccaggattgaggggcaactgtgtatactggataggtgggcgcggtagggatcaaggcatggtctttgacatggaatctgggagctccacgccgtgcagggctcctcctgttagccttttacctgggcatccacatagcacaatctgctggtacttcttgagcgatttaatgagcatcaacaacagctacaacagtagctgcagcagcagcagcggaggaagaaaagtttatcagactcgagcaagagcacgagcagatcttggacaagacatggaagaatgattgcatcgctgaacttctcggcgacatagtgaggaccaccaagcaccttggtggaaattgagtttattgtttgtggtcttgggagtcagagcttgatttcaaggcgaaacaaaatcttgtagagaaggctgaggaactgcctcgtgtagcctgtttcctaaaatagtgttcagtttgtttacttgcctgtagcttctttattttttatttgcttattccatgtaaccggataataattattgtatttctatactcagtttttcatgttggtgtgttgacataattcaatggatcatgtatatttttggagttggtaatgctccgaattttactaccagtttc

SEQ ID NO: 102709 - DNA, 2810 bp, Zea Mays
ctctctctctccacacccgcccgtttcgagtcccaacggatccttccgcacatctcccacccttctcttggtcagaaaccgcccctgctcctccgtcctcacaccctgctctctctctctctctctctccctctgcttctgatccttcctcctccaccctttattctactcctcttctctctccggcgtaaaacaatcgtgctgtgagaacgatgggagagaaagagagtgagggagccaagtaatggcagggggggaaccttcttttcctgactcccccctgtgcctgctgcagcccatcatttgtccctgatccttgtgcttcgttcctgttgcgctttttttttcttgggccatcggtggactggagccgtcgccgaatcaggagacacttcccatttcttacaaggaaaggggccggggtggagcctcgccatccggcgatcatcctcctccagtcacagcacaggttgaataatccaagcttgagatggaaggtcatgtagcaatggagtggaatgatcctaatccaggcccagaatccttgacgagcttccaaaccgaagctgttcgaccagacaccgcagggggccacagcaacgacgacgttgaagctggatttgagaagcatggcttggcagtcaccgtaaggccgcctgaggaggaagctcggtcagtgccactaaccccacagcttggccagaagtccagtcctggcagcagcctcgcggagaggatgcaggcaagagctggattcatggtgtcgaagctcaacatgcccttcagcacagcagctggagctgacaattcagtacccgaagttccatcgccctacctcacgattccgcctggcctgagcccagcaacgctgctggagtcaccagtcttcgtttctaattccatgggccaggcctcgccaaccacggggacgctattcatgtttggtagcacaaatgacaatgatcctattagatttggaggtggtcctccttcagttggagatggccctaatgcttttcctttcaagcccttagatctgaaatcctcacactacactgctgaagcaatgaaggaacaaaatacgaagtcttctgtcaagactgaaaccaagattctgacagtacaagaggctagtttgctcagccaactgaaccagctgaatcacaattcgcagaccattattaatagtggcggtcctcatgaccccaagctcagccgtcctgcatctggcgccggtgcaggcaatgaacacatatcacccccggatcacggacagacagctgaggaaagtgatgcgagggaagactacccggcaatggctactaccacgccagcagaggacgggtacagctggaggaagtacgggcagaagcaggtgaagcacagcgagtacccgcgtagctacttcaagtgcacgcatcccaactgcctggtgaagaagaaggtcgagcgctcgcacgaggggcacatcacggagatcatctacaagggcgcgcataaccacccgaagcccacgcagagccgccgtccaggcgtccagcccgtgcacccgtttggcgacagtgcgcaggcggacgcagccgacaacctggggtcacaggcaaacgcactggacgccaaccagccgaggcgtgcgggtgttcaggatggcatggacgcgacgtcgtcgccctcagttcccattgagcgctgtgactcgccggcctcgatgcaggtcgactcggcaactcggtttgggtcccccgagggcgcggatgtgacgtctgtgtccgacgaggtgggcggggacgacagggtgactcgtggcagtatgtctcagggcggtgccgacgcggagggtgacgagctggaatgtaaacgaaggaagctggagtcgtacgccatcgatatgagcaccgcgtcgagagctgttcgcgagcctcgcgtggtgatccagacgacgagcgaggtggacatcctagatgacggctaccgctggcgcaagtacgggcagaaggtcgtcaagggcaacccgaatccaaggagctactacaagtgcacgtacccgggctgcgtggtgcggaagcacgtggagcgcgcgtcgcacgacctcaagtccgtgatcaccacgtacgagggcaggcacaaccacgaggtccccgccgccaggaatagcggccacccgggcaccgcggcggcgacaggcgcgggtggcccgcgcaggctggagcacccgtcgctgcgcgacggcctgatggggcacttgggcggctgcggcgtgccgttcggcctgccgccgcctagggatccgctggcgccgatgggcaattacccgacgtatgcctcctccattccccttggcggcgccggccccacgtcactgccgagcctgccggtgccggcggggaccctcagcgccgtcgatgggctgaagctcccgatgctggcgccgtcgtccctgcagcagcacccgctgctgaggcaccggcaggcgatgcaggccgctggcctcgtggcgcccaaggacgacgtgaaggtcgagggcaacgttgccggcggcgctgccccgtcggtgtaccagcagatgatgtgcagcgggctgcggttgcgccagcagatgtagatacataaataaatgtggagaggattagtgattctcaagttattagtttcttaccagtcgtattaggatgagttcgtgataattgttataacgtgggaacaaacacccgttgctttctgttttttttttcacccttccacttcatttttagctcagcaactatttatttatttactgcccctcttcattgaggtttggtattcgttga

SEQ ID NO: 102710 - DNA, 2815 bp, Zea Mays
ctctctctctccacacccgcccgtttcgagtcccaacggatccttccgcacatctcccacccttctcttggtcagaaaccgcccctgctcctccgtcctcacaccctgctctctctctctctctctctccctctgcttctgatccttcctcctccaccctttattctactcctcttctctctccggcgtaaaacaatcgtgctgtgagaacgatgggagagaaagagagtgagggagccaagtaatggcagggggggaaccttcttttcctgactcccccctgtgcctgctgcagcccatcatttgtccctgatccttgtgcttcgttcctgttgcgctttttttttcttgggccatcggtggactggagccgtcgccgaatcaggagacacttcccatttcttacaaggaaaggggccggggtggagcctcgccatccggcgatcatcctcctccagtcacagcacaggttaggttgaataatccaagcttgagatggaaggtcatgtagcaatggagtggaatgatcctaatccaggcccagaatccttgacgagcttccaaaccgaagctgttcgaccagacaccgcagggggccacagcaacgacgacgttgaagctggatttgagaagcatggcttggcagtcaccgtaaggccgcctgaggaggaagctcggtcagtgccactaaccccacagcttggccagaagtccagtcctggcagcagcctcgcggagaggatgcaggcaagagctggattcatggtgtcgaagctcaacatgcccttcagcacagcagctggagctgacaattcagtacccgaagttccatcgccctacctcacgattccgcctggcctgagcccagcaacgctgctggagtcaccagtcttcgtttctaattccatgggccaggcctcgccaaccacggggacgctattcatgtttggtagcacaaatgacaatgatcctattagatttggaggtggtcctccttcagttggagatggccctaatgcttttcctttcaagcccttagatctgaaatcctcacactacactgctgaagcaatgaaggaacaaaatacgaagtcttctgtcaagactgaaaccaagattctgacagtacaagaggctagtttgctcagccaactgaaccagctgaatcacaattcgcagaccattattaatagtggcggtcctcatgaccccaagctcagccgtcctgcatctggcgccggtgcaggcaatgaacacatatcacccccggatcacggacagacagctgaggaaagtgatgcgagggaagactacccggcaatggctactaccacgccagcagaggacgggtacagctggaggaagtacgggcagaagcaggtgaagcacagcgagtacccgcgtagctacttcaagtgcacgcatcccaactgcctggtgaagaagaaggtcgagcgctcgcacgaggggcacatcacggagatcatctacaagggcgcgcataaccacccgaagcccacgcagagccgccgtccaggcgtccagcccgtgcacccgtttggcgacagtgcgcaggcggacgcagccgacaacctggggtcacaggcaaacgcactggacgccaaccagccgaggcgtgcgggtgttcaggatggcatggacgcgacgtcgtcgccctcagttcccattgagcgctgtgactcgccggcctcgatgcaggtcgactcggcaactcggtttgggtcccccgagggcgcggatgtgacgtctgtgtccgacgaggtgggcggggacgacagggtgactcgtggcagtatgtctcagggcggtgccgacgcggagggtgacgagctggaatgtaaacgaaggaagctggagtcgtacgccatcgatatgagcaccgcgtcgagagctgttcgcgagcctcgcgtggtgatccagacgacgagcgaggtggacatcctagatgacggctaccgctggcgcaagtacgggcagaaggtcgtcaagggcaacccgaatccaaggagctactacaagtgcacgtacccgggctgcgtggtgcggaagcacgtggagcgcgcgtcgcacgacctcaagtccgtgatcaccacgtacgagggcaggcacaaccacgaggtccccgccgccaggaatagcggccacccgggcaccgcggcggcgacaggcgcgggtggcccgcgcaggctggagcacccgtcgctgcgcgacggcctgatggggcacttgggcggctgcggcgtgccgttcggcctgccgccgcctagggatccgctggcgccgatgggcaattacccgacgtatgcctcctccattccccttggcggcgccggccccacgtcactgccgagcctgccggtgccggcggggaccctcagcgccgtcgatgggctgaagctcccgatgctggcgccgtcgtccctgcagcagcacccgctgctgaggcaccggcaggcgatgcaggccgctggcctcgtggcgcccaaggacgacgtgaaggtcgagggcaacgttgccggcggcgctgccccgtcggtgtaccagcagatgatgtgcagcgggctgcggttgcgccagcagatgtagatacataaataaatgtggagaggattagtgattctcaagttattagtttcttaccagtcgtattaggatgagttcgtgataattgttataacgtgggaacaaacacccgttgctttctgttttttttttcacccttccacttcatttttagctcagcaactatttatttatttactgcccctcttcattgaggtttggtattcgttga

SEQ ID NO: 102711 - DNA, 4438 bp, Zea Mays
ttccccttttgccttgcctcgctcctcctccctcacctctcccccccgtctgcttccagtccccagaaatcaaaacctccaccaccacagagctccgagaccctcaccctcctccccgtctgctcgctgcgtggatctaccggcaggatgctctctccatcgcgcgcgccgcccggggagcgcctgtgaagaaggaacggaaggtgcctgatgagatagtggacggacaaggaagtgaagtttcttgttctatccacctgttgaacttaccaacttggtatgctggagtgcaagaataagagcaggcccaatcgcttcacagctattgggttctcggtgccgactgtagcagccgcagatctggagggagcagcgaaggcgttcatcagatgttatccagtgagcacccttcaggcccctcatgttcctccaagtctggtggcccgggtgtgagcgctgatccggcgacgtccgcggcggagcagccagcgtgccaggatcccagagatctgatccaatcgtatcccaagttctccataagattatgtttttgcttcaaggagcaaaggcatcaagagaagctggcctttccatccacactcgttgcagctttgcctggagcatggtgtgaaggatccattgcctccatttgagcctcccgatttgatccggtctcagccattaaatatttccacagacattaagcaatctgctgcgtgctcagaacccatcattagtgttggtctggtgaagaccaaagatgccggttcgtcaaacgagtatacaggcgatatcaacttccagtcatgccagccagtagatgagtcacctggaccttcgccatacacatcaccggaggatgggaaatccggtatcgaccaagtgggaagtacaaatgaatcagatcatactgacgaggctataccaatagatctgcaagataatagctgtacaagagcaagtcggcgaactgaggttgctgtgcccttgcggcggttgagaaatcttgactcatcgtgcgagccatctgaaaagaagtgcaaatttgttgtcaagttaggtgcctcggcagatattcggcggccagaggatatagcatctaactctagctcagtttcagatccgatggcttcaaagacttgtcctgtgtgcaaagtatttgcttccacttcgaacaccacattgaatgcccacatagatcagtgcctttctgttgagtctaatactgagcttgttgaaactgtccttgtaaagcctaaagtgaagccaaggaagaagcgattaatggtggacatatacaagactgctcttccatacacccttgaggatcttgatcggaggaattgcactaattgggcagttgagttggctatgtctccagtgagcaaagaggtttgcactgagaacggaagcccagaagtggtatcatttgacagaagagatgatgaaagagaaggagatgtttatgttgattctaatggcataaaaattagaattttgtccaagtgtaatgatgtacctttggtgttgaaagatgaccttggttctagcaaagttgcgaagcatggaactggaaaaggtatactgatgagcaaaaagatgctgaagtcaaagcttttgaagaataagaagctgaagatgcatggaaagaagtacaacaaaacaagccatttgaactcccaggttcaagcagacccgcatgacgatattaatgaggaaacctccgaggaggagaggaatgcatggaatccttctgaaagcaccagcaattgtggttccaggactatgcagcagtgggtatgctccaaacgatcagatatcaacaagaaattaagcaaaaaccatagtggtaaaacatttgacaaagtggcacctggagcacagaaatcggataggagcagcatgtttggctttaatgattctcaagttccagaaagtcctgttggggtgttttcttctgagtcattatacatggccacaacttcagaagccactggtgttgagcagagtaatggtccttcaaaagtgcttagatcgattcctacatggtcttcaaaaactcatcttcagagcagtgtcataccaaaagtacctagatcagctgctgctcttgcaaagagaaaaattaaggagattgggaggagagaagctaccaaactagataattatgatgtagtgaggaatcccacttcagtgaaaagatttgaagctaggactctttccttctccactgcagggccaagcaatggaccaaacaggtcagcatctacatcaaagaagatccggaagcaccgatctccgttgaggactggcaagcgtgcattttcaccttctagtactagattagttcatggctttggtgacgagcatgaacctgagaccagacatgtaaataagaaattcaggattactagtaatgaggctcccaagaagtttttgaagcatactgaagaggatactgcagataatgacttctcttttgcaagtgacatgccagtatcgggacaacagaatgatcaatatgatgttgcacaggaaacagagggtacacaaatggattgtgaaggtgaagatgctgaaactgatgtgccatatgattcagtatccagaagtgatcctgctgagtgttgcaaccaaataagtgatgtttctctgagtcctgaaaactacagaacagcagacgatgatgttttggttgaaggctgtagtgtagctgtggaggatccaaactccagtgagcaattagcacatggccatgaatccaacagtgctgccaataatgaaatggatgaatggcagatggatcctacttcaacaaaggaatctagtccctgcttaactagtaacagggacatgggccctggaggtcatcaagataactcatcaataacatcaaatggagaagaagactttaatgaagagcatggtctgccactcggaaggggctcactagattctcccatttcgactgcctcaactatggcccttccagctgctttgaaggattcaaggactaatgaggaagaacctggcccatctactggtaggactgttgaagagcaaaccaccgggtgcttgaatcaagaaaccaattcaatacctatggccagagaaggtgaactgcccagtgagaagccttttcgttgttcttgccaggaaaacattgccagagagtctcgtcaaagtcctgttgccagaccaatgctgaattctactgggaagcaggttccgcaattgcacattggttcgagggcatcatcatctttcagcacgtaccaaagaaccagcgcaaagcccaacccttgctttgatccacatgatcatcttttagcggctaaggtcccagcagaatctgctatcagcttcccttactccacagactgtataagcccctcattccaaactcagcttccttcaccatcaaatcctgtcttgaggctgatgggtaaggatttgatggtgatgaacagtgaagagagtgtgcatcctcaagcaccaagttcagactacatcttgagagggaattatccagcacctgttggtttcatgcctccaaactaccaacatctcagtaattctgcatttatcaacatgccgccgaccacagccagccaccagatccctctaccaagtgttcaagctagcggcttcgttgctcctccattgcgtggtggttctgtgatgcaatctgaccatcactcccagcagaagccctacagaaacatcatgcctgccatgcatcgcccaacctacatgatgaaagaagtgatcgtgatcaacgactctcctgagcgcagaagtgagccacaaggtagcatgctgttcccccctgctccgcctccaccacttccggtagtaccaaacaacatgccaccccgtccgttctactgctttccaccgcagagcccagttttgccaagggagaggggggctgttgggtccatgctcgtgtacgcaaacgttggctcaatggtcggcgtcaattcgtcgagtcaaggaagccaaacggaagtcgccagtccttacatgccaaacccgttcttcgtgcagtctcgagccggttacatgaacccgccagtgtactactcgcagaatctggggtgatggtttctcagtaactcgaatgaccaggagaactccatttggcttgccggtcgtcatcgctctgtaaaagtgggggtacatgggagtttcgtgatgggtctaaaatgctgagactagtcagcctgcaagatgtctgagtttcatgaggattttcacataggttgctttagattttcttttcttttttttggttccgacttaaaggtacaacatgtttgccgtcaaaagtgttttaattacttccctgcaaagtcgcagtaaattatagtatgcaattcccaacagttctgcaaaggaatatatctcagtatttatcgaaaaggcagctagaatc

SEQ ID NO: 102712 - DNA, 4440 bp, Zea Mays
ttccccttttgccttgcctcgctcctcctccctcacctctcccccccgtctgcttccagtccccagaaatcaaaacctccaccaccacagagctccgagaccctcaccctcctccccgtctgctcgctgcgtggatctaccggcaggatgctctctccatcgcgcgcgccgcccggggagcgcctgtgaagaaggaacggaaggtgcctgatgagatagtggacggacaaggaagtgaagtttcttgttctatccacctgttgaacttaccaacttggtatgctggagtgcaagaataagagcaggcccaatcgcttcacagctattgggttctcggtgccgactgtagcagccgcagatctggagggagcagcgaaggcgttcatcagatgttatccagtgagcacccttcaggcccctcatgttcctccaagtctggtggcccgggtgtgagcgctgatccggcgacgtccgcggcggagcagccagcgtgccaggatcccagagatctgatccaatcgtatcccaagttctccataagagattatgtttttgcttcaaggagcaaaggcatcaagagaagctggcctttccatccacactcgttgcagctttgcctggagcatggtgtgaaggatccattgcctccatttgagcctcccgatttgatccggtctcagccattaaatatttccacagacattaagcaatctgctgcgtgctcagaacccatcattagtgttggtctggtgaagaccaaagatgccggttcgtcaaacgagtatacaggcgatatcaacttccagtcatgccagccagtagatgagtcacctggaccttcgccatacacatcaccggaggatgggaaatccggtatcgaccaagtgggaagtacaaatgaatcagatcatactgacgaggctataccaatagatctgcaagataatagctgtacaagagcaagtcggcgaactgaggttgctgtgcccttgcggcggttgagaaatcttgactcatcgtgcgagccatctgaaaagaagtgcaaatttgttgtcaagttaggtgcctcggcagatattcggcggccagaggatatagcatctaactctagctcagtttcagatccgatggcttcaaagacttgtcctgtgtgcaaagtatttgcttccacttcgaacaccacattgaatgcccacatagatcagtgcctttctgttgagtctaatactgagcttgttgaaactgtccttgtaaagcctaaagtgaagccaaggaagaagcgattaatggtggacatatacaagactgctcttccatacacccttgaggatcttgatcggaggaattgcactaattgggcagttgagttggctatgtctccagtgagcaaagaggtttgcactgagaacggaagcccagaagtggtatcatttgacagaagagatgatgaaagagaaggagatgtttatgttgattctaatggcataaaaattagaattttgtccaagtgtaatgatgtacctttggtgttgaaagatgaccttggttctagcaaagttgcgaagcatggaactggaaaaggtatactgatgagcaaaaagatgctgaagtcaaagcttttgaagaataagaagctgaagatgcatggaaagaagtacaacaaaacaagccatttgaactcccaggttcaagcagacccgcatgacgatattaatgaggaaacctccgaggaggagaggaatgcatggaatccttctgaaagcaccagcaattgtggttccaggactatgcagcagtgggtatgctccaaacgatcagatatcaacaagaaattaagcaaaaaccatagtggtaaaacatttgacaaagtggcacctggagcacagaaatcggataggagcagcatgtttggctttaatgattctcaagttccagaaagtcctgttggggtgttttcttctgagtcattatacatggccacaacttcagaagccactggtgttgagcagagtaatggtccttcaaaagtgcttagatcgattcctacatggtcttcaaaaactcatcttcagagcagtgtcataccaaaagtacctagatcagctgctgctcttgcaaagagaaaaattaaggagattgggaggagagaagctaccaaactagataattatgatgtagtgaggaatcccacttcagtgaaaagatttgaagctaggactctttccttctccactgcagggccaagcaatggaccaaacaggtcagcatctacatcaaagaagatccggaagcaccgatctccgttgaggactggcaagcgtgcattttcaccttctagtactagattagttcatggctttggtgacgagcatgaacctgagaccagacatgtaaataagaaattcaggattactagtaatgaggctcccaagaagtttttgaagcatactgaagaggatactgcagataatgacttctcttttgcaagtgacatgccagtatcgggacaacagaatgatcaatatgatgttgcacaggaaacagagggtacacaaatggattgtgaaggtgaagatgctgaaactgatgtgccatatgattcagtatccagaagtgatcctgctgagtgttgcaaccaaataagtgatgtttctctgagtcctgaaaactacagaacagcagacgatgatgttttggttgaaggctgtagtgtagctgtggaggatccaaactccagtgagcaattagcacatggccatgaatccaacagtgctgccaataatgaaatggatgaatggcagatggatcctacttcaacaaaggaatctagtccctgcttaactagtaacagggacatgggccctggaggtcatcaagataactcatcaataacatcaaatggagaagaagactttaatgaagagcatggtctgccactcggaaggggctcactagattctcccatttcgactgcctcaactatggcccttccagctgctttgaaggattcaaggactaatgaggaagaacctggcccatctactggtaggactgttgaagagcaaaccaccgggtgcttgaatcaagaaaccaattcaatacctatggccagagaaggtgaactgcccagtgagaagccttttcgttgttcttgccaggaaaacattgccagagagtctcgtcaaagtcctgttgccagaccaatgctgaattctactgggaagcaggttccgcaattgcacattggttcgagggcatcatcatctttcagcacgtaccaaagaaccagcgcaaagcccaacccttgctttgatccacatgatcatcttttagcggctaaggtcccagcagaatctgctatcagcttcccttactccacagactgtataagcccctcattccaaactcagcttccttcaccatcaaatcctgtcttgaggctgatgggtaaggatttgatggtgatgaacagtgaagagagtgtgcatcctcaagcaccaagttcagactacatcttgagagggaattatccagcacctgttggtttcatgcctccaaactaccaacatctcagtaattctgcatttatcaacatgccgccgaccacagccagccaccagatccctctaccaagtgttcaagctagcggcttcgttgctcctccattgcgtggtggttctgtgatgcaatctgaccatcactcccagcagaagccctacagaaacatcatgcctgccatgcatcgcccaacctacatgatgaaagaagtgatcgtgatcaacgactctcctgagcgcagaagtgagccacaaggtagcatgctgttcccccctgctccgcctccaccacttccggtagtaccaaacaacatgccaccccgtccgttctactgctttccaccgcagagcccagttttgccaagggagaggggggctgttgggtccatgctcgtgtacgcaaacgttggctcaatggtcggcgtcaattcgtcgagtcaaggaagccaaacggaagtcgccagtccttacatgccaaacccgttcttcgtgcagtctcgagccggttacatgaacccgccagtgtactactcgcagaatctggggtgatggtttctcagtaactcgaatgaccaggagaactccatttggcttgccggtcgtcatcgctctgtaaaagtgggggtacatgggagtttcgtgatgggtctaaaatgctgagactagtcagcctgcaagatgtctgagtttcatgaggattttcacataggttgctttagattttcttttcttttttttggttccgacttaaaggtacaacatgtttgccgtcaaaagtgttttaattacttccctgcaaagtcgcagtaaattatagtatgcaattcccaacagttctgcaaaggaatatatctcagtatttatcgaaaaggcagctagaatc

SEQ ID NO: 102713 - DNA, 1371 bp, Zea Mays
gacggacatccttttcttccccggcttcgtttcgtgctttcctcaacctcccctcttccgtgccgcacagtttatccgctgcttcacggaaatccttacggggctgcatatactatattccctgcgttccaggcggccccgcccccgccccccaccggctcttgctgtctcctctcgcacggtcgcaccccgctagcctcccggcgtcccaatcccaggaacttccgtcgcgtcaggtgatgctttcagcaactacaggtgtaggacaatgtcgatgaactatgatggggataggagtgaggaccgccaaagcgaggaggtccagtcagcatacaaaagggacagtgacgttggtgaggaaatgataataagtagcgaagagcaaaatgatgagaatgaatggagctgggtgaaccaagatagaaatggtgatccttttgctgaatcggtttcctcacttcatacgacacagcaaatcctcgaaaatgagatacgaaaattatcagaacttggcaaagaacttgaggcggaggaatccacttccggtaacaaagaccaagatgtgatccttttgccgtatagtgaggctgatgtgttggaactgagtgagaagatggaacatcttgaacagaaagtgaaagaagcatcaaacaccatcagagagaaagacctgatgctttccaagcttcaaatactcatcggtactgcagacagggcagcgctggaggaggagttggaggaggcagcagctagcatcgaccaattggagacagagctggagcgccatctccaggagaaactagaggctgaaattcagtgtctgttgatgttgaaagcgagccagaattggcaggtccgagcggaggaccgggtggccttggaggagcacagggcgctgtctgccggggacaagaccagaatgctgctcaagctacgagagacggagagcaagatcgtgatgctgaaagagcaggtagacaagctggaggtccgggagaaggagctcaaccggacgaccgaggtcctgaagatgcagagcaggaccttcagagcgtccctctttggcctcgtccagctggtaatgctatgcctgtccctgaaggtgttcttcgcgcgggtctcggccccatttgacgaggctgtgccgacatgatgccgtcagctggtgctctcttctgcctgtaaattagctcgccggggttgcgatgccttaacgcgtgtcctgctgtcttactgtagctgtagccagtaggtagtatagtttcgttacactgatgcagtgtaggctgtggtgaatgacgtctgaaactacgcgtgttctgttaaaaaaattactgcaggtctgtgcataaattgggttggattggcaaa

SEQ ID NO: 102714 - DNA, 1558 bp, Zea Mays
ggtgaaattagcatgcctaaattggagtttacaactagggcagaaaatttagaccagtatcctccagagccgcctcatgattctgatccgaatcagggcaaggtaacctcaatttggagatgcagatagtcaaatacgttagctgatttgcgcctcaacaacattacaacaccaacttcaacttttggtattggcattaggacagagaatcctgtgctttcccctccaaagttgcctttcgatgaaaggcagtggtcgatagctctccctctcccctaaaggcattaggaccactagataagttgtttgtagagacgccaccaaggaagcggtgcagattaaggaggtggagaaagagtaaggaggcaacctcctgacaacccgctgcagttcaacatcaatttttttttggtgctagcgatgggctggctggctattcgctaggtgtaatagggctgaagaccgctggagattgtaatagggaaaagggtttagggtgaaggattttttggctttgcaggaaaagggcgcaaggcacactgaagggctattagggacaggggacacgcttccttcgctgaaccttacttgatagcatctgatgcgcgcaggtgatgctttcagcaactacaggtgtaggacaatgtcgatgaactatgatggggataggagtgaggaccgccaaagcgaggaggtccagtcagcatacaaaagggacagtgacgttggtgaggaaatgataataagtagcgaagagcaaaatgatgagaatgaatggagctgggtgaaccaagatagaaatggtgatccttttgctgaatcggtttcctcacttcatacgacacagcaaatcctcgaaaatgagatacgaaaattatcagaacttggcaaagaacttgaggcggaggaatccacttccggtaacaaagaccaagatgtgatccttttgccgtatagtgaggctgatgtgttggaactgagtgagaagatggaacatcttgaacagaaagtgaaagaagcatcaaacaccatcagagagaaagacctgatgctttccaagcttcaaatactcatcggtactgcagacagggcagcgctggaggaggagttggaggaggcagcagctagcatcgaccaattggagacagagctggagcgccatctccaggagaaactagaggctgaaattcagtgtctgttgatgttgaaagcgagccagaattggcaggtccgagcggaggaccgggtggccttggaggagcacagggcgctgtctgccggggacaagaccagaatgctgctcaagctacgagagacggagagcaagatcgtgatgctgaaagagcaggtagacaagctggaggtccgggagaaggagctcaaccggacgaccgaggtcctgaagatgcagagcaggaccttcagagcgtccctctttggcctcgtccagctggtaatgctatgcctgtccctgaaggtgttcttcgcgcgggtctcggccccatttgacgaggctgtgccgacatgatgccgtcagctggtgctctcttctgcctgt

SEQ ID NO: 102715 - DNA, 1948 bp, Zea Mays
atttttagatcgtgatcatgctgacaaaaaaaacctggcgccgccgaccgccgccgcggcagttgttgcttaggcatagctcctcccgtaccgactgatactgcgccgcagtgctccgacggtccgaccgatcacaacccgcggtccgacggttcgtgtggtggaacgccgcgcgcggagatctctcgtaccgtcgtacgggaatcgcatgcaatggcggtgcaccacgcgctcgaggtgctcgacggccgctgcgacgacgacggccacccgcgcaggactgggactgcgtggacgtgcgcggcgcacatcatcacggcggtgatcggctccggggtgctgtccctggcctggagcgtggcgcagctgggctgggtggtcggcccggcctgcatgttctgcttcgcgctcgtcacctacgtctccgcggcgctgctcgccgactgctaccggcgcggtgaccccggcaacgggccacggaaccgctcctatatggacgccgtccgtgtctacctcggcaagaagcatacctgggcgtgcggctcactgcagtacgtgagcatgtacggctgcggcgtcgcctataccatcaccaccgccactagcataagggcgattctgaaggcgaactgctaccacgagcatggacacggcgcgcactgcgagtacggtggcagctactacatgctcatcttcggcggcgcccagctcctcctctccttcataccggaattccacgacatggcgtggctctccatcgtcgccgcggtcatgtcattctcgtactccttcatcggcattggcctcggcctcgcaacaaccattgctaacgggacgatcaaaggaagcataacaggtgttcggatgaggacgcctatgcagaaggtttggcgcgtctcgcaggccgtcggcgacatcgccttctcgtacccctactccttgatcctcctggaaatacaggacaccctgaagtcaccgccggccgagaacaagacgatgaagagggcatcgattggctcgatcctcgtcacgacgttcttctacctctgctgcggctgcttcggctacgccgccttcgggagcgactcgccgggcaacctcctcaccggcttcggcttctacgagccgtactggctcatcgacttcgccaacgcctgcatcatcctccacctgctgggcgggtaccaggtgtacagccagcccatcttccagttcgcggaccggttcttcgcggagcggttccccgacagcgggttcgtgaacgacttccacaccgtccgggtcgcgtgcctgccggcgtgccgggtgaacctgctgcgcgtgtgcttccgggcgctgtacgtggcgtccacgacggcggtggccgtggcgttcccctacttcaacgaggtgctggcgctgctgggcgcgctcaacttctggccgctggccatctacttccccgtggagatgtacttcgtccagcggaacgtgccccggtggtccacacgctgggtcgtcctgcagaccttcagcgtcgtctgcctgctcgtcagcaccttcgcgctcgtcggctccatcgaggggctaatcacccagaagctaggctaggctaggctattccagatttccagtccagtatgtgttttggattgcttttcttcttgttgtaatgatataatggagaatgcagcagcagtaggctaaagcgaactggagattgtttatctccaacaaggaccaagggccgggatgacgaacagcagcagcatatactagcagtacgtagcaggtcacctgcaggatctgggacagggagtggcagcgttctctatgattttcaagtgcattcctcctttattgccgtggagtggaaacatgtcgcattgatactgccagagttgcctcggagttcagaagaacgcgaggaacctgtgtcactgaatgccgcctatgttgtttcagtttc

SEQ ID NO: 102716 - DNA, 426 bp, Zea Mays
atggctgcccagccaccacgccccactgacctggccacgcgcgtcgcattggcgagcgccgccacacccgctgctcctatcatgcccagccccacctcgtcgctcctatcatgcgccccgttgcgagcgcctataaagctttgcatcgctgccgtggccatcctgttgcgcgcgtgccgtttcccccagcagggcgtgcgagccgctcccacccgggcgtcccccggtcgaaccttccccaactgcgctgctgcaaggtcggtcgtcggcgagcctcactgccatgcgcggttacaagcagcgcttgtgccatcaacgaagaagaaaccgccgcctaggttccacgcgcacgcatggcactggcatgcagcaatgcctctagccctcctgcccctccacgatcttctgcatgcaacaaacaaatag

SEQ ID NO: 102717 - DNA, 408 bp, Zea Mays
ataggccggcccaaagcacacaatttttagcacgacacagatctggcacggcccaacctaattgtgggcctaggccggcatggcccaatatgtgggtcgtgcctgggcctcaagtcaagcccatgggccggtctggcacggcccatttaactaaggcccatcgaggcccactaaatatagacttagtatttaactaaggctcgttaaagcctacatgaccagcacaatttggagaatctagagtttcaataggccttcggagaaccaatacctagatggggatagtaaatagtgatgatgatcattgtatatgtattctgtatggctgtatagtacatagttaaacactgaacatagaactaaatattatttctaacctagttgtaatattttttctttctgaccaaa

SEQ ID NO: 102718 - DNA, 944 bp, Zea Mays
acctcctcccacccgtccgccagatcagcattcaaactagggtttactcctgccgctccgagaaagcaaacaagcgtcagctccgccggcttcctccgcgctttctccccgccgccgccgccgccgctccttccctacgccaggcacgccaagatgaagctcgtcaggttccttatgaagctgaacaatgagacggtcaccatcgagctcaagaacggcacggttgtacacggcaccatcaccggtgttgacataagcatgaacactcatctgaagacagtgaagcttacactgaaagggaagaaccctgtaacacttgaccacctcagcgtgcgaggaaacaacatccgctactacatccttcccgacagcttaaacctggaaaccttgctggtagaggaaacccctagggtgaagcctaagaagccaactacaggaaagcctttggggcgtggtcgcggccgaggtcgtggacgtggtcggggccgggggccacgctgagctttatcgttcccctgctgtcggctcccttgcaagacaagtttcctctacaatgtaaaacatctttcctctgcacgctgtgtgaaagaatgttgcatcgttacccttctgatgaaggtggacgaaatatctcaatgtcagtagttcttgctgtgaaatcacgctgtctacctggcccccctactcatgcctatcttaggtttacactctagttaatttgtaatgttttttttctcccccgtggaatacatgtaagctgccgcagagctttggatgtctagggttgtatacttgtgtttgccacatgggggggactggggattattgatctggagctatgcctgtggctggctctgttagatcttgacctctgcttgaaactaaattaccattgtgctgctcgggggatcgcagatactggttttgctaaagcagttggcatc

SEQ ID NO: 102719 - DNA, 757 bp, Zea Mays
acagcacagcacagctctgcccgataccgtcgccataccgccgaagggacaggggcgaccgggcgagcgacaggcactcgcctagcatatttccctcctccgataagaaccccctcctcccggtcccggagagggagagggagagggagagaggcggcaaccagggccgggggagagagccatgtgcaagctcagatgcaccaaggagtgggtgggttgctacctgctggtgatcctggtcatcgtcctcctcgtcggcgtcctcttcggcctcggcgtcttcaggcacggctacgacaggatcacggagatcggccgcaaccacacctgcttcgactgcaacacaacaggtaccaactgaccgagccaccggccgtgccctgctcctgcctgcctcggtcgggatcggtgccagcgtgcgtgttgatttgtacgtgtgtgtggtagctcctccgtggaccgtacgtgtgtgcaaactcctgtcgcttggtttagagtgtagactacaggttcaactgattctatgatgaatattttttttggaaccgagtcgtcgtttttgtttgtctgcttcactgcgtatatcttggcgaaactatatgagctgctgcagtattcgccgactgatatgttggcccttcgtcctcttttgctgccccccataattagggagggggaatcaatcttctacgaccgacgagcgaacttttactatacgagtccaacctcacctatctgcaaactgttgtaaaaaaaa

SEQ ID NO: 102720 - DNA, 324 bp, Zea Mays
atgtggcaacctttgaagatcgagtttgaacgccgcggtttgaacacatctattactgctaatccaaaaactgtggacaatgacattggcatcatagacagttcgtttggtttccaaactgcggtggagattgctcagcaggcaattgacgctgctcatgtggaggctgttagtgatgtaggccttgtcaaactaatgggatggagtacaggccatatccacctggaaggtaagggtggcctgtttgagtttctgtataagaaggggcatgctgacatcgtggttgctgcaggaccactagaagatgtcgctggatgtgaatga

SEQ ID NO: 102721 - DNA, 121 bp, Zea Mays
aagaaagacatccttaatagacatcgtttgatctcaaacttttggaaaaacttttataaatcccaaaatataattttagggtgttacatcgacctcggctcatggccacaacttcattgac

SEQ ID NO: 102722 - DNA, 202 bp, Zea Mays
ataagtttgagttcatgtgacttattttagaaacttgagctcacaaactttctcttatttggtctctgtatggtggaattatgtcattttataatctctattcgttcagtcagtcgttgtgaactcttttctaatcgctcacttcattggtcgtgttgtacaaaaacatattgaatgaagtaaataataacatcagttagcc

SEQ ID NO: 102723 - DNA, 333 bp, Zea Mays
atgacgaagcaaaagatagtgatcaagctcagcatgccatctgagaagagccggtccaaggccatggtgctggtcgccagaacggacggcgtcagctcgatggagatcgccggcgacggcaaggaccagctggtggtggtcggcgtggacgtcgacaccgtctgcctggtcatgtgcctgcgcaagaagctcggctacgccgacatcctcaaggtggaggaagtgaaggacaagaagccgcccgagggacccaaggtcgtcgacccgctgccgtattactgcccttgttattacggttactactgccaccatcacaacaacccgtggtgttga

SEQ ID NO: 102724 - DNA, 759 bp, Zea Mays
ctttctcattttgatgcgattttttgcctcaattttgtaatatagaccggatttgaagaaaagcttaggaattccaatatttggacttgtagtagttgatctagtttaaaaattctttagaaacacagttgtctcacctcaaggtacatattgctgcaatgtttgtttcatttaatgcacattaatttgtttcatgttttatggatgaattcaattaattaatgattttattgatgttaatcaatatagggataggtaatggaccgaggttggatgtacaatgtgccaagaccacatccatcgtacattcgaaatttgagaagctttattgaagcggccaacaagcacgcgaatttgcgaaagagcaaggagatattatgtccgtgcatcgattgtgataataagatagcttggagagatacaggagtaatccaatcacatctgctaaaaagagggtttaaaaacaattacacgatatggtcagaacatggtgagttggatccgtgtgaagtgcctggtaatgacgagagagttgtcggaattttagatcttaaagttgatggtaaagtggataatgtggatgctaatcaagattttgaagaatttgattgtgaagagatgttgtgccatatggaaccagaaatgttgagttctgtgggatcgcagaaagggctatctaaaatggagggactggaaagtgcctcaaaagaacctttatatgatgaatcaaagggttgtgacaaagagtttactacactg

SEQ ID NO: 102725 - DNA, 368 bp, Zea Mays
cgggcgacgtgatgtccaagcaaaagatcgtgatcaagctgggcgtacccaacgccaagaaccggtctaaggccatgcagctggcatccaaatttgtcggggtgagcaaggtggggatcaccggcgacggcaaggaccggctggaggtggaaggagaaggcgtggacaccgtcctcctggtcaactacctgcgcaagaaggtctgccgcagcgctgacatcgttaaggtggaagtgaaggacaagaaggacgagaagaaaccggaagagccgccgtattattgctggcccaattactactactgtccgccgccgccgccgccgctgcccatggtcgagcgagccgacgacagttgccacgtcatgtga

SEQ ID NO: 102726 - DNA, 790 bp, Zea Mays
attcttcacaactgcggcttagtacacgtaggccgcgcgcgctagctcttggtctagctttaggtgcaccagcagcgcgcgaacggcggatcgatcagcttcgtctttcaattcttctccacatcatcatttgcgccacgtacgtaaatcggctgctgcgggagagacgaccggccgccggcgacgccgccatgaccaagcaaaaggcagtgatcaggcttggcgtaacgaacgaccagaaccggtctaaggccatgcagctggcgtcccgatttcacggagtgaccttggtgtcgatcaccggcgcaggcaaggaccagctggaggtggtaggagaagacatcgacatcccctgcctcgtcaattcgctgcgcaagaaggtctgccgctccgccggcatcgtcgtggtggaggaagtcaaggacaaggcgaaggtggaggaggagaagaagaagaaggaagaggaggagaagaagaagaaggccaaggagttgcaagaagcgatccagaagcactgcccgccgccgccgttctacggcggcccgccgtttctctgcgaggaacagacaacaggctgccacatcatgtgaagctgatggattctggcccgccgtttaaatatatacgtatactagtcagtacccgtgcgttgcaacgggaacatataataccatgataacttatatacaaaatgtgtcttatattgttataagaaaatatttcataatccatttgtgatcctagccatacataaattttgttattttaatttagttgtttcactactaca

SEQ ID NO: 102727 - DNA, 576 bp, Zea Mays
atgactgatgacaacatacgcgtacaaccagggtcgtcgtggtcgtcgtcgtcgtgttacctggaaggatcagccgcgctgcctggtgtctgttgcccgcccgtctataaatgtttgctgctgcagttgctgctccatcacaagccagctgccggctgcacctgcacagcgcatcgaacccatcggcacccggcgcgacggccatcgtcccgtccgttcatcccctactgctcagacctgtcgttcgccacaacatctgctggtcctaatccccagcgcggcagcgcgatgaagcaaaagatcgtgatcaaggtgtgcatgccatgcgacaagtgccggtccaaggccatggggctggccgccatagaaggggtgagcaagatagggatcaccggcgacggcagggaccagctggaggtggagggcgacgacatcgacaccgtctgcctcgtcaactgcctgcgcaagaaggtcggccgcgccgacatcgtcaaggtgaaggagttgaagcccgagccccgaggagaagccgcccgaggagaaggagaaactgttctgctgtggcctcatcagtaa

SEQ ID NO: 102728 - DNA, 342 bp, Zea Mays
atgaagcaaaagatcgtgatcaaggtgtgcatgccatgcgacaagtgccggtccaaggccatggggctggccgccaaagcaggggcgaacaagatggggatcaccggcgacggcagggaccagctggaggtggagggcgacgacatcgacaccgtctgcctcgtcaactgcctgcgcaagaaggtcggccgcgccgacatcgtcaaggtggaggaggtgaagcccgcggagaagaagccgcccgaggagaaggagaaggagaagcccgccgaggccgtgccgctgccctactgctggtaccccaatcccaattactaccactactaccactaccagtggtag

SEQ ID NO: 102729 - DNA, 1251 bp, Zea Mays
atggattgggcgcaggaagaacagagaccgaactcagcgagctgcgcgcagacacgcgacgaccatggcaagggagcagagaaaattgtgcggacggctggaacagagacggcgagcacgcgcgcacaaaaagcagggcgcgcagaggacagggaactgcgacgacgaaacgccatagctggagcaagagcgggacgcgaactaggcgacggcagcgcgcaaggacgatcttggctaggggaaaaactccgcgcgcagggatccgagctgaaaggagccgaggaagatggacgccatgggaagaggaagaagcagctgggcacactgcggcttggaaccgatcttagaaacggcgactggcacggacgggaggagttcgcggacaaggaagttccagcaggcagagaggcaccgcggccaccatggggaacgagccagagctgcgcgcgcgcgcaagaaaatcgctcggcagaaaggacggacagggagctccaagcaccgaactgcagccggaaccagaggcactgcgagcaggtagacctgggagggacctcgctggctgaacgagctggaagagagaagcaaggggagggcgcagggaaagaagaagcgctcggcgcagggagctgggcgccagagcaggaggcttcagggtgcggcgcagggacacgcgcggtcaagcgaacttgagttggagccagggagcaggaaatcagggcgacggcgcgtgcacagagaagcgaccgcgccatgggcgttcgcgggcggacgaactaagaagcttgagggagctaggcgagctgcacgggaggagcacgcagggaggtacgccggcgagggagcaggagagagaagggagtggctgcgcgcggcgaggaagctctagagaactgccatgggagctcagcagagaggaaacacaggggatgggagatgcgctggcatgggaggaaactgggggtcgcggcatgggtgatctggaacaagcgagcagaggggcgtggtccgagcgccgggcgccgggcggagtcgagggcgtgacccagggcgagcgccggctggaagaagagcagcgcgcactggaaataacgacggccgggcggtgggatttttcttcacacgttgagcggcacggccaggaagatcagcgatcggcggtgggagataagctccatggctgaatccagagcacgctggagattcacggctgaagattgaagcctacgggagagagacgcgtggctggcgatg

SEQ ID NO: 102730 - DNA, 100 bp, Zea Mays
ggtcagtgctgctctctcaggggccagggccagtcagtatcgcaggccgccatcaccaagttttcattaaaggtgctacaaacaaacaagggtgatgaga

SEQ ID NO: 102731 - DNA, 567 bp, Zea Mays
acagagcaagccatcaccgcgcgggaagcaatgaagcaaaagatcgtgatcaaggtgagcatgccgtgcgagaggagccggaccaaagccatgacgctggccgccggagcaaatggggtgatatcggtggcgatcgccggggagaagctggaggtggtcggcgacgacgtcgacccggtcaggctggccagctgcctgcgcaggaaggtcggccacgccgacatcctgcaagtggaggaagtcaaggacaagaagccgtccgaggaccccaagccgccgccggcgccgccggcgccgcagcccgtggtcgtgcacccgccgccgccgcactggccgcactgctaccccggaggctaccaccaccaccaccaccaccaccaccacccgccgccgccgccggtggtcgtctgtgacgagcccagcggctgccacatcatgtaattagaacggctgacatgaatagctgaggtcgattttttttcgtcatgtaggtacagttcttttcagcgacttgaggttaattgagggagctatgaacgatttgtgcaaataaagtttacttttttt

SEQ ID NO: 102732 - DNA, 348 bp, Zea Mays
atgaagcaaaggattgtgatcaaggtgcagatgacctgcgacaagtgccgtaaaaacgctctggctctagcttgctcgacatatggagtgcaatcggtggggatcgagggtgaggagcgggaccaccagctcgtggtgatcggcgacggcgtcgacgccacctgcctggcgagcggcctgcggaagaaggtgaaggcgggcagggcggacatcgtgaagcagtggtacccctaccatcccggctactactgcccagggccgggcgtcgtccacccgtacgccggccactgccttgtcgaagacccttgcgccgacgacgaggctccgtggcggtgcaccatcatgtag

SEQ ID NO: 102733 - DNA, 1087 bp, Zea Mays
cacactactactagtgtcagagccaattaaggcagagagccagagagtccttctccctgctcgagccaagcaggtgttgtagaaagagcagtgtgtgtttggctctctctgcgtctcatcgtatgtcaggagaaatgaggaaggagatggtcataagggtgcagacgagctccgagaagggcaacagcaaagctatcaaggcggccgctgcgatctcaggggtggagtccgtgatgacgatcgccggcgaggacaagagcctgctgctggtgatccgcggcgtcggcatcgactccgaccgcatcaccaagaagctgcgccgcaaggtgggccacgccgaggtggtggagctgcggaccgtcgacgccgccgccgccgaccacgcgccgtaccgctactaccacgcgagcccgagcccgagcccgagcccgtaccgctactacggcggcatggaccaccgctacggcggcgccggcggagggtaccccgccgcgcagtaccagcagcagcacgactaccagctgtaccacccggcggctgccaccacgcacacggtggtgcaccacgagtacgcgaccgaccccaacggctgctcggtcatgtgatgccgctggtgttgtctcctgtgatctgggagtgggggagggacgagatcacgagagtgtgcacgccactaccaccgcctatatagcagctacctgcagtgcagtgtgcatatccgtacgtacgtgggctctgcgtcaatctgtgattctgtgtcaacatgtatatactccatggtgtaaagcttcctacatactacgtgccaagtgcaagctttactgcttgactgggacgacgtaattcaaggaagaacgcggtcatttgcttccggtcactttgtaacactatttgtcccgtcctgttcacgaaaaatgctttctcaaaaccaaaaaaaaacaaaaattgattgtccagtgtaacctctagcatatatataggagcaaagctaaacaaggaagaacgcggccatttgcttccggtcactttgtaacactatttgtccctgttcacgaaaaatgctttctcaaaacaaaacaaaaaaaac

SEQ ID NO: 102734 - DNA, 379 bp, Zea Mays
cagggctcacaatatggtaagcctaggacaccacaccatcgctccaccctcttgtatccagcaacggcggcggtggcgttagcggtgtgacagtgaggcaggtgacatggaggaacatggcggaagccctcgagagaagctgcggggacgcgtgcgggaggccgcatccgtggggtggacctggagatgagcggcgtcacgagcgcgcgccctggagagacgccttcgagctcgaccgcgctgatgtacgctgcctcaaactccgcgaccccgccgagcggttcgccgccctgcagctcggcctcggtggctgccccttccgatgggggaccctggcaagtctgccttcgttttcgccccaatctccttcatgatgttc

SEQ ID NO: 102735 - DNA, 2346 bp, Zea Mays
gtccgattcgcaaaagggcccccctcccccccacagcgcatcaaatttattgcactgctctgctgcctctcatgaatggcgtttatttaagtctccaccctccgccccggggaactcttttctgtgtatcgcggaattttttgggttctcgggctccgccgcgatcccatccccatccccgccttgccgttgccgttgccggcccccccggttctcccggagctttctttctggccggcgcagtagagaagcaagacagaattgcggcggcgcctgcccgcgcaaaggaaataatcagcactgtttgccaaaggcagctcctgacgcatggctagtacttaaggatactttatgtgcagtgcagaccatgaagatagatgacgaaaggccttaccaaactcatatttttcatgatcttgcatctaacggcagtcctaaattagactgtgaggctgaaagacaaagtaatcacaaggttgaggcagataaaatggttgagcaaaccaatcaatctgaagttagctttgtgaaggctgagcatctgaatggaggtaaaattcggaagacacgcattgaggattactcctatgacaaggatgttgtagagatcaaactgccagacacagatctttcttctgattacggtgtccattttgtcaaggatgtctgcattgatgaaggagttcttccagatcaaaagatttcatcagaaaagcaagtagaccaaaaggtgtctataaactttgattcctcggaatatacaaacggggacctaagggaagatataagtgctgactctacaaaaactgcacatgaattaaaaacagaaatagttgtcctacctgtcctgtgtgatactcataacaataatactgtggaacagaactcctcatgcaaaaagcaggatcttgaagataacaatactacagatgtatctaccgattctcacgatgagggattaaatcccaaacaattaccatttcatgaagttgcacaagattaccaggaggttgacagtgtcattccggagagcaatgaaaatcaggaccggcttttcactggagatgcaacccatcaggtttcatcgaatgattgttatgaagctggaattggtatcgcgtcagaggccagtaacatcattcacaatgatttaccagaagaatcagccgctgctgatttcccggtggtgatacctgaggaagttgctgtcactgctgcattgggtatggaagtatccaaccaagttaatcactataacccttttattgcctatggatcgctagacgagacatgggaacccaatctctctctccctactactgtggatgccgcttctatagcacccatatgtcctgtcgaaaagacagatagttttagtgatcttgtcaacaggccactggaaggatttgatcctattgaactagacgaagctataattgaagagaacaggtcagattcagttgaagaaagctcaagcacattggacgtgcaagcatctgaacaacgcgatgatcagagagagagtctcactaataatgacgtgaaaactgatgcagcacatgaaacgggcaccgctatatctctatccaccagcaatggagagcacagtggcgtcaagggtgagaaatgtcagaaacatgagactgatggtcgagatacagatgatttcaacccaagagatgtggagcctggcacaaaagtaagcgaggacacaacggatgttaagagctcagctcatgtgcagacagaatctgtggttcaacaaaacggacctgatagcgcgaaagtgactactgcacagactgttattcgcaaccccttcgagtccagcttctctggacctagcattacgtcaggtcctctaacgccctctggtcacataccatattctggcaacatttctcttcgatcagagagcagcacaacgagtactcgatccttcgcgtttccagtactacagaacgagtggaacagcagccccgtgaagatggccaaggccgaccgcaggcgtcagaaggaagaccgaggctggggttacagaatcctttgctgtaaattctgaatggcgcttgcctcccctgcatcctttttgcctgtcgagttgagcccttcgtctctgtcatgcttgagccccgtggaggtccatgttaaattcattcatcaaatgtttctctcctctcctctcctcttgtctttctgctcccctgctgttcttatttatctctagcaggttaatggcttgtcggattcggtagtggcttgtaatttacagaacactatgaagagtgaggactcaagtcatagctttggtatagaatttgcggatacttgttcgagtattattcc

SEQ ID NO: 102736 - DNA, 438 bp, Zea Mays
aagcatcattcataggattaagcattttcattttccggttcacagactacagaacgagtggaacagcagccccgtgaagatggccaaggccgaccgcaggcgtcagaaggaagaccgaggctggggttacagaatcctttgctgtaaattctgaatggcgcttgcctcccctgcatcctttttgcctgtcgagttgagcccttcgtctctgtcatgcttgagccccgtggaggtccatgttaaattcattcatcaaatgtttctctcctctcctctcctcttgtctttctgctcccctgctgttcttatttatctctagcaggttaatggcttgtcggattcggtagtggcttgtaatttacagaacactatgaagagtgaggactcaagtcatagctttggtatagaatttgcggatacttgttcgagtattattcc

SEQ ID NO: 102737 - DNA, 3207 bp, Zea Mays
cgacgacaaaaaacgcctcctccgcctcctccgccgccttccgcctgttctcacttcccgccccttcctccggacctagactcctccaagcgccagcgccggtgaacaccactttcccatacctgcgccatgggccgcccaaagggcggcgccgcgtcctcctcgaagaagccgaaggcgaagcagaaacagcgaggcggcgtcgacttcaagaagtacaagcacaaggtcgggcgcaagcttccgccgccgaagaatgccaccaacacggaaatcaagtccaaagcgatcgtgctgccggagcagagcatggcgtcggagaggacgggcatggcagtgaacaagcgcgggctcacgctacgggagctcctgcagcagacgggacactacaatgccaatgtgcggcgggctgcactgaatggaataaaggacattgttgtcaagcacccaacagagcttaaactgcacaaggttgctataattgagaagctgcaggagagaatatgtgatactgacaaggtggtccgtgaatcgttatacaatatactgcagtctctgatcttcccatctttgaaagaggataacactatatctgtgcggagtacactgtttttgctgatggctaatattctgaatggaacgacccatctatctgtggagatccagttaatggcttttaggtttttggagcttgtggttcttaatttcccgtcatccttttctagttatgctgaacagaccttcaacaactttgttgcggtactgagcaacgacagaatcaacctacatgataggaataaacttaacagtgttcttagtgggcttggccactgcctttccttggttgctaaaacgatagaaaatgatgatacatcaaatcgacaggctcataacctctctgcaagggaaaattggaaatttaccactgatgaagatagcacaggaggggcattttcaatgtccaatttattaacgaagcttcagaaccttgtccaaatcctcactaattctgtagaggtttcagcttcagagctctgtgcaaagtcagctcttgatgttcagtcaagtgaagcattgctatcagcccttcagtgtctggatctaatctgtaggatatttgttcatgaggtgaagaaacctcagttgaaattctccataccaaaaaatcagcatggaccagactggttgagaagttctttactggtacatctaaataatttatggggagtgaagcgcttgtttcatggaaagggagacgacaaatttttcattttcaatttaaggattgctgaaatctttctgcgcttgaatgtatggatagataacactgtgttttcagctgaagaattttgcctttttgtgtcttctctgttcgcaaaggcaaaaacacttcgcaataaggacctcatcgaaatatatttgagcccacttataacctgcattccaggtcttatatccaatgctccagatgactcaaaaggctatttgttggaggtatttacggactcatttaaagattgcaaggtggattgcaagctaatgttgccatatttggatgcagttggaggaatgctttttcctgagaaaacaagcatatggcttgctgaaaatgattcaggtgtgttgggctatcatgacatatggatacatgagctacctggaattttgctacaatcaattgataaagcccccttagttacaaaggttgctttggagcttcttctaagaattgggcaatacttccctgcagtggactgtggaaggctgcgccccttcatgaagttatttggtgttgagtcattaccaggagctgtggatcttggtccttttgttaaacttcctcgtgattgccaagaacttgccatttcatgcctttattattttcccagtctgctccctgacgtcattgagccattggcctcatgttgcttaagtgatgcgctggaacccctcatactgttcagggccattgaagtcctacagtcaacatacaaggctggtagtttacatataacagagcaactcagtttcttgttgctgctaatggcaagattcagagttcatcctgttactctggaggattctagcaagctttcaaattgggatactttcaagtcattgaatcgcctaattttgacttccctatctgaaatgggcgatggctcgctggtccttgaattgatttggaataatttatttaatgcaattgctcaaaaaccatcgttgcataacatgaatggcttgcttagaattattgttacacttgatgccggaactagtaagctcatgaatggaaatgttgtaaagcttatagctggttacttggttgatgcatctttggatctgtctaaatccaccgaatttggttttcaacccgataagacgagactatttcagtactttctcaagccatgcaccatcatgtttgacaagaatgacaaggttctttgcagcacattggagtccctcaaatcttttgtaacaggaggcgatcatctgctttcatctgtctccaacttaaactacccaggagagctgtcgtgtcgagtttgtgctgtcacaaccatactcattttcttatgcaatgaccggaaactccataggaatctttctcttggcaaattggttattaaaggcatcctggaatatataaggcatcagctggattctagtgtgcctgatgtaacacatgtaggaaaacaaaagttaaaatctgcttttgagcaactcaagaccaaagcattgcagttgaattgctgggatagaagtgagctggagggtttttcgagtgctacatgatgtaaaatgattttttcccactatatgatgatactagctagttttgttatgcaaatgagcaatccgattgtattctaaggtatgggcaacaccgttttagggcacgttggttttaatctcaatccatatggatccgaccgaatagagtgggtttaaatctataccaaatcaaaatctttcataattcctttcaatcccgtctaatccatataggatggtaataactgaacaagttttagagtttgttcgttttgtgccaatccatatggatttgacggattggatggatttaaattcatagtaagttaaattttttttttattttttttatattcttcaatccatgtgcattggaaataactgaacaagattttattggtttttttttctctcgaatgattgacatag

SEQ ID NO: 102738 - DNA, 2843 bp, Zea Mays
gccatgggccgcccaaagggcggcgccgcgtcctcctcgaagaagccgaaggcgaagcagaaacagcgaggcggcgtcgacttcaagaagtacaagcacaaggtcgggcgcaagcttccgccgccgaagaatgccaccaacacggaaatcaagtccaaagcgatcgtgctgccggagcagagcatggcgtcggagaggacgggcatggcagtgaacaagcgcgggctcacgctacgggagctcctgcagcagacgggacactacaatgccaatgtgcggcgggctgcactgaatggaataaaggacattgttgtcaagcacccaacagagcttaaactgcacaaggttgctataattgagaagctgcaggagagaatatgtgatactgacaaggtggtccgtgaatcgttatacaatatactgcagtctctgatcttcccatctttgaaagaggataacactatatctgtgcggagtacactgtttttgctgatggctaatattctgaatggaacgacccatctatctgtggagatccagttaatggcttttaggtttttggagcttgtggttcttaatttcccgtcatccttttctagttatgctgaacagaccttcaacaactttgttgcggtactgagcaacgacagaatcaacctacatgataggaataaacttaacagtgttcttagtgggcttggccactgcctttccttggttgctaaaacgatagaaaatgatgatacatcaaatcgacaggctcataacctctctgcaagggaaaattggaaatttaccactgatgaagatagcacaggaggggcattttcaatgtccaatttattaacgaagcttcagaaccttgtccaaatcctcactaattctgtagaggtttcagcttcagagctctgtgcaaagtcagctcttgatgttcagtcaagtgaagcattgctatcagcccttcagtgtctggatctaatctgtaggatatttgttcatgaggtgaagaaacctcagttgaaattctccataccaaaaaatcagcatggaccagactggttgagaagttctttactggtacatctaaataatttatggggagtgaagcgcttgtttcatggaaagggagacgacaaatttttcattttcaatttaaggattgctgaaatctttctgcgcttgaatgtatggatagataacactgtgttttcagctgaagaattttgcctttttgtgtcttctctgttcgcaaaggcaaaaacacttcgcaataaggacctcatcgaaatatatttgagcccacttataacctgcattccaggtcttatatccaatgctccagatgactcaaaaggctatttgttggaggtatttacggactcatttaaagattgcaaggtggattgcaagctaatgttgccatatttggatgcagttggaggaatgctttttcctgagaaaacaagcatatggcttgctgaaaatgattcaggtgtgttgggctatcatgacatatggatacatgagctacctggaattttgctacaatcaattgataaagcccccttagttacaaaggttgctttggagcttcttctaagaattgggcaatacttccctgcagtggactgtggaaggctgcgccccttcatgaagttatttggtgttgagtcattaccaggagctgtggatcttggtccttttgttaaacttcctcgtgattgccaagaacttgccatttcatgcctttattattttcccagtctgctccctgacgtcattgagccattggcctcatgttgcttaagtgatgcgctggaacccctcatactgttcagggccattgaagtcctacagtcaacatacaaggctggtagtttacatataacagagcaactcagtttcttgttgctgctaatggcaagattcagagttcatcctggggacatagttactctggaggattctagcaagctttcaaattgggatactttcaagtcattgaatcgcctaattttgacttccctatctgaaatgggcgatggctcgctggtccttgaattgatttggaataatttatttaatgcaattgctcaaaaaccatcgttgcataacatgaatggcttgcttagaattattgttacacttgatgccggaactagtaagctcatgaatggaaatgttgtaaagcttatagctggttacttggttgatgcatctttggatctgtctaaatccaccgaatttggttttcaacccgataagacgagactatttcagtactttctcaagccatgcaccatcatgtttgacaagaatgacaaggttctttgcagcacattggagtccctcaaatcttttgtaacaggaggcgatcatctgctttcatctgtctccaacttaaactacccaggagagctgtcgtgtcgagtttgtgctgtcacaaccatactcattttcttatgcaatgaccggaaactccataggaatctttctcttggcaaattggttattaaaggcatcctggaatatataaggcatcagctggattctagtgtgcctgatgtaacacatgtaggaaaacaaaagttaaaatctgcttttgagcaactcaagaccaaagcattgcagttgaattgctgggatagaagtgagctggagggtttttcgagtgctacatgatgtaaaatgattttttcccactatatgatgatactagctagttttgttatgcaaatgagcaatccgattgtattctaaggtatgggcaacaccgttttagggcacgttggttttaatctcaatccatatggatccgaccgaatagagtgggtttaaatcta

SEQ ID NO: 102739 - DNA, 2525 bp, Zea Mays
cgctcatctcctcctccgcggagcaattccgtcgaacgcctcgcgcgcgcacgcgctctcgcaccgccctcggcctttgtcccatcgaatgccgtagcgctgtggacgggcgcgcgcggcggtgcctgccatggcttcgctctgccccttatcagccgcgcccgctttcccgcgcgctgctcgacctcgtgccgcaagcttcaggggacccgcttcctggagcggcctcgcggcgaccgcgagcaatgcctgtgtctgtagctgtggacttctgcccactggaggctacgcgaggctgcggtcgcgactaaggagtcccgtgcgcgccaagatcgacgaggcggacaagggcacgggcgccggtctgggcttcccctcgccacgccgtaggaagctacgcttgcgcctgcgaccacggctgcgcctcttgtggtggcggctccggcggctgtcgccgcgggagctcatgaccgacgccggggccgcgctgcggcgcgccgttcgccgcgtgcctcccgcggccgcggcgccggtcgtcctggcgcttctcctcgccgtggcgcggctcgcgctgcccaagaacgtggcccgggaggtggcctactcggacctcgtcgcggggctccgcgagggcgccgtggccgccgtcgctttcgaggaggactcgcgccgtatctacttcagcaagaacgctggggatgatgttggctccgacacgaacgagaccggtgagaacgctgcggcgccggcgccgaagtggccgtactacgcgcggagggtgccgcacgatgagggcttcttgctcgggctaatgcgggatggccgggtggactaccgttcgtcgccgcggcctgctgggaggctgctcgtggacatgctgagcacgctgctcacgctttgggtctcgctggtgcccgtgatgtggttcatacagcgtcagatgtctggtgcgggcggtgctgacaagcgacgcaaaccgaggaagcagagggtgggctttgatgatgttcagggcatagatgaagccaaggaggagcttgttgagatagtgagctgtctgcatggttcactgaattataagaagcttggagcaaaattgcccaggggtgttctgcttgttggccctcctggaactgggaagactctgctagcaagggcagttgcaggagaggctggaattccgtttttctctgtttctgctagtgaatttgttgaagtttttgttggacgaggtgcagctcgggtaagggatttgttcaaggaggccaaagaagctgccccgtcaatcatttttattgatgaacttgatgccgtgggtggaagtcgaggtagaagttttaatgatgagagggaccaaactctaaaccagctgcttaccgaaatggatggttttgactcggacatgaaagttattgtaatggctgctactaacagaccaaaagcactggatgctgctctttgtcgacctggccgcttctccagaaaggttgttgttggtatgcctgatgtggagggccgcaaaaagattctggatgttcatctaaggaatattcctttggaagaggatcacggaataatcagtgatctggttgctagagtaaccccagggctggtcggcgcagatctagcaaacattgttaatgagtctgctctactagctgcacgaagaggtcggaatactgtgtctcgggaggatattatggatgcaatcgagagggagaaatacggggtcactgggaggcaagaagctgattctgaaaggcaaggcctcaccaagttatttccatggctatctaaacctggaaataaaccatcaagccctgatgatttccgaggattgatgggttatcacacattaagctaacttagtagctcttgcaaggtctgagaaagaatataaagtgcaactaaatctggggaactgttgcctgtaattttatgtacatcagcaaatatacttgtcgatattatgtacgaagtatgctgcaaattgcaaccggtggccattgggactttgagaagaaagctattacgaactacacgaggacagtttgcgaatacaaaattccaacaattttcctagcttaagagtcagtttggataccaagggctaatcagtttcgtgcttcataattttgttagaaacacgactcaagtttcgtcacataccctgtaaagctagtggcgctcctgcttctttacacagaccaatcattcctctgattcttcccaactagaagtctggatgtgcaacgctgtgcaagtttacaaatgcagtgtcaagtgcggcgcatgggaactgaatctgcagcgaatgtgcaagaaatacacggcatcatatttcacagttcacaccgagcaacatttaatttctttttcctgttaacttacactaccgctgtctgtattttcattgaattactgtcaagaacaaactgcaactctagcagtttgagatgtgaaaccacccgatctgtaaacatgttgacagaaacctagaacccaaaaccatgtttttaaaaacc

SEQ ID NO: 102740 - DNA, 326 bp, Zea Mays
aagcaatcgaaggtattatactgttgaaagctgaaacaacacagtatcaaatcttaaaggtactattcaaattggagtgtgaaatgacacggtatcaaatctcaaggcatataaatacagttgaagcagtatggtatcgaattctcccaccaatagtgagcctacatttgatggcgtcatgaaatttcgtcttcatagtatgacaggatcattccctataaattatccctgtgtgttcacagatccaaacaagagatttgcgaagtagtacatctggcgagttcaagtcgattataacaacttaacatccacatatccaacaaaac

SEQ ID NO: 102741 - DNA, 1026 bp, Zea Mays
atggagacatacttgtcttcattattagaacaacaacaaggtgagcgagaagcattcttgtgttcttccgaggtcgcgttggcatcccttgagtatgaggagactacctgcaagccgatgtcgatcaaagaaatatacacagcaactgaaaacttgagtccatcaaacgtcattggacagggtattgcaggcaaggtatacagaggagtgctgacaaatggctggcctgttgcagtgaagcacattgttaagaatgagcatgcagaaacattcctaagggaagttaaaagcctgtcacatgtcaggcacccgaaccttgtgtcattaagaggttactgtgacgggcaggaggagtgttttcttgtgtatgagctgtgcatcaacggtaacctatcagaatggctatttggaaaagacaagaaccttccatggattcagaggcttcagatagcacttggaagtgcttgtggcctttggttcctgcacatataccctgaaggctgcatcgttcaccgtgacatcaagccaaccaatatacttcttggggttgatatggaacccaagctgtcagattttggactctctagagtcatcgacttaggtgtgtcgcacgtaagctctgaagtcagaggaacatttggctatgttgatccagaataccgccacaaccacagggtgaatgctgcaggggatgtgtacagcttcggcatggtgctcctccaactcctctcaggaagacgagcaatcaacatcatgaatactgctatgccaatgtcactggacaaaatggcttctacacttatccaagatggcaatgtatcagagtttgctgatcctaggttgaatggagagtattcaacggaggcatttgacctcagtttgaagcttgctctgttatgcactggccacaagaagcaacggccatccatggagcaagttgtgtcaagacttgagaaggctcttgagatatccatgagagatgatgcaaaacacaacaacattagcattgtcgaatcccttgcatag

SEQ ID NO: 102742 - DNA, 1312 bp, Zea Mays
taacggcttagctaaccgtacctgcttctagtcatcagcaagggcggcaaatcatgattccacggttccaccatacgtacgcctgttaggaggagctcaagacaacccgcgctaacttctttttacagcaatcagcgctcagcgtggcacctccgtctaggaaccgtcgcagtccatgggcacggcggcgtcttccacccgcttccggcacctgcgcgccgccttgatggccagcagggtgtcgcagatgatccacgggaagctccagaaccgcttctccccgcggcggtccgggtggtaggtcacgtggtaccacgccgacgccaccctcgacgcgtcgtcctccttgcacgccctgagccaccccctcacctccgcgtgcagcgcgtcgacggcggcgatgatgcggtccttcatctcgaagtagcgcttgttgtcccgccgcaggtacaccagcttgttccggatgttgcctgtcagaatctcgtcctcgcgctccgccgagtagtaggtcatcagggcgcccagcctctcggcgtacgcctcgtaccgctcctccgctgcgtccaggaactcgtcgaaaccggcgacctcgaggtccgggtcgtacacgcagctcggtgggcccgcaggcaggagcgcttctgcgtcctcctcgtgccgcagggcagcgcggtagagcttgccgaggacgccgttggagacgtacattggcctctcccaccgttccatgaagtccggaaactcccggggcctcagcgccaggggcatctcggctggagctcccgtcttggcgaagtcgaccgccatggagtgcagagcggccagctggacgcactcggggctgcgagctttcagtggatcacggtctgcgtggatcaagtgggcggtggagatggcaccgagggtatcgtttatcatgtaactgacgaagtgcttctgaatttcctgcaaccatttgcatgcagatgttaacatttttgctcaagcgagatggcaaaatatgcaggaatttgctgaatgctcacggtgagcatattcaggttcaaaacatcatttttttcattttaaacatgtatttttcaagtaggtagattacttccacatgccagccaatgcacataccgtcttaataccatgctggctggatggtcttgtgctcgttattgccctatcagggcctgtttcatggatttaatccttattacataaacacattttagaaacacgccaggtttcttagctcaatacagtagacagcacaaatcaatgtatccatcgtctcaggggaaagataacggcaattcataaa

SEQ ID NO: 102743 - DNA, 1091 bp, Zea Mays
actgccacagtggcacctccgtctaggaaccgtcgcagtccatgggcacggcggcgtcttccacccgcttccggcacctgcgcgccgccttgatggccagcagggtgtcgcagatgatccacgggaagctccagaaccgcttctccccgcggcggtccgggtgcgcgtcgacggcggcgatgatgcggtccttcatctcgaagtagcgcttgttgtcccgccgcaggtacaccagcttgttccggatgttgcctgtcagaatctcgtcctcgcgctccgccgagtagtaggtcatcagggcgcccagcctctcggcgtacgcctcgtaccgctcctccgctgcgtccaggaactcgtcgaaaccggcgacctcgaggtccgggtcgtacacgcagctcggtgggcccgcaggcaggagcgcttctgcgtcctcctcgtgccgcagggcagcgcggtagagcttgccgaggacgccgttggagacgtacattggcctctcccaccgttccatgaagtccggaaactcccggggcctcagcgccaggggcatctcggctggagctcccgtcttggcgaagtcgaccgccatggagtgcagagcggccagctggacgcactcggggctgcgagctttcagtggatcacggtctgcgtggatcaagtgggcggtggagatggcaccgagggtatcgtttatcatgtaactgacgaagtgcttctgaatttcctgcaaccatttgcatgcagatgttaacatttttgctcaagcgagatggcaaaatatgcaggaatttgctgaatgctcacggtgagcatattcaggttcaaaacatcatttttttcattttaaacatgtatttttcaagtaggtagattacttccacatgccagccaatgcacataccgtcttaataccatgctggctggatggtcttgtgctcgttattgccctatcagggcctgtttcatggatttaatccttattacataaacacattttagaaacacgccaggtttcttagctcaatacagtagacagcacaaatcaatgtatccatcgtctcaggggaaagataacggcaattcataaa

SEQ ID NO: 102744 - DNA, 836 bp, Zea Mays
tgcgcaatgaacacggagagctttattgactcggaggaccggtgcgcaacgcaacgacacgtcgtcggatgcacgacggacgcaggcagcaaacatcagccagagacaaggacacggaccgcggtacgtagctagctagtaagcaaattaaggaaccagcacgggcaccacaccacaccagcgacgtgcactagtaaactgtgacgcgtcgatgaatggactggaactgtactgtactggaccatctccagttctcgctccatctagttcttgaggaggtagtcgtcgaggtcgtggaacgtcttggtggcggtctccttgatgacgtccgggtcaggcacctggtcgttggccttgtcgaactccatggcccagctgacgacggcgccgccctcgccctccgccttggccggagtcaccttcagcgtgatcttgaagttcttgtagaagtccgccagctcgccgtccaccacgctgtacgacaccaccttgttctcgtcgtccgccgtctcaagcttctccttggcgaacgtcagcatcggcaccgctacagcaaacatccgatgtatatgcaagagatactcaggtcccagtccaagagaggcgctaggcgctagccaagccaagaatggttacgtagtaccgtaccctcggtgtacttgaggaggcggacggtgccggccgacttgccgtcgccctcgacggtctcgatgctcttgtactgctcggggaagatcttggggaacagctccgtcgagtcacgcagcgccgcccacagcttgtcagccggggacttgacctccaccaccagctcaaccttggacgccattgcctct

SEQ ID NO: 102745 - DNA, 534 bp, Zea Mays
atggactggaactgtactgtactggaccatctccagttctcgctccatctagttcttgaggaggtagtcgtcgaggtcgtggaacgtcttggtggcggtctccttgatgacgtccgggtcaggcacctggtcgttggccttgtcgaactccatggcccagctgacgacggcgccgccctcgccctccgccttggccggagtcaccttcagcgtgatcttgaagttcttgtagaagtccgccagctcgccgtccaccacgctgtacgacaccaccttgttctcgtcgtccgccgtctcaagcttctccttggcgaacgtcagcatcggcaccgcctcggtgtacttgaggaggcggacggtgccggccgacttgccgtcgccctcgacggtctcgatgctcttgtactgctcggggaagatcttggggaacagctccgtcgagtcacgcagcgccgcccacagcttgtcagccggggacttgacctccaccaccagctcaaccttggacgccattgcctctgcacagatagctag

SEQ ID NO: 102746 - DNA, 952 bp, Zea Mays
cagctcagcgcctgcacagcccccatgaggccatgacccagccctgccctgccctaccgctctcgcgtcgagcaccagaccagcgcagcggcacaagtgtggcgctctgtcattgaccgcgcgcccaggatgcatggcagacacattcactattatggctatttaaccctggccagcttcggccttcgccagtccaccaccacacaagaagaggcccccagtccccagccagtccacagctctccactcgagaaacctccagtccagctccacccttcgtccagaggcacaacacacacaccatggctcccagcaagcttgcggtggtcgtcgccttggtagcgtcgctcctcctgctcaccaccagcaacaccaagcttggcctgttcgtgctcggccaggctgctccgggcgcctacccaccacgggctcctccgccgcaccagatcgtcgacctcgccaaagactgcgggggcgcgtgcgacgtgcggtgcggcgcgcactcgcgcaagaacatctgcacccgggcgtgcctcaagtgctgcggcgtctgccgctgcgtgccggcgggcactgccggcaaccagcagacgtgcggcaagtgctacaccgactggaccacgcacggcaacaagaccaagtgcccgtgactccttgtccttgacgagagcagcatgagtccatgggcccactggcgccacgttttgtatgatccgaccccgtcggcgtagatgtccgagcctgtagctatctagcttagatgtacgaggttgatgtgctctgctgtttgttttttgctagtacttctagtgtgtatctttgtgttgacgttgatgggtctgtgttcctgtgtaaaaaaaaaaaagaagaagtgtgcgatgcgtttcgcgtagcagtaaaatccatgcatctgggttggatcaatgcgccaattttctgcagtgttttgttt

SEQ ID NO: 102747 - DNA, 1564 bp, Zea Mays
catccgtccgtcgctccggcagaggaggatctcgatacgagcactacaacccacctaatccactctccagtctccagtctccaccacctttcccttcctctcccctccccaccccaaatcgaggccagccaggggcaccgccaccatcacttcaccgccgccgtcgacttcactctctctcactcccaaaccaagctaccttccgcccatgggcccaccgccgcgccgccgccaactcctgctgtctctcgcgctgctcgccaccgcggccgcctgctgcgcggcgggggcggcgcccaggctgtcgcccaactactaccgccgcagctgcccgcgcgtggagcggatcgtgtcggacgccgtcgccgccaagcagcgcgccaacccgtccacggcggcgggcacgctgcggctcttcttccacgactgcttcgtcaacggctgcgacgcctcggtgctggtctcgccgctctcctcctccggcgccgcgccggagcgcgccgcggagatcaacctctccctgcccggggacgccttcgacgccgtggcccgcgccaaggcggcgctggaggccgagtgcccgggcgtcgtctcctgcgccgacgcgctggcgctggcggcgcgcgacctcgtggccgccctgggcgggccccggttccccgtcgcgctgggccgccgcgactcccgccgctccgacgcgcgcgacgtcgagggcaacctgccccgcaccaacatgtcggcgcgagccatggtgcgcctcttcgcccgcaagggcctctcgccccgggagatggtggcgctggccggcgcccacaccgtcggcttctcccactgcgccgagttcgcgccccgcatctacggctaccggggcgccagccacgacccgcggctcaacccggagttcgcgcgcgcgctgcagcgctcctgcgcgggataccgcaccgaccccaccgtctccatcttcaacgacatcgtcacgccccgggacttcgacgagacctactacaagaacctgccccacggcctcggcctgctcgcctccgacgccgccatctgggagtacccgcccaccagggtcttcgcccagcgctacgccgccaaccgcaccgccttcttcgaggacttcgccgccgcgatgcagaggctcggcgccgtcggcgtcaagacggggcgccagggcgtcgtcaggcgccgctgcgacgcgctcgactgagtgtcgcgatgcttgttgtgccattgggtcggtcgatcgttgtaaggcttcgaattcgattacgggatatgagaggctcttctttctctgtacttggaaaatggggcgtgagtggtaactaaagtgatgaactgagggcaagctaattctaaattgcatgtcaattgcaatagggttacattaagactcaggctgggcaaccgtggatgacaattgctgaaacctcacaccatgagatgatgagactagagatgttaatggccctgattcctcacgggaaaattcttagaaacacatggatgtaaacgtagaaaaaaatctcccccaacagataaacggagacaaaaaaaa

SEQ ID NO: 102748 - DNA, 883 bp, Zea Mays
aaaaatacaaatgccctagagctagcttcggagattggccaaagtccatcataatccactgccggatcgagaggagacccgagacccctagaaagaagaccagcaagcaggtcgcgcgagcccaatagaccaccaagggagatgtgcgcgcggccggctactagtgagatgtgcctccatcatagcacaccatgtgatgcgggaggagcctgctgttccgcctctcatccccctacttcttccaagatgcaatcatgctgccccaagctcctcgggccctcggccgccatgattgcctcaccgcctctcaagagtcgcctccacctacttccaagaggaagaggccggagaagctatagtccgtgaagaaatcaagcggaggggcggcggtgtaggaggggccggcggaggagagagagggccgggggaggtgacagaaagctagagagagatgcatgatggagcatgatgatggcgtggttgatctcttcgatctagcacttctatcattcgagtcaagaagccatcatcagatcggtgcagtcctccctcctcctcctcctcctcctccttccagctcctctttatcagcttctctgtaacgctgcgccgccatggctttgggggaatcaagcgccttggtccgaagaaatccgtcttcttttcctagctaggatctacgtacttgtgcaagagtatgtcatgcatgctacgctatatgttattcctacatgttcttggtcgatctgtcgctacatatggtttgtgcagacatcaatactcgtctgtctttgattgatttgttttgacaccactctttgatccggagtttggttcatgtaatactatttcattagatatgaaaagaagaagcaaagctaaa

SEQ ID NO: 102749 - DNA, 1790 bp, Zea Mays
aaaaatacaaatgccctagagctagcttcggagattggccaaagtccatcataatccactgccggatcgagaggagacccgagacccctagaaagaagaccagcaagcaggtcgcgcgagcccaatagaccaccaagggagatgtgcgcgcggccggctactagtgagatgtgcctccatcatagcacaccatgtgatgcgggaggagcctgctgttccgcctctcatccccctacttcttccaagatgcaatcatgctgccccaagctcctcgggccctcggccgccatgattgcctcaccgcctctcaagagtcgcctccacctacttccaagaggaagaggccggagaagctatagtccgtgaagaaatcaagcggaggggcggcggtgtaggaggggccggcggaggagagagagggccgggggaggtgacagaaagctagagagagatgcatgatggagcatgatgatggcgtggttgatctcttcgatctagcacttctatcattcgagtcaagaagccatcatcagatcggtgcagtcctccctcctcctcctcctcctcctccttccagctcctctttatcagcttctctgtaacgctgcgccgccatggctttgggggaatcaagcgccttggtccgaagaaatccgtcttcttttcctagctaggatctacgtacttgtgcaagagtatgtcatgcatgctacgctatatgttattcctacatgttcttggtcgatctgtcgctacatatggtttgtgcagacatcaatactcgtctgtctttgattgatttgttttgacaccactctttgatccggagtttggttcatgtaatactatttcattagatatgtggatttcttctttgagctgagcgtttgacgctgtgtgtgtgtgtttcatgattgattcatgatccgaatatatacggcccataactatcccagctagctgttttctagagagatatgatctaatagtatttagatcagaagaacaacatgaaatacacatatatgtgcatcttctagcttcgatcccatatatgtacctttccctgatctcttcttatgatcgaaacgtgtgctctagttctaagaagttgtgagtttagctttgccttaatacgtgtattttagttttgtcaggaaaagaagaagcaaagctaaagattcattacatgatactagtactctatatactgcatgcaaatgcaacacattaaactaaagcccaaccgtattcacgaatcacgagcttgagtaagaccagcagcctgctaaagattctttgactgccacaaatctctcttgggcattgcatatactagctagtatctatgagaggttccaggtgcggctggtgccaagctagagctacccctgctactgctagcatgccatggcatcgtattggccagttagctgaggcagtccttctagcgtcacatgcatgcacacctctttattccagtcttccttttcctacgcaacaacccccaatgtgaggattatgtttactgataaagttgaaaagtatcgaagagtagcaatatgcgtcatctatattgtattatgcatatattatctgtcatttcattgttatggattcatgtatcaaataaattcttgttcagttaatgtttcctgaaaaatgttgtccagtttatgagccgggggcttcatcgttttcatctacttgttgagctactgcctaatggtacctagctccttagtatacattggaaaaatgtttttttattttgtactctctttatctta

SEQ ID NO: 102750 - DNA, 132 bp, Zea Mays
ttttttttttgtctttttcctaatttcgaaattcattttcttttattttttagaatacattattcattaatagatatgttttaaatattccaaaagtataataaatctaataataatattttaataaataaa

SEQ ID NO: 102751 - DNA, 1917 bp, Zea Mays
aacagatttcgtctccatttcctcctttctttccactaaaactccgcccccgtgtgccgtgttatctatccacccatcggttcgccttcctctcgccgctcgccgcatcgctttttagggttttctcgctcctgctcccccatcctccgcaccctcgctcctcccaacgcacgcgcgtcgacgacgaccggcagccgcgcatctgtccgccgccgccactcactacaaggagaaatgggcaacagcgacgctgcatcgcccgcatcggcggccgccgcgcgcgactccaagaagaagagggggagccgctcggcggcgaagctgaagcagagcaagcgcgacacacgccgtgagcagtttctgtctagggggcaaggtctgatctcatgtctggtctgtgcgatacattagtcttaatccgtgtttgtgattttggggatttctggttttcgattgacgattcggcagtggtgtgcatgacggatttgagctctccatgcgttggatcgcggtttttatatacaaagttatgatattttttgtgagacgttttgaccttcttctggatttaagctctccatgcgtcggatcaaggttatcttctctgagacgtacttctgaaatttatgtttttcaggtgctgcttctgaatgctacgtctgttcgttgattggggattgtggttatatagctgtaaagtttgtgttcttttttatggattcgttttaaatctgatataccatttcgttttggattggttcaggcaataaggatgccaaatctgcagcttcgccaacaggagcagtttctgggtcgcccatactcgcttccccgcaccctccacttcctcgtcgccgtgctgattccagatcaaggggcagtgatccggaggatagggatgaggctattgctgctggccttgaggcagatggcagtggccttgactccccaggctcagacaagcgccaaagtggtgactgccctcagaggaaggggttccctggcaatggcggtggtcccagcctcagcagtggaagcagtgtatggtccagctcaaggagtgtgagtgatgctgaggaggatacaggcggccctgaggatgagagtgaagtcttcgatgattgggaaatggctgctgatgcgctttatgtcgatgacagttcttgtaaccagagttcaggtcccacaccgacactcccacaagctccgaccactgcagaaccttctcatgcagcgaaaccagaaccgattcaaagcaagacaagggcttgggcaccggatgacatatttcgaccacagagcttacccagcatctccaagcagaccagcttcccagcaagcattggtaaccgctggcaggatatgggaatgagtgctgcgcagcagggaattctttcattgccgctgtcgtgccccatttgctgtgacgatcttgacctgacagattcgagcttctgtccctgtccttgtgggtttcacatgtgcctcttctgccacaacaggatcttggtggaagatgggcgctgcccaggttgcaggaagcaatacaacacagtttctgcagcagaaggcggcggtggaggtggctcaagagcaacagttgggactggacgagagatggaaaagcgactgtcccgttcttgtagcatgggtccaagttactaaactgccagggttatgctagatctatgttgtagcgctacccgttgcatgttactgtcagatatgctcgttttttgcgtatcgtctgcttttggtataaagaaatgtgaatattcgaaataggtgctgaatccatatagacttgtccagaaactcagttccataccgttctcgttgcatgtgatgcatatgttgctggagaggactgtttgttgcttacagtttgtgagataatatatatgccatataaggtga

SEQ ID NO: 102752 - DNA, 1546 bp, Zea Mays
aacagatttcgtctccatttcctcctttctttccactaaaactccgcccccgtgtgccgtgttatctatccacccatcggttcgccttcctctcgccgctcgccgcatcgctttttagggttttctcgctcctgctcccccatcctccgcaccctcgctcctcccaacgcacgcgcgtcgacgacgaccggcagccgcgcatctgtccgccgccgccactcactacaaggagaaatgggcaacagcgacgctgcatcgcccgcatcggcggccgccgcgcgcgactccaagaagaagagggggagccgctcggcggcgaagctgaagcagagcaagcgcgacacacgccgtgagcagtttctgtctagggggcaaggcaataaggatgccaaatctgcagcttcgccaacaggagcagtttctgggtcgcccatactcgcttccccgcaccctccacttcctcgtcgccgtgctgattccagatcaaggggcagtgatccggaggatagggatgaggctattgctgctggccttgaggcagatggcagtggccttgactccccaggctcagacaagcgccaaagtggtgactgccctcagaggaaggggttccctggcaatggcggtggtcccagcctcagcagtggaagcagtgtatggtccagctcaaggagtgtgagtgatgctgaggaggatacaggcggccctgaggatgagagtgaagtcttcgatgattgggaaatggctgctgatgcgctttatgtcgatgacagttcttgtaaccagagttcaggtcccacaccgacactcccacaagctccgaccactgcagaaccttctcatgcagcgaaaccagaaccgattcaaagcaagacaagggcttgggcaccggatgacatatttcgaccacagagcttacccagcatctccaagcagaccagcttcccagcaagcattggtaaccgctggcaggatatgggaatgagtgctgcgcagcagggaattctttcattgccgctgtcgtgccccatttgctgtgacgatcttgacctgacagattcgagcttctgtccctgtccttgtgggtttcacatgtgcctcttctgccacaacaggatcttggtggaagatgggcgctgcccaggttgcaggaagcaatacaacacagtttctgcagcagaaggcggcggtggaggtggctcaagagcaacagttgggactggacgagagatggaaaagcgactgtcccgttcttgtagcatgggtccaagttactaaactgccagggttatgctagatctatgttgtagcgctacccgttgcatgttactgtcagatatgctcgttttttgcgtatcgtctgcttttggtataaagaaatgtgaatattcgaaataggtgctgaatccatatagacttgtccagaaactcagttccataccgttctcgttgcatgtgatgcatatgttgctggagaggactgtttgttgcttacagtttgtgagataatatatatgccatataaggtgactgttttgtccttgtc

SEQ ID NO: 102753 - DNA, 1208 bp, Zea Mays
cttctctgagacgtacttctgaaatttatgtttttcaggcaataaggatgccaaatctgcagcttcgccaacaggagcagtttctgggtcgcccatactcgcttccccgcaccctccacttcctcgtcgccgtgctgattccagatcaaggggcagtgatccggaggatagggatgaggctattgctgctggccttgaggcagatggcagtggccttgactccccaggctcagacaagcgccaaagtggtgactgccctcagaggaaggggttccctggcaatggcggtggtcccagcctcagcagtggaagcagtgtatggtccagctcaaggagtgtgagtgatgctgaggaggatacaggcggccctgaggatgagagtgaagtcttcgatgattgggaaatggctgctgatgcgctttatgtcgatgacagttcttgtaaccagagttcaggtcccacaccgacactcccacaagctccgaccactgcagaaccttctcatgcagcgaaaccagaaccgattcaaagcaagacaagggcttgggcaccggatgacatatttcgaccacagagcttacccagcatctccaagcagaccagcttcccagcaagcattggtaaccgctggcaggatatgggaatgagtgctgcgcagcagggaattctttcattgccgctgtcgtgccccatttgctgtgacgatcttgacctgacagattcgagcttctgtccctgtccttgtgggtttcacatgtgcctcttctgccacaacaggatcttggtggaagatgggcgctgcccaggttgcaggaagcaatacaacacagtttctgcagcagaaggcggcggtggaggtggctcaagagcaacagttgggactggacgagagatggaaaagcgactgtcccgttcttgtagcatgggtccaagttactaaactgccagggttatgctagatctatgttgtagcgctacccgttgcatgttactgtcagatatgctcgttttttgcgtatcgtctgcttttggtataaagaaatgtgaatattcgaaataggtgctgaatccatatagacttgtccagaaactcagttccataccgttctcgttgcatgtgatgcatatgttgctggagaggactgtttgttgcttacagtttgtgagataatatatatgccatataaggtgactgttttgtccttgtc

SEQ ID NO: 102754 - DNA, 1474 bp, Zea Mays
gactctctctttcagtctttctctctctctctcctgtcgttaattattaaactttaaacgataaaaaccccagatatcagcctgacccaaaaacgttttctttttcaccaatgtctgtaaaattctatttatagaggcagcaaaacctcgcccactctacaaacacgtgacacctccgcccaccctcgccccctccctaccggcaccgcccagatggcctgctcccacatcgccgccgcgggggtctcctcccccgccgcagcggcggctcgttccccggcgcattctcccgcttccgccttcgcgcgcctccggtcgacgcctcgtttcgcgagcgctggcttgtcggttaagggaaacggagcggcgttcccgttggtcgccgccgcggggccggccgcggcggcaccggtggccgacctggacggccgcccggccacggagaagcagcccatcatcgtcatcgacaactacgacagcttcacatacaacctctgccagtatatgggggagcttggattgaacttcgaagtataccgcaatgatgaactgaccatagaagatgtgagaaggaagaacccaaggggaatacttatttctccaggacctggtgaaccacaagattcgggaatatcattgcagactgttcttgaattaggcccaaccatcccaatttttggagtttgcatgggtctgcaatgcattggagaggcatttggaggaaagattatccgtgctccttctggagtgatgcatgggaaaagctctccagtttattacgatgaggaattaggaaaggcattgttcaatggcttgccaaacccttttactgccgcgaggtaccacagcttggtcattgagcaagaaaccttcccacatgatgctttggaggctactgcatggactgaagatggacttatcatggctgctcgccacaagaagtacaaacacatccagggtgtccaattccacccggagagcatcatcacccctgaaggcaagaaaatcatcctcaactttgtcagattcattgaggaactggagaagcagcgttcgtaggggaggtagacgcgacaggtggtttcatttcatagatcagacggaagcagagacaaggcgcttaaagctgcgccaggttccggggctggcagttgaagcatagctaggaaacagctttccctctcttaattcgttgtgttcgtggtgacataatctgtgtgcggaccgaatttagaataaagtacaggcgtccgtctgatcaaataagcaccggtgttggtgctctatagatgaatatatccggtgattttcggcatgggaggcattggcacatttttgtctgagttctggcggtagcaagaccggagtaataaccatcaggcgtttctatgttggttacgtgccgcacgcaggccgggcgtgcggaggatttatgccctgagaggctgagactatctccctcgtcccttatttt

SEQ ID NO: 102755 - DNA, 1346 bp, Zea Mays
atggcctgctcccacatcgccgccgcgggggtctcctcccccgccgcagcggcggctcgttccccggcgcattctcccgcttccgccttcgcgcgcctccggtcgacgcctcgtttcgcgagcgctggcttgtcggttaagggaaacggagcggcgttcccgttggtcgccgccgcggggccggccgcggcggcaccggtggccgacctggacggccgcccggccacggagaagcagcccatcatcgtcatcgacaactacgacagcttcacatacaacctctgccagtatatgggggagcttggattgaacttcgaagtataccgcaatgatgaactgaccatagaagatgtgagaaggaagaacccaaggggaatacttatttctccaggacctggtgaaccacaagattcgggaatatcattgcagactgttcttgaattaggcccaaccatcccaatttttggagtttgcatgggtctgcaatgcattggagaggcatttggaggaaagattatccgtgctccttctggagtgatgcatgggaaaagctctccagtttattacgatgaggaattaggaaaggcattgttcaatggcttgccaaataaaaccttccgagttgacgccgccttggcaccctttgcttccatggacagcccttttactgccgcgaggtaccacagcttggtcattgagcaagaaaccttcccacatgatgctttggaggctactgcatggactgaagatggacttatcatggctgctcgccacaagaagtacaaacacatccagggtgtccaattccacccggagagcatcatcacccctgaaggcaagaaaatcatcctcaactttgtcagattcattgaggaactggagaagcagcgttcgtaggggaggtagacgcgacaggtggtttcatttcatagatcagacggaagcagagacaaggcgcttaaagctgcgccaggttccggggctggcagttgaagcatagctaggaaacagctttccctctcttaattcgttgtgttcgtggtgacataatctgtgtgcggaccgaatttagaataaagtacaggcgtccgtctgatcaaataagcaccggtgttggtgctctatagatgaatatatccggtgattttcggcatgggaggcattggcacatttttgtctgagttctggcggtagcaagaccggagtaataaccatcaggcgtttctatgttggttacgtgccgcacgcaggccgggcgtgcggaggatttatgccctgagaggctgagactatctccctcgtcccttattttaaacagtatcattatacaattccgcgttacctgc

SEQ ID NO: 102756 - DNA, 1298 bp, Zea Mays
acgaatcgcctcttccaccttctctctcccccccttcctggcttggtccgccgcactgttgacgggccgcttgtatctgcgtaccacccgcaggtttcgcgagcgctggcttgtcggttaagggaaacggagcggcgttcccgttggtcgccgccgcggggccggccgcggcggcaccggtggccgacctggacggccgcccggccacggagaagcagcccatcatcgtcatcgacaactacgacagcttcacatacaacctctgccagtatatgggggagcttggattgaacttcgaagtataccgcaatgatgaactgaccatagaagatgtgagaaggaagaacccaaggggaatacttatttctccaggacctggtgaaccacaagattcgggaatatcattgcagactgttcttgaattaggcccaaccatcccaatttttggagtttgcatgggtctgcaatgcattggagaggcatttggaggaaagattatccgtgctccttctggagtgatgcatgggaaaagctctccagtttattacgatgaggaattaggaaaggcattgttcaatggcttgccaaacccttttactgccgcgaggtaccacagcttggtcattgagcaagaaaccttcccacatgatgctttggaggctactgcatggactgaagatggacttatcatggctgctcgccacaagaagtacaaacacatccagggtgtccaattccacccggagagcatcatcacccctgaaggcaagaaaatcatcctcaactttgtcagattcattgaggaactggagaagcagcgttcgtaggggaggtagacgcgacaggtggtttcatttcatagatcagacggaagcagagacaaggcgcttaaagctgcgccaggttccggggctggcagttgaagcatagctaggaaacagctttccctctcttaattcgttgtgttcgtggtgacataatctgtgtgcggaccgaatttagaataaagtacaggcgtccgtctgatcaaataagcaccggtgttggtgctctatagatgaatatatccggtgattttcggcatgggaggcattggcacatttttgtctgagttctggcggtagcaagaccggagtaataaccatcaggcgtttctatgttggttacgtgccgcacgcaggccgggcgtgcggaggatttatgccctgagaggctgagactatctccctcgtcccttattttaaacagtatcattatacaattccgcgttacctgctggagagttgcatgtttggttt

SEQ ID NO: 102757 - DNA, 1334 bp, Zea Mays
agcgatcaagtacagatgttgttcttattagataagtacacaggtagtttaaaagaagatggtatatttacaggtggatttcagatatttcccctgaagagctttgcatggtcaaggaacatccgagttttcgtaacttggcattctctgtttggttactaagagctgatcagaggacgatgaactcaaagcaaacaacagggccttcctcagtggttccattcaactccaataaccaagagctagctacttcttatctctgtcatcctcgcttgtctccgacaaggctcgatcagttatggcctctggctcccagccttgcattccagacttcatgatcacccactgaagtgactcgatcacctgccggtcatacatctgcttctgctgcatcatctcctggaattgccgcgcctccctctccaccagcgccttctcgctacgcaggcacgcaatcttggacatggcctcgtcggctgcagacgctgcggcatgcctctccttctccagctcctcgagcgcaacctccttcagcagcatctcctccttgagcctcctcctcaggtactgcacactgccgtcatctggatcgctggtctctccagcattgtcctcttcctccccgtcagcctcctggtcgaactcagcagccagcgacctcgagaccggcttgctcgagtcgaccgagcgggtgcgctccacgccacggcagcctctcttgagggcccgaatcttcgacccgcacacggcgcagacgactcccccgacgtgcaacgcccgcaccgcggagtccgtgctgccgacgcgcccctccacggcggcgcagcgcctggcgaggcgccagacgctgacggccaggaaaagaagcgacgttgcgaggagcaggcgctgggcgccgaccgatccggccagttgggcagcccaccgcgcggcggagggccactctctgcttacctcggtccaccgcgccgcggaggcccactctccgctgacctccgccaacccagatgcgtggagcaccgccacgacgccgagcccggagccgataaggaagtacagggcgccggcgccggcgctgggtacgtaggtaggggagacgccgttgagcggcttcaagcaagcggcaccggaaacgccgtcattattgccgcccattgtgaccaagttagggcaaaaacagaacgaacactccggaatttgaactgaaataaataaacgcaggaaaggatgcgagctttggggggctcgtgcggcggttccggtcgaatcggttggaggagctggaagaaatctggggccgtgttggttcgtaggacggtgccgggagctgcagc

SEQ ID NO: 102758 - DNA, 2436 bp, Zea Mays
ccaccggcaggcgccagcttcagctaaacgacgccgcaccaggaaaaaggtctaccttccgatattccactgtcttgtttccattctcccctcctctccggctctccctcccccgacagctgcccccgcatggtgtgatcaggccatctggtgcgggaagaaaagacgcgacacagcgagccatgctcccgccgcgcgccgccgccgtgccgctgctgctgctggccctggcggccggcgcggcccggggcgccgacgacctggcatcggacgccgtggcgctgcaagccttcctcgcgccattcggatccgcgaccgtgtcgtggaactcgtcccagccgacatgctcctggacgggtgtcgtctgcaccggcggccgcgtcacggagatccacctgcccggggaaggcctccggggcgcgctccccgtcggcgcgctcggcgggctcaacaagctcgccgtgctgtcgctgcggtacaacgcgctctccggcccgctgcctcgggacctcgcctcctgcgtcgagctccgggtgatcaacttgcagtccaacctcctctcgggggagctcccggtggaggtgctggcgctaccggcgttgacgcagctcaacctcgcgcagaaccgcttgtcggggaggatatcgccggccattgccaagaacgggcggctgcagctgctcttcctgaacggcaaccgccttaccggagagctaccgaacgtcagcatgccgtcgctcaccgcgctaaacgtctccttcaacaacctcagcggcgagatacccaagagcttcggcggcatgccgtccacgtctttcctcggcatgccgttgtgcggcaagcccctcccgccgtgccgagcgccgggttcggaagcatcgccgtctcagcctcccactcccacgcttcggcccgaggcaccggccccgactgacaaccgcggacggggcaggcatcacctcgccggcggcgccatcgctggcattgtggttggctgcgcgtttggcttcctcctgatcgcggccgtcctcgtcctcgtgtgtggcgcgctgcggcgggagccgagaccgacataccgcagccgtgacgccgttgcggcggagctggccctgcacagcaaagaggcaatgagccccaacggctacaccccacgtgtctcagacgcgcgaccgccgcccccgccttcagtcccgccaccgccagccgtctccgccgcagccgtggggcggaagaagctcttcttcttcggtaggattccccggccctacgacctcgaggacctgctccgcgcgtccgccgaggttcttggcaagggcacgcacgggaccacgtacaaggccgcgatcgagtctgggccggtcatggcggtgaagcgcctcaaggagacctcgttgcccgaacgcgagttccgggacaaggtcgcggccatcggcgggatcgaccacccaaatgtcgtgcccctgcaggcctattacttcagcaaggacgagaagcttatggtgtacgagttcgtggccatgggcagcctttcctccatgcttcacggcaatcgcggctccggccggtcgccactgagctgggagtcgaggaggcgcatcgctttggcctcggcgcgcggtctcgagtacatccacgccacgggctccatggtcacgcacggcaacatcaagtcgtccaacatcctcttgagccgcaccgtggacgcgcgcgtggccgaccacgggctcgcgcacctcgtcaacccggcgggcgcggcgacgacgacccgcgtcgcggggtaccgcgcgcccgaggtggtggcggacccgcggcgggcgtcgcagaaggcggacgcgtacagcttcggcgtgctgctcctggagctgctgacggggaaggccccggcgcacgcggtgctgcacgacgagggcgtggacctcccgcgctgggcgcggtccgtggtgaaggaggagtggacgtccgaggtgttcgacacggagctgctcaggcacccgggcgccgaggacgagatggtggagatgctgcggctggccatggactgcaccgagcccgctccggaccagcggccggccatgcccgagatcgtggcgcgcatcgaggggctcggcggcacggcgtcgacgtcgacggcgacggcgcggtccggccggagtgcgtccgtggacgaggcggacgaccggccgctgaggaccaccggatcgatccgtcagagctgaggtccgtccgcgtccgatcacttgtgttattgtcactgacggaaggttctgaacaagggggaaaaaaagaagagatctttctgttctgtcttcttgcgcttgtcgtaggggcgttgtcgtgtgctgtttattctttcatgcgtctcttgacgcttgttcgccctcagatgaattctttcgttttagcagcggtgatgagtgtgcgctgatggtgtgtgaa

SEQ ID NO: 102759 - DNA, 1222 bp, Zea Mays
aaaagctgctcccacgaattcctggagcagcaaccaaaaccccgaggaaaacgaaaaagcccccagccgaacaccactctctctcactctcccggacttcagaggccgaggacgctggagcacgcgtcggtccggcgcccccatggacccagcctgcgaggagctcgagcgccgcagccgctacctcagcgcgctcgtgcgccgcaccaagttcgccgacccgccccagcccgagccggaggccaaggcggacgtggagcctcctcagctgaaggcgccgccgcacgtcggcggtgagggtaagggagggaaggatgaggccaaggcggaggagaggacgccgatgaagaagccgaggggggaagcggcggcggcggaggcggaggggaggaaggtggcggtgtgcgtgcgggcggcggacatgccgctgccgctgcagcggcgcgcggtgaggatcgccctcgaggccgtcgccgccatgccgcggctcgagagcaagcgcctcgcgctcgcgctcaagaaggatttcgatacaacatacgggcccgcatggcactgcattgtcggcacaagctttggctcctacgtcactcactcgttggggggtttcctgtacttctccgtcgacaaagcctacgttctcctcttcagaactgccgtccagccacttgtccagctacaatgagacctgaaacatgttttactcgaactggtgtagatgcagcgcaaatgtaattttgaacagaatagacgacgctcagcacaccgtgtcttgccgcgtttgagtagcagaggtaatttgatctgtacacaagactgtagaacagccgtgcctctaacgttgtactgcccgaagtcctgctttgtaaacgttcttgtgcaatcgtttggagttacagaggctgactgtcagatactcggatctcgatctccagctttacctcaatatccaatgtacacaatctttcttgtgactgccaaaccagatttctgtttggaggaagaaggtgcagttttttttttttttttgaatggtggtatcatcaagaagaacaatgggtctgggggagcctcacccttagctattggagctggtggaacctgaatgcctgatcctttgaatgctcggtgtgaggaaaagaccagctacttcctgtgccccaaaagaatggtagtttcacatctcgtggagtaaaaaatacttcttccattttttttattt

SEQ ID NO: 102760 - DNA, 1513 bp, Zea Mays
tcaccaccaggcgctgtttttcttgtggtccaggtcgccgacgaggccacccctcgccgcgccaagtggtggtacgtgacgttccacaacgtcaccgcgatggtcggcgccggcgtgctcagcctgccgtacgccatggctcacctgggatggggccccgggatggtggcgctgctggcgtcgtgggggatcacgctgtacacgctgcgtctgctgatcgagctgcacgagtgcgtgcccggcgtgcggttcgaccggctccgcgacctcggcgcgcacgcgctgggcccgcgcctggggccctgggtggtggtgccgcagcagctcatcgtgcagctcggctgcgacatggtgtacatggtgacggggggcaagtgcctgcagaagttcgccgagtccgcgtgcccgcgctgcgcgccgctgcaccggtcctactggatctgcatcttcggctcctcccaattcctgctgtcgcagctgcccaacctcgacgccatcaccgccgtgtccttcgccgccgcggccatgtcgctctgctactcgaccatctcgtgggccgcgtgcgtggcgcgcggtccggtgcccggggtgagctacgacgcgtacaaggccggcaccggcaccggcacggcggcggactcggcgttccgggtgttcagcgcgctggggcaggtggcgttcgcgtacgcggggcacggcgtggtgctggaaatccaggccaccatcccgtccacgcccaccaagccgtcccgggcgcccatgtggaagggcaccgtcgccgcgtacctcgtcaccgccgcgtgctacttccccgtggcggtcgccgggtactgggccttcgggcgcgacgtcggcgacaacgtcctcgtggcgctgcaacgcccgccctggctcgtcgccgccgccaacatgatggtcgtcatccatgtcgtcggaagctatcaggtatatgcgatgccgatgttcgaaagcatcgagacgattatggccacaaggttcaggctgccgcgagggttgctcctccgtctagtggcccgatcggcctacgttgcattcacactgttcgtggcggtgaccttcccgttcttcggcgacctcctaggcttcttcggagggtttgggttcacgccgacctcctacttcctcccctgcgttctgtggctgaagatcaagaagccgccgaggttcagcgcgtcgtggtgtgccaactggggctgcatcatcgtcggagtgctgctgatgcttgtgtccaccatcggcggcttacggagcatcgtccaagacgcatcgacgttccagttctactcctgaagccctcacacttgcatgtacctctacactcacatggttccagcaagtcgtcaccctcgctcgtccacgcagctctacctctacattttgttgcaagcttgagggtgtccgggtgtggctgcagcctgccgaaatgcagaggacgatgcagcaaactgtacactcgctaagacgtacggttgtgtgttctacggatgggggg

SEQ ID NO: 102761 - DNA, 1434 bp, Zea Mays
cggggcaccatacaccacaccacttcgcgcccaagatggcgctttattatctctggtctggtcgctgcgcctcccgcttggccgcgagcccgcgaccatggcggcgccacccgtccccgtcctctgcagcgcttccccatgtcgcatcaccacccacctcgcccctcctgcctttcggaccgttgccgcggcgcggccgcaggccttgcccttcgtcttgtgcgtcgagcagcgcgtggggccctcggcgcgcgcgcgcgcgccgttcgcggccaagcgcggcggcggcggcgaggtatccgcggaagctccagacggcacgcgcgcgctgctccaggcggcgctctggggcgccgaggctgcctatatactctggctcttccttctgccttacgccccgggcgacccggtctgggcaatctcgcaggctaccatcagcgacctcatcggcctatcactcaacttcttcttcgtcctgccgctgctcaactcagttggcgttcacctgctcgaatcgcctctacttcaccctatggcagaaggattgttcaacttggtgctcgcttggacgctgctttttgcgccactcctcttcacggattgtaggagggaccgctacaagggatcgctcgatgtcctgtggggctttcagatgttcctcacaaacactttcttgataccttacatggcgatccgactgaacggtccggaagcggaccggtctccgccacgaagatcacagctgggttcagtcatggtcaacggcgcgccggctgtgggcgcggtcggcggcctcgtctgcgttctctcgatcgtttgggcgttctctggccgcggagattctggtttcggaggcattgcggaacggtggcagtatctgcagagctacctgttctcggagcggcttgcttacgcgtttctctgggatatgtttctgtactccgtattccagccgtggctgatcggggacaatcttcggaacgtgaaggcggatgctgctgggcttgtgagtgtggtgcggttcgtccccgttgtgggtttagttgcctaccttctttgcttagaggaagaggattagctgttaactgtgtttttttatatatttttttttgcaactgaaaacacaaatcttgtagccgaacaagaacaaccgggatggacatacagtattttttttcctgggcggctagtctctctaggaaacaagcccatcagaaaagcaactaattttctctaagacataattctaactgcctgacgaatgccgctcaattcttcagaaagctaggactgacaccaatgccacgaaaccaagagtgacagagaagccgtgagctatcatcttggacccccggctgtatcgcggcggcgtctggctgctcaccgacggtgacggtatcatacgtggtgtcgtcggcgttggcgtcgctggcg

SEQ ID NO: 102762 - DNA, 2083 bp, Zea Mays
atctctggtctggtcgctgcgcctcccgcttggccgcgagcccgcgaccatggcggcgccacccgtccccgtcctctgcagcgcttccccatgtcgcatcaccacccacctcgcccctcctgcctttcggaccgttgccgcggcgcggccgcaggccttgcccttcgtcttgtgcgtcgagcagcgcgtggggccctcggcgcgcgcgcgcgcgccgttcgcggccaagcgcggcggcggcggcgaggtatccgcggaagctccagacggcacgcgcgcgctgctccaggcggcgctctggggcgccgaggctgcctatatactctggctcttccttctgccttacgccccgggcgacccggtctgggcaatctcgcaggctaccatcagcgacctcatcggcctatcactcaacttcttcttcgtcctgccgctgctcaactcagttggcgttcacctgctcgaatcgcctctacttcaccctatggcagaaggattgttcaacttggtgctcgcttggacgctgctttttgcgccactcctcttcacggattgtaggagggaccgctacaagggatcgctcgatgtcctgtggggctttcagatgttcctcacaaacactttcttgataccttacatggcgatccgactgaacggtccggaagcggaccggtctccgccacgaagatcacagctgggttcagtcatggtcaacggcgcgccggctgtgggcgcggtcggcggcctcgtctgcgttctctcgatcgtttgggcgttctctggccgcggagattctggtttcggaggcattgcggaacggtggcagtatctgcagagctacctgttctcggagcggcttgcttacgcgtttctctgggatatgtttctgtactccgtattccagccgtggctgatcggggacaatcttcggaacgtgaaggcggatgctgctgggcttgtgagtgtggtgcggttcgtccccgttgtgggtttagttgcctaccttctttgcttagaggaagaggattagctgttaactgtgtttttttatatattttttgtgatcatttggatcgttgatcagtgtgcagttgagtggattatgtacttggtggcagtgagtttgcaactgaaaacacaaatcttgtagccgaacaagaacaaccgggatggacatacagtattttttttcctgggcggctagtctctctaggaaacaagcccatcagaaaagcaactaattttctctaagacataattctaactgcctgacgaatgccgctcaattcttcagaaagctaggactgacaccaatgccacgaaaccaagagtgacagagaagccgtgagctatcatcttggacccccggctgtatcgcggcggcgtctggctgctcaccgacggtgacggtatcatacgtggtgtcgtcggcgttggcgtcgctggcgtggtgagggtcgctggagcactggagttggcgcttgcgtgtggagtgaccgccgccgcgggcggcggcggcggcggtggcagcggcggtgatggtccatggggaagaagaccggcaactgcaagagggctcatcatcaaacacaacttcagtgagtgccaaatccctggcacgagaaggggaggcgaaatatccgtgcacgtaatggagatcgcgtgcgtacgagtattacctgcgcaggcgccggtggcgggcgggaggtcgaggcggcagagccgaggcatggccatcacgcgcgtcatgttgacggcgacgggggccgtgctggggttgctgagagcctggcagaggcactgcggctcgtcgtgcaccatgctgccaaggttggcgcagcaggtgtccgccggcacggtggcggtgccctcgatgaagggcaggcaggggaggaggcggaggaggtcagtgctgcaggtggacgacgtgccggcctggggcggcaccgcatggacggcagcgacggaagccagcagcagcagcagcgcgacgtagaacgcaggagccgacgccattgcttctctcgctagctgatcttttctgctctgcatggaaactggagacaactgttttcttgatttg

SEQ ID NO: 102763 - DNA, 2841 bp, Zea Mays
cgcatacgtgcttggctgccctcgctgctgcccgtcgacaatgcctgtatgattgtattgtatctcacgctcgcaggcttcgcagctttcttccagagtccaaaccaaacagcactccactctggtctcccaccattgatcccactccgtcccgggcccttgaaatggtttgatgcctgcaaccatgcccggtctctccagacgccgcctgctctgcttattcttgatcgcatgcctcgccgcccttcttttgtcgatcgccggcagcgccgggaagcccaaggaaactgacaatggcgacgccaagttcagagtgctgcgaggtatcgacactctcggccggatgcagaagcagcgtcacggccatggaatctctccggcctcagcgccggcgccggcggcggcgcgtgcccgcctacctctgctccacaaggatgcgcggctcccggtccccggaaaagtcacccacaaccataaaagaggaggaagtgcaacggcaccgaggcagagcccgccgcgcggcgggggaggcaaaggcgaaggcgaaggcgaaggcgggagcaggaagaaaagtatgccgctggccgtcgtcgccgcggcggcggcgctgtccggggcggcgctggtgctcctcgccgtcctggtggtgttcctggcgtgcaagaagttgcagggcaggcgcgggggtggcggcgaccagagcggcggcaccaacaaggtgagcttcgagcccggcccgggcatgttctacctggacgccatcaagccgtaccttgacgacgccggccgcgacagtgaggggaaggcggcgccggagatcgccgcgcccaaggacgaggagcccaagcgcgatgacgaggaaggcgatggcgcttgctcagacgacgacggcgcccagtcggtccactcctcgtgctgcttccagtcctcgcatttctcctactccgagctcgcgaagggcggccaggccgacggcgtgtcgccgtcgccctccgtccgctccaagcggcggggctctgccccgacaacgccttcagacaaggcaaaggtcgcaagcccatattcgccactgggcccgcgcacgccgagcagtgaggaaaggggccgccgcacgcactccccgtcgagcacgtcggtgtccgtgttgacagagcagtcgttcaatgatcatgagatccagggaaccgctcattccgtcaggtctttgaaattccacggcggcggcgtgtgccacgcaaaagaagctggagcagagacagacgccgcaagtagaaaaacagtaccacctccgccgccgccgcctccgccaccaatgatggtaaaacagcagcagatcgttcagatgagctgtggtactctggccgtgcccgcgccgccgccaccgcccccaccgctgctaataccacaacgacagaatggtcagaggagcaacggccccaccctcccgccgccgcaggcaccaccgccgggactgttcaggcagactgcgcctgtgggcaagaacggcgcgccgctgcccaagctgaagcccctgcactgggacaaggtgcgcgctgcgcccaaccggcggatggtgtgggataggatccgctccagctcgttcgagctggacgaacagacgatcgagtcgctgttcggctacaacgccgccgctcggtgctcggtgaagctcgaggaaggccagggccggagcccctcgctcggacaccatgtcctggaccccaagaggctgcagaacatcaccatcctgatgaaggccgtgaacgccaccgccgaccaaatctacgccgcgctgctgcaagggaacggcctgtcggtacagcagctggaggcactgatcaagatggcgccgaccaaggaagaggtcgagaagctcgagagctacgacggcgacatcggcagccttgtcgcggcggaaaggctcgtcaaggtggcgctcacgataccgtgcgcgttcgcgcgcgtcgaggccatgctgtacagggagaccttcgccgatgaagtcatccacatcaggaagtcgttcgcggtgctcgaggacgcgtgcagggagctgatgtcaagcaagctgttcctgaagctgctggaggccgtgctgaagaccgggaaccggatgaacgtcgggacggcgcggggcggcgccatggcgttcaagctggacactctgctcaagctcgccgacgtcaagggcaccgacgggaagaccacgctgctgcacttcgtggtccaggagatggttcgctcccagaagccacccgcgcgcgctgcggaggggccggacatcgtgacggggctcgccgccgagctcaccaacgtcaggaagacggcgaccgtcgacctggacgtgctcaccacctcggtgtcgagcctctcgagcggcctgtcccggatcaaggcgctagtggggacggaccagctgctggcaggcgacgagaggggccagcgcttcgtcgccttcatggccccgttcgtcagccaggccgaggaggtgatcagggagctggaggatgacgagcgccgggtcctggcgcacgtcagggacatcaccgagtactaccacggcgacgtcggcaaggaggaagccagcccgcttcggatcttcgtcatcgtcagggacttcttggcgatgctggatagggtgtccaaggaggtgaggggagccaggggttgccacggatcaaaccaaacgctgccctgaacagcttgtgaccgatactgcagaaacggtgagagaacaacactgtaattcttggacttgggaagttagacatgtattcgttgtagttcataaacatctctcacgtcttcattttcaccttgcattcgtcaatagcgtactag

SEQ ID NO: 102764 - DNA, 2830 bp, Zea Mays
cgcatacgtgcttggctgccctcgctgctgcccgtcgacaatgcctgtatgattgtattgtatctcacgctcgcaggcttcgcagctttcttccagagtccaaaccaaacagcactccactctggtctcccaccattgatcccactccgtcccgggcccttgaaatggtttgatgcctgcaaccatgcccggtctctccagacgccgcctgctctgcttattcttgatcgcatgcctcgccgcccttcttttgtcgatcgccggcagcgccgggaagcccaaggaaactgacaatggcgacgccaagttcagagtgctgcgaggtatcgacactctcggccggatgcagaagcagcgtcacggccatggaatctctccggcctcagcgccggcgccggcggcggcgcgtgcccgcctacctctgctccacaaggatgcgcggctcccggtccccggaaaagtcacccacaaccataaaagaggaggaagtgcaacggcaccgaggcagagcccgccgcgcggcgggggaggcaaaggcgaaggcgaaggcgaaggcgggagcaggaagaaaagtatgccgctggccgtcgtcgccgcggcggcggcgctgtccggggcggcgctggtgctcctcgccgtcctggtggtgttcctggcgtgcaagaagttgcagggcaggcgcgggggtggcggcgaccagagcggcggcaccaacaaggtgagcttcgagcccggcccgggcatgttctacctggacgccatcaagccgtaccttgacgacgccggccgcgacagtgaggggaaggcggcgccggagatcgccgcgcccaaggacgaggagcccaagcgcgatgacgaggaaggcgatggcgcttgctcagacgacgacggcgcccagtcggtccactcctcgtgctgcttccagtcctcgcatttctcctactccgagctcgcgaagggcggccaggccgacggcgtgtcgccgtcgccctccgtccgctccaagcggcggggctctgccccgacaacgccttcagacaaggcaaaggtcgcaagcccatattcgccactgggcccgcgcacgccgagcagtgaggaaaggggccgccgcacgcactccccgtcgagcacgtcggtgtccgtgttgacagagcagtcgttcaatgatcatgagatccagggaaccgctcattccgtcaggtctttgaaattccacggcggcggcgtgtgccacgcaaaagaagctggagcagagacagacgccgcaagtagaaaaacagtaccacctccgccgccgccgcctccgccaccaatgatggtaaaacagcagcagatcgttcagatgagctgtggtactctggccgtgcccgcgccgccgccaccgcccccaccgctgctaataccacaacgacagaatggtcagaggagcaacggccccaccctcccgccgccgcaggcaccaccgccgggactgttcaggcagactgcgcctgtgggcaagaacggcgcgccgctgcccaagctgaagcccctgcactgggacaaggtgcgcgctgcgcccaaccggcggatggtgtgggataggatccgctccagctcgttcgagctggacgaacagacgatcgagtcgctgttcggctacaacgccgccgctcggtgctcggtgaagctcgaggaaggccagggccggagcccctcgctcggacaccatgtcctggaccccaagaggctgcagaacatcaccatcctgatgaaggccgtgaacgccaccgccgaccaaatctacgccgcgctgctgcaagggaacggcctgtcggtacagcagctggaggcactgatcaagatggcgccgaccaaggaagaggtcgagaagctcgagagctacgacggcgacatcggcagccttgtcgcggcggaaaggctcgtcaaggtggcgctcacgataccgtgcgcgttcgcgcgcgtcgaggccatgctgtacagggagaccttcgccgatgaagtcatccacatcaggaagtcgttcgcggtgctcgagggagctgatgtcaagcaagctgttcctgaagctgctggaggccgtgctgaagaccgggaaccggatgaacgtcgggacggcgcggggcggcgccatggcgttcaagctggacactctgctcaagctcgccgacgtcaagggcaccgacgggaagaccacgctgctgcacttcgtggtccaggagatggttcgctcccagaagccacccgcgcgcgctgcggaggggccggacatcgtgacggggctcgccgccgagctcaccaacgtcaggaagacggcgaccgtcgacctggacgtgctcaccacctcggtgtcgagcctctcgagcggcctgtcccggatcaaggcgctagtggggacggaccagctgctggcaggcgacgagaggggccagcgcttcgtcgccttcatggccccgttcgtcagccaggccgaggaggtgatcagggagctggaggatgacgagcgccgggtcctggcgcacgtcagggacatcaccgagtactaccacggcgacgtcggcaaggaggaagccagcccgcttcggatcttcgtcatcgtcagggacttcttggcgatgctggatagggtgtccaaggaggtgaggggagccaggggttgccacggatcaaaccaaacgctgccctgaacagcttgtgaccgatactgcagaaacggtgagagaacaacactgtaattcttggacttgggaagttagacatgtattcgttgtagttcataaacatctctcacgtcttcattttcaccttgcattcgtcaatagcgtactag

SEQ ID NO: 102765 - DNA, 572 bp, Zea Mays
cgcgcgccggccagcccccgctcctccacctccactacacgcgccggccagcccccactcctccacctccactgcacgcgccggccagcccccacttctccacctccaccgcgcgccggaagcccccgctcctccacctccactgtgcgcgccggccagcccgctcctccaccgcatcaggaaggcgagccagagatcgagcggcccgagaaaaggaggaaacacaagcttaatcagaagccgaagcccagggagctcaatccaatggagtggatcgctgaagcccggcaccaggcagtgctgatgggaatcgggatggactgcatccgctaggcctctccatcgaccagtgggttcccctgctcaagttgtattgatttgcgtgcgcgcggtttctgccaatctggcgacctgcttcagaatctgatcttcaagacacattcagtgaagatttgttctcaggttgatctgtgcaattttgaaggcactcatggtgtcaagtgaggactggcaatttccaccagcgcgagacgttgatggtgtccatcttactgtatttagttgggttttag

SEQ ID NO: 102766 - DNA, 544 bp, Zea Mays
atggtgagattcagctctgatgatgctaaggatgtagtccattaccaaacaatctcaccaaagagcttagctaaatctgttctcgaggaaggtggctggtcaaacttcatgttctcaagggaggatactcagaataatattgatgttgccattgtttttattggctcaaagctgcaatcgtcagacatatctaaagataagcaagttgatccagctttagcagacacactgaagccttggagtctggagcaaaaaaaagtggtggctgtattctcaaggaacatgagaccactgagctctggagtgaatgaaggacgtcgtctttggaagtcagacatcacctagagctagggtgtccattcttgacatgtttctcttagtgataggtggatactgtctagctaggaataaagtcttgagggattgatggacgcatgcatctccaattcctgtgtgttgtattactactggtacaatctccaattcctgtgaacttatgtatttggactgtgaatttgtgatatgaacatatatcaatgtgttt

SEQ ID NO: 102767 - DNA, 204 bp, Zea Mays
tttgagttcatgtgacttattttagaaatttgagctcacaaactttcttttatttggtctctgtatggtggaattatgtcattttataatctctattcgttcagtcagtcgttgtgaactcacttctaatcgctcacttcattggccatgttgtaccaagacatattgcacggagtaaacaataacatcagttagccaaatcaa

SEQ ID NO: 102768 - DNA, 1551 bp, Zea Mays
ggccgggctgcgcaccgctcctccgcaccattttttactcctcttcttctcccccaaggccccaaccatcccactctctctatacaacagccacccccgcgcccttccgcccttgtcgagtccaaatccaggttatagatcctctcgcgccgccgctcgcagccgctcgccgcccggtacatctcccccgcgcctctccctgctcctggatttcaccgatctggcatgctttactgtcccgtcatacggtggcagcgggagccgcccccttcctgcctccacagctcatgccatgcatggccgatccattccctcagatcgggattgccgcatacatgccgttgcttccccgttagcttctcccttgttacaccccctcgcttcgttctgcgtagtttcggggtttgacaccgcttgtctatcccgttcctatagcttttagggtttcgagctcaaactccgcgccggcgtctcagttgctgcaagtggcggcagcaagctagaggcagcaactgcataccttgcaagaaaaaatcggttttgttgacgtaccgatgattttcttgcaagttgtgcagttgttgtctcaagcttgctgcctccctttgccagaactattgaatgtgaaagcacagttaagtaatgccacgcccagagaatccaaaaggatttagctaaaggctataataatcttcaaaggttcaatataaattcttggactatagactgaagtatggctgctgatcttccaagatctctccagttcagaggatgggattatgggagcttagaccagagctgtctaagcaattccagagtacagaagggtatactctgatcctagaaaagatggcatattctatcggaccagagtcaccagaccttggatgaaagggcttcagtttaagtcctacaagagatgaacgatggcaaccaccaaaagtccaactacgtagaacgatggcaaccaccaaaaattgcccattgttcatccgacgggcaatttgccgtttcttctcatggtgagacatgggatgctgcaacatgacccgaaaaactggatttcaattcaagtgaacagtttctccatttgtacggtattccattgcaatttctgcctatgatggtgcgcggatacctgggctaagccatgtggagacacagacaccatatatgaagttggtctttttgctgccaaccaatcatgaacaccaaattcagagttaggaatgaactataactattcatagtcttgttattaccttaagctcttgattttgcaacgaacctgttgatgcgcagttgatctaacacatgagatgtggtttaatagacaatacaagtgtattctagttgtctttttcatagtgggtcagtgaaaaaaagtgttttgaaccattgttccttgacccatatgttcgacgcacacaatttgccaagaactatctgcacatatggttttgtatcggttgcaagggctgatgttgtactagtaaatgctttctccgttcaaagttattttaactatctcaaaacatattaagttgaact

SEQ ID NO: 102769 - DNA, 864 bp, Zea Mays
atgatgcgcgctggatcggtagtcgtaggctcatcgaatcgatcagtagccccagcagcagaggtggtggtcgtggtcgtggtcgaagcgttggccggaggaggaggagatctcggggttgacgtcggaggtgagccccgtgtcctgcgacgcgctcagccgctcccgctcccgctcccgctcgccgcccttattgcacggcggaacgctgccctccaggagctgcaccaggctggcggcgccgtggtgctggtgcaggtgcggcgcccccccgccgtagtagtagtgcgcgaagccgggcagctggaaggccgaggaggaggcggcggcgagggcgccgaggtggccgtcgtcgtccgtggcggcggcggcggcttctggcggcggcgtggtcgtcgtctggtccaagaactggccctccagcgcgtcggagaagcaggtcacgtgtgccgccgccgcggcggcggcgccggagccggagccggacacgtccatcagcggagggaggtgggagatggccgctacgtcgcccgtcttggagttggacgacgtctccgtgccgcccctcttgcctgcggttggtgctgctgctgcagctgcaccacctacgacgaggctcttcttgaacaccctgcacagcacccactcgttctgcacagcacccccgcagaaagaatccaaatcaggaggcgccgcgtgatctatgtatctgcgagagaatcgtgtactatgcacatgcgcatgcccgtgcaattcaaccaaccttggtcccggcggccttggggacgacgacgacggctgcgccttggccgtggccgtggccgtggccgtggagcttggcgtggaggcggtactcgtgcatga

SEQ ID NO: 102770 - DNA, 1152 bp, Zea Mays
atgatgcgcgctggatcggtagtcgtaggctcatcgaatcgatcagtagccccagcagcagaggtggtggtcgtggtcgtggtcgaagcgttggccggaggaggaggagatctcggggttgacgtcggaggtgagccccgtgtcctgcgacgcgctcagccgctcccgctcccgctcccgctcgccgcccttattgcacggcggaacgctgccctccaggagctgcaccaggctggcggcgccgtggtgctggtgcaggtgcggcgcccccccgccgtagtagtagtgcgcgaagccgggcagctggaaggccgaggaggaggcggcggcgagggcgccgaggtggccgtcgtcgtccgtggcggcggcggcggcttctggcggcggcgtggtcgtcgtctggtccaagaactggccctccagcgcgtcggagaagcaggtcacgtgtgccgccgccgcggcggcggcgccggagccggagccggacacgtccatcagcggagggaggtgggagatggccgctacgtcgcccgtcttggagttggacgacgtctccgtgccgcccctcttgcctgcggttggtgctgctgctgcagctgcaccacctacgacgaggctcttcttgaacaccctgcacagcacccactcgttctgggtcccggcggccttggggacgacgacgacggctgcgccttggccgtggccgtggccgtggccgtggagcttggcgtggaggcggtactcgtgcatgacccatccggacttctctcccctgggcgccctccccgtgtagaagacgagcgtcttcttggagccgacgagcgccttgcccctgaagacgtccctgtccttgcccgtggccttccagtacccggcctccgtggcccggttggtcctcagccccgtcgggtacttgcggtccttgaggcagaagaagtaccactccttctcccccatcctcgccagcgatggcaggtcccagggctcgcacttgttgaggtcggcctcggcgacggcgagcgcggcgaagcgggcgtcggcggccttgcgggccaggtagtgcgtgatgagctcctcgtcggtcgggtggaagcggaagcccgggggcagctccatgggccggtgcggctcctgctccattgcagagcctct

SEQ ID NO: 102771 - DNA, 654 bp, Zea Mays
atggacatggcttcaggttcaggctttcaacaaggcaaacagtcatacgtgatacgcccatggacatgggcagggcagcaacaggccaacagccatagtgccatactacaacatgaagcaaataatcactggaaggtttcaggctttcagcatctaagtaaaactgaaaaccaacaaacatggacatgggcagcaacaggccaacagccatacgcccatacctacaggctacagtacaacagcaccagaaaacagggacaagctctgaatctggattctggagactggagaccgtacctgcaggccggctgctggcgccgccgcgcgggggatggaggagggaccgagggggacgatgccgccgtatcccccgtcaccggtagcgcgccgctgtcacctgcacagtgttccgctagggttcctcccagctggttgcctggttcgtgtagtgtgtgcctggggcctgggcgttgctctgttggctctggttgtgcagcttctgctcacgtggtaggaatcgggaaaaaggaagctgggctgggccgctgggcaagtgaagtgggccactgcaccgaaatttcaatccagccaggcaggctgatcgttactaaactaatcggacgccctgatctcgtcccgattgatcggctctag

SEQ ID NO: 102772 - DNA, 1265 bp, Zea Mays
attgagtttgagcctgcaatatgacacatgcccaagaaattcagctccaagttagagagcaggaatgcggcaatggtgaacaggacagccgtgatgaacctaaagccggtacacgacggctgacgaagggaagcacacgatggtggatgacggtggtggttgacatgctggtggtgctctgcggagggacggtgggcaccctcctggctcgcctgtactacaactctggcggcaagagcaagtgggtggccacgctcacgcagtcgggcggctcgccgcttctggccatcccgctgctcctgactcccccgcacccggcggaggagcgccagccggcagcgtccaaggtggtggccgtctacgtgggcatcggggtcctgctcggcttcgacaacctaatgtacgcgtacgcgctgctgtacctgccggtgtccaccttctcgctcgtggccgcgacgcagctggccttcaacgccgtcacgtcgcgcatcatcaacgcgcagcgcttcacggcgctcatcgccaactccgtcgtcgtgctcaccttcgccgccgcgctgctcggcatcgggtcctcctccgacgagacctccagcgacgtgccgcgcggcaagtacgcgctcgggttcgtcctcacgctggccgcctccgcttgcttcgcgctcgtcctgtcgctcttcgaggtggcgttcgagaaggtgatcagggcgcggacgatgcggtgggtgctcaaggtgcagatgttcacgaacctcgtcgcgacggcggtgggggtggtggggctgttcgcgtcgggggagtggcggacgctcccgggggagatggcggcgttcaagaacgggagggcgaggtacgtcctgacgctgatggggacggcggtgtgctggcaggcggcggccgtgggcacggtgaggctgatcgtcaggatgtcgtcgctgttcgccaacgtgacgggcacggtggcgctgccgttggtgccggtgttcgcggtggtgctgtttggggacaggatgacgggcatcaaggccgtggcgatgctcatggccgtgtgggggttcatctcctacgtgtaccagcactacctcgacggccggcgagcggcctccgggaaggccgggacggagtgctgcatctgtgctgcacggacggcaggcgacactagagatggccaaacgggccgcccggctcggcccggcccgggcccggtgaagcccggccaaaagccgggccgggcctgctgagccagcggacttaattttctgtct

SEQ ID NO: 102773 - DNA, 168 bp, Zea Mays
atggaccggaacctgagtgggttcctgatcgggtgcgtgggcaccgccgtgacgctgctggcgtaccagcagacggcggtgaccagcacgcagtgcgtcgccgcgggcttcgtcgtcatcctcttcgccctcttcgtcaaggaagagtctgctgtatatgggaattga

SEQ ID NO: 102774 - DNA, 270 bp, Zea Mays
atggggaactccgaagtcgacgacaccaaggccttcggtattgcgtcaacatcctctgcaagactggagaaggggggtggtggccgggccgcctggaattcgtctctgatgccactcggaccggtagcgttggttgcgaagctccttcagggtgcggcgggggtatcctcaacgtcgctgtgggaaaagaacccgcggtgcgcggtgaattcctcaatggagccgcttcacgccggggtcaggccatttcgctgctccaaccactggtga

SEQ ID NO: 102775 - DNA, 1884 bp, Zea Mays
atggccgccgccattgccgcggcgcttctccgccgctccacctcgcaccaccgtctcatattacctctcctctctcacctccaccgcacctttccgcaaccctcgtccccatggctcccaccccaacaccgcttcttctccaccggcgaatcagccggcgatcccacccagaaaccgacgtcttctcttgacccgaagaagctatggcgcgagctatccgcctcggaccccgccgtcggatcctgccgcctgccgaaggccacgtgggatgccattgtaggcctcgtccgcggcttcgccaaaagtccggccatatccgaccaggcgctcgcgctctacgtcccctcttctgccttcccatcctacgtccgccgcttccgcgcgttcatcctcccgcgactctcccgggagtccgcggcgcatctcctctcgctccccgctgaggacgcacacgagctcctcctcccggccttcgcagagttctgcttctccaacttcgcagacaagctgaggcagcacaggtcggtcatggccgcggccgacctcacggccccgcacacctggtaccccttcgcgcgcgctatgcgccgccgtatcgtgtaccactgcgggcccacgaacagcggcaagacgcacaacgcgctcacccgctttgccgcagccaagtctggggtctactgcagcccgctccgtctcctcgccatggagatcttcgacaaggtcaatgcgctcggtgtctactgcagcctgcgcactggacaagaggttaaggaagtgcctttctccaaccatgtcgcatgtaccattgaaatgatgtccactgaggagctctacgaagtcgccgtggttgatgagatacagatgatggctgaccctgtcaggggctttgcgtggtcgcgcgctgtgcttgggctcaaggcggatgagatacacctctgcggtgaccctagcgtgctcaagattgtccagaagatttgtgcagatactggggatgatttagtggtgcatcaatatgagagattcaagcctcttgttgttgaagcaaagacacttcttggggacctcaagaatatccgctctggtgactgcgttgttgctttctcacgcaaggagatattcgaggtgaagctggcaattgagaagtttacaaagcacaagtgttgtgttatctatggagctctgccaccagagacacgacgacaacaagcaaagttgttcaacgagcaggataatgagtatgatgtgcttatagcaagtgatgcagtcggtatggggctgaaccttaacattaggagagttgtgttctatagcttggcaaaatacaatggggaaaggatggttccagttcccgcttcgcaggtaaagcagattgctggtcgtgctggtcggaggggcagtgtctatccagatggactcacaacaactttcttgaaagatgatttagattatttgattcagtgcctgcagcagccatttgaggaggcacaaaaagctggtatttttccttgctttgagcaagttgaaatgtttgccagccaattccctaacctttcttttaatgatctgttggataaattccgtgatagttgtcgcatcgataaaacatacttcatgtgccagcaggacagtatcaagaaggttgctaatatgcttgagagggtgcaggggctatgcctcaaggatcgctataatttttgctttgctccggtaaatataagggatccaaaagccatgtaccatcttttaagatttgccaccaactattctcatagccgtcgtgttggcatcgcaatgggaataccaaggggttctgcaaaaaattttgttgagcttctggaccttgagacaaaacatcaggtcctatcaatacgaattcaagcttga

SEQ ID NO: 102776 - DNA, 1210 bp, Zea Mays
ctgccacaaactgtcgaccggaggccggagcaaatgcgactagccgaagcggccgcggcggaacacctcggcgatcggcgtgcgtaccttccacgcgggagtgcgggaccgttgctgcgacgctgcgtcagatcgacgcgcggcgcgtccgccccccaccctctcgccgcctatataactcgcgcccgaatcggcggctccctcctttgccctctccgcgcaccttccaccacgctctggaagctgtttcccctttctcgagagtttagaaagctggtgcagagatggccggggagagctgcgtccccaagcccctgttcggcggcgccatcttcaccaccttccccgaccgcttccaggacgtgagcaacatccgggaggtccccgaccatcaggaggttctcgttgatccatcccgcgacgagagcctcattttcgagctacttgacctcaagggcgaggtggacgacgccggcagcgcgctctggttcctgcaagacatcgccaacgagcaagacgccggggacaacttggtggtagagcattctgggacacttgaactggctgctttgcatctcggagaagctcctgcagtggctgcaactgcagttggccagctggccgtctcaaaagggaggcagggcagagaagcacaaaacattgttcgaatttacctggcaaacatacgccttaagaatgcggcaaccgatgtacttatcaccgcatatgagccattgttgataaaccccctgagtgaaagtgctgcggcagttgcagctggtccggcaatacctgctgaacaagtagggtgcttgccaatgtctgaggtcttcaaacttgcagtgacgaatttcaatgtgcgtgattggaaccttttcgatggtggcccttgaaccagagtggataatctctccaaaatcagatgtagagcatctggttgacatacggaagactactacctgttttctagatttacaattcattgtcagaaattatgctatctgacttaatcttccaaatactcctattgaacttacctctggaacattagctgagtttgtcatgatagattctactagtggattgtacgcagatggtctgtgtcgcttcatcggtaaagcaaactctgctcgttcctgttgaacacaggccatttaaatttagaaattagaattgatgctacgaaaaatccaatagtagcatgctttca

SEQ ID NO: 102777 - DNA, 2038 bp, Zea Mays
tattataaatattacaaatatgtgaaccaaatgccaccaatgtttttacggcaactactcgtagctgaggcacgacaatggaaggcaaggctacctaggaggccaaaaaaaaaaaaaccgatcacggataattggtgcacgctgtttccagacgcaattcaaaatgcagtgtaactgagcttgtgaaatccgtatgtaaatcccttcgcaaactatctgcagatgtaggcctaccaggccaaacctattacaattcacgtgatagagagaaaaaaagatggaaacagatttaactaagatttgactgaatttttggccaaaacttggtcaagaggcatgaagaggaaacagatatgcacttctatattgattattgaatgaagaacttgtatgtttgtttcaactctagagttgactaataattgaaatccaatggaaacatttggccggtatattcggacgacctcgccgaaacgggtgaatttcaccgaaagtgagtcatttcggggtgaatcccaaagccctgtggagggtgaggagttacaaagtgctattacaatgcaacgcttcacttccactggttggcgcagatgtcagcgaggtcgacgaccctctgcgagtagccccactcgttgtcgtaccaggagatgaccttgaccatgtcgtcgcccatgaccatggtgagggaggcgtcgatggtggaggagacgtcggagcacctgaagtcgacggacacgagcggcacgtcgcagacctcgaggatgcccgtgagctcgttggccgcggcgtcgcggaacgcctggttcacctcctcggcgagggtcttcttggagacctgcacgacgaggtcgacgacggagacgttcggggtgggcacccggagcgcgatcccgttgagcttgcccttgaggttggggagcaccagcgagacggccttggcggcgccggtggacgtgggcacgatgttgagcgcggcggcgcgggcgcggcgcaggtcgcggtggctcgcgtccagcagcctctggtcgccggtgtaggagtgggtggtggtcatggtgcccttgatgatgccttgatccttttggtcgagcaccttgacgaatggcgcgaggcagttggtggtgcaggaggcgttgctgatgatgggctcgtcggggttgtactggtcggcattgacgccgacgacgtaggtggggatgtcgcccttgccgggcgccgtgatgagcaccttcttggcccccgcctggatgtgcttccccgcgccctcgcggtcgacgaagacgccggtgccctcgatgacgaggtcgatgccgagctcgccccacggcaggttgctggggttgcggtcggacacgaccttgatgaccttgccgtcgacggagatggcgttgtcgccgacgggcttgacgtcggcgtcgaagatgccgagcgtggagtcgtacttgagcaggtgggacgcctgcttgacaccgccggtgtcgttgatggcgatgacgtcgaggggcgaggcgtcgccgcgcccgtgccagcaccgcaggaagttgcgcccgatgcggccgaacccgttgatggccaccttcagcttcgcctccgtcggcgcccgccgcgacccgccgctcgcacgtaccgcgtgggtcctgaaggagacggcggacatgaagtcgtcggaggtggcattccggcgcatgggcagcgacgcggagctcctgagcccggagaactcggacaggccgcccccctggagtacaacatcaaagaaccatcactactcgcttgtccggtggagcagctagagtgcaagcaaaccattgatcctacgtagcagcacgggtggagagagagacgcggcacgagaggcatacctgctggagtggcacggtggtagcggagagcatggacgacgccatggccacggaccagaggatcaagacaagatgacgatgctagccaacaagcgggcgcgtatatacgatacgagttggcggattgggggcgcgcgcgtttgtggtgcgcgtggccgcgatcggggatcgtgagg

SEQ ID NO: 102778 - DNA, 127 bp, Zea Mays
gagtataatccagttgacttagtcctagaaatttacctcattcctgttcttctcccaacttttctgtttctaaaaattgcctagagggggggtgtgaatagggcgaatctgaaatttacaaacttaa

SEQ ID NO: 102779 - DNA, 90 bp, Zea Mays
ctattcactctaattgttttggctgcatatctaatttttttatattgggccagttgtgcagctattgctgcatcaggtactgctgagcag

SEQ ID NO: 102780 - DNA, 1780 bp, Zea Mays
ttttgtgcgagccgtcaagggatttgtctctatcaccagcgcacggccgagaatacttcctcttcctccttcccacgatggccgccaccgccatggccgccgccgccgccgcctcgcgggccttcctgcgcccgcaccgttgcctcctcctcccacacacccatccgcttcgccgccgtctctccaccaacgctactgcttccgctcccgccgccaccgccgcgtcgcccggcgtcgtggacgtgctcatgaagcgaggactcgtcgaggccatcacctcggaggcgctcgccgcagcgcgtccaggggagctcaaggtttactgcggcttcgaccctaccgccgagagcctgcatctcggtaacctcctcggcctggtcgcgctctcctggttccgccgatgcggccacaccgccgtcgcgctcatcggtggcgccactggccgcgttggcgatccctcgggaaagagttccgagcgcccggagctcggcatagctgccgtcgagggcaactccgacgccattaagtccctcgtcgcccagattctcggccgcgtcccggagcctgcccaccgttcccactccggtcaaaaagagttgtctttggacaattcagcgaattcgtcacagacaatgggttcttttttgatcctcgacaactacgactggtggaaggacatcacgctgctggatttcctgagagaggtgggccgttttgcacgcgtgggtacaatgatcgccaaggagagcgtcaagaagcgtcttgcgtcggaagacgggatgagctacaccgagtttacctaccagctgctgcagggctacgacttcctttacatgttcaagaatatgggtgtcaatgtgcagatcgggggcagcgatcagtgggggaacatcacagcgggaactgagttgatcagaaaaatcttgcaggttgaaggggcgcatggactcacattcccacttctgctgaagagcgacggtaccaaatttggaaagacggaggatggggcaatctggctctcttcgaagatgctttctccttacaagttctatcagtacttctttgcggtgccagacatcgatgtcatcaggtttatgaagatcctgacgttcctgagcttggatgagattctggagctagaagactcgatgaagaagcctggctatgtgccaaacactgttcagaagaggcttgcagaagaggtgacgcgatttgttcatggcgaggagggattggaggaggcattgaaggcaaccgaggccttgagacctggtgctcagacacaattggatgcacaaacaattgaggggatagcagatgatgtgccttcatgctctttagcttatgatcaagtgttcaagtctccacttattgatttggctgtttccacaggtttgctcactagtaagtcagcagttaagcggcttattaagcaaggtggtctgtacttgaataacgtgaggattgatagtgaggataagctggttgaggaaggtgatatagttgatgggaaggtgctcttgttgtctgctggaaagaagaacaagatggttgtgaggatatcttgactactcttatttgttctttataacttattttagccattgaggagaaaagtaacggtgttgtgtcttcaaaactcaaatgagctgtctatgagcatacagattgttatattggagaggttgaacacacctttttttttgctctattaattttgttcatgagaactttttgtgtgctatctattggctttgagaatgacagctgttttctcata

SEQ ID NO: 102781 - DNA, 2038 bp, Zea Mays
agcttgtggcccaagatggcaaatgctctcctaggtggcctgtgggcgatcgtcgtcgtcgcggtggtcgtcggcgttgtcgccaccgtcacccactccggcaagaaggccggcgacgacttcaccgtcccgggggaagcctccattgccacgtccggcaagtcggtcgagtccctgtgcgcgcccacgttgtacaaggagtcgtgtgagaagacgctctcccaggccaccaatggcaccgagaaccccaaggaggtgttccacagcgttgccaaggtggcgctggagtcggtgaaaacagcggtcgagcagtccaagacgatcggcgaggctaaggccagcgactccatgaccgagagcgcgcgagaggactgcaagaagctcctcgaggacgccgttgacgacctcaggggcatgctcgagatggccggcggcgacatcaaggtgcttatcagccggtccgacgacctcgagacatggctcacgggcgtcatgacgttcatggacacctgcatcgacggcttcgtcgacgagaagctcaaggccgacatgcacaccgtgctgcgcaacgccaccgagctcagcagcaacgcgctcgccatcaccaacagcctcggcgggatcctgaagaagctggacctcggcatgttcaagaaggactcgcgtcgccggctcctgtcggagcaggacgaaaaaggctggccagtgtggatgaggtcgccggagagaaagctcctggcggcgggcaaccagcctaagccgaacgcggtggtggccaaggacggcagcggccagttcaagaccatccagcaggctgtggacgccatgcccaagggccagcaggggaggtacgtcatctacgtgaaggccggcctctacgacgagatcgtcatggtccccaaggacaaggtcaacgtcttcatgtacggcgacgggcccaagcaaagccgcgtgaccggccgcaagagcttcgctgacggcatcaccaccatgaagaccgccacattctccgtcgaggcgtccgggttcatctgcaagaacatgggcttccacaacacggccggcgcggagaggcaccaggcggtggcgctccgcgttcagggagacctcgcggcgttctacaactgccggttcgacgcgttccaggacacgctgtacgtgcacgcccggcgccagttcttccgcaactgcgtcatctccggcaccattgacttcatcttcggcaactcggcggcggtgttccagaactgcctcatcgtcacgcggcggcccatggacaaccagcagaactcggtgaccgcgcacggccgcacggaccccaacatgaagtcggggctcgtcatccagaactgccgcctggtgcccgaccagaagctcttccccgaccgcttcaagatcccctcgtacctgggccgaccctggaaggagttctcgcgcctcgtcatcatggagagcaccatcgccgacttcatcaagcccgagggctacatgccctggaacggcgacttcggcatcaagacgctctactacgccgagtacaacaaccgcggccccggcgccggcaccagcaagagggtcacctggcctgggttccacgtcatcggccggaaggacgccgagcagttcaccgccgggccgttcatcgacggcgggttgtggctcaagttcaccggcacgccgcacatcctcgggttcaagttctaaagaccgcatgcatggcatggtatatacagcacacgctagggaggtggtacatacatgtttgtacctgaggtgtcgcaggacaggagggctaacgtttgtacctttaccctttttttcttttctttttgattcctttggttgtttctcttggtgaaaattttcaggaaacgaaaaatattttggacagtgatctgttgcgtcattgattaatgcatagtttgtgtgttttaaaaaaatccactgactctgttgttgcagggcagctgatcaaaccctcagtattcgcctaggtacgtctcaaacaccaataacgaacgttgtacatcaaaccaaa

SEQ ID NO: 102782 - DNA, 1289 bp, Zea Mays
atggagatacagcttcgccgcgtttccagcaacccaggctggccgtttctgattcacagggtgcacagccagtggactggaactggcgcttccgcgcttcgattcctgaatcctggctgcgcggcgcggtcgcggagacgggaagctggaactgaaacggcgtcgctggcgcttcgattcctggagactggagagtggagactggaactagaggtggcgggctggcggcacggcgccctggagattgtgacgggtgctctggaactgggaatggcgctggcccggttttacccaacactgattccctttgctcacaaatgcgcctggacgccgtctccgttcactttaacgttacttacaggatggacccactacaaactttcactatcttctgcgcagcagcctcttcttccccgatcccgactccaactctccctctctccttcgcctcggcggcacggcagcctgcttcttcaccggggtggctgcttcttcaccggcgcggcggcctgcttcttcacccgcgcggcggcctacttcttcgacgacgcggaggcctgcggcggacgcgacgcggcggccttccgggcggtcggatccgcggacgaacggatctccggcgcctgtcagatcttcgaacgcggcgcggtggcctaccgggcggacggatccacggatgaacggatctccggcgtcacggcttgcttcttcaccggcgccgcggcctgattcttcgacggcacagcggcctgccggtcttctccaggcgggcggacgcggcagcctgccggtcttctccaggcgggcagacgcggcagcctgccggtcttctccagagctcggattccaaatcggtgattacttgagcgttgcaatcatgtagatggtgcccgcacctgatgtaattgatgtaatgtcaaaagggctctggttgcaacagtaaggcatgattctctgttagcactaggaactggaaccacaattggtctgtaatactggtagtttcaaatttacctaaacacttcaaaccagaatggtctgtaatgtcaaaagggatcgggttcctatgaagtcaaacacaggaaagtttgcatcttggagccagaccagttgggcaaattttgttcggtacccaattttgtttcgccatttctaaaatcttgtagtcaggctagacttgaactgatggtcgaatttgcacagatatttctctctttatgaacagtaaaagaacagtacaattataatgcatctgatcgaatgcaaataaatcaatgcatgacttgcaa

SEQ ID NO: 102783 - DNA, 403 bp, Zea Mays
gaaatacaggcttatgatggtgaacctgtgatgaacatttgtgtcatgatttttttagtgtgaattatggtgtgagacaaatttatgtgaattctggggtgatgagatctggcatgttctgattctgtacaaaaaagtacaacaaaatccaaaaaaaaaatcaaacgcaccatgcaagcaagaatcgaacgtgagacctattggtgtcaatacaggaaactaaactatttgtatgtagccagtttcagcaatgctcaaaagttttgtttgttttcttccttgaaatttgtaaaatttattcatctagcctctacaaacttacttcatgcatagatgtcccttttttggaatatttactatttttgtgcttaaatgccttcctagccaaaaataaataaataaa

SEQ ID NO: 102784 - DNA, 964 bp, Zea Mays
tagaagcagtagaagtcggtatagattaaagcgaagcaaaaacgctaaaaaatccagacaagaatatgcacaaacaaataagagcagcttaaacaacacacgaaattattgcagtactgactacagctgaaccaacaagccaaaagcgttcacaacaattggcagtcaccatttacaatggacttaaaccagtacatgaaggttgaaatgtttatctagacaagaaaaggtacaataagaatacaataggccgaaacgcggcctgtttatgtacaaacaaactgaccgaatctgctgatggaaaagcactagctttgaagcttctccaaatcggcgttcctgaagctgccaccgatgagtgacaggaggccaccaccatggaccctcccctcgggaacaacatgacctccctctctgcctccatctacaggctcagtcgaccaagaaggcatcatagagcgaggaaccagcacctgtggaggaatcattgattggctcctcacagtgccgtcgcagtcggaagcggtgctgacaccagaggacgagtgctcgttcgtcatgctgcttgctgcggtggcagatgacacaacaatgccgctgaagagacctggtccaatcatgcttcctacattcttcgccgcctcttgttctcgctgcctggccatcaaggtaccatgtgccgcacagaagccactcttgccacgggagaatttttcacagcctgtgccccatgtgcaccgctttcctccgccatgggctttgcagaagtccgtgctcccctgggcgctcttgccacagttctcaaccttgcaccgcttgccgccaccgtgcttcacacagcagtcagtgcggccacgagcactcttggtgcagccgggcacggaacagcgctttcctcctccatgcgccacgcaatattcagtagccccgtgcacactttttgcacagacaccacctccttcaa

SEQ ID NO: 102785 - DNA, 893 bp, Zea Mays
aaacaaataagagcagcttaaacaacacacgaaattattgcagtactgactacagctgaaccaacaagccaaaagcgttcacaacaattggcagtcaccatttacaatggacttaaaccagtacatgaaggttgaaatgtttatctagacaagaaaaggtacaataagaatacaataggccgaaacgcggcctgtttatgtacaaacaaactgaccgaatctgctgatggaaaagcactagctttgaagcttctccaaatcggcgttcctgaagctgccaccgatgagtgacaggaggccaccaccatggaccctcccctcgggaacaacatgacctccctctctgcctccatctacaggctcagtcgaccaagaaggcatcatagagcgaggaaccagcacctgtggaggaatcattgattggctcctcacagtgccgtcgcagtcggaagcggtgctgacaccagaggacgagtgctcgttcgtcatgctgcttgctgcggtggcagatgacacaacaatgccgctgaagagacctggtccaatcatgcttcctacattcttcgccgcctcttgttctcgctgcctggccatcaaggtaccatgtgccgcacagaagccactcttgccacgggagaatttttcacagcctgtgccccatgtgcaccgctttcctccgccatgggctttgcagaagtccgtgctcccctgggcgctcttgccacagttctcaaccttgcaccgcttgccgccaccgtgcttcacacagcagtcagtgcggccacgagcactcttggtgcagccgggcacggaacagcgctttcctcctccatgcgccacgcaatattcagtagccccgtgcacactttttgcacagacaccacctccttcaa

SEQ ID NO: 102786 - DNA, 2082 bp, Zea Mays
ctcccgcgccatggcggcccgacgtctccaactccaatgggagccagtcagcaccgccgctctcctcctcttcctcctactcgccgccgcgggagcggctgctgcctcggcagcgccagcggggcgcagggaggcggtgacgtcgccgcacggcgccgtggcggcggacgacttgcggtgctcgaggatcggccgggacgcgctccgcgagggcggcagcgccgtggacgcggctgtggcctccgccttctgcctcggcgtcgtcagcccggcctccagcggcgtcggcggcggcgccttcatgctcgtcaggctcgccgacggcacggccgtcgtgtacgactcccgcgagaccgcgcccctcgccgcctccagggacatgtacggcggcaacgagtcgctgaaagcgcggggcgcgctctccatagccgttcccggggagatcgccggcctgcacgaggcgtggaagcaccacggcaagctcccatggaagcgcctcgtcctgccggccgcgcggctggcgctggcgttcagggtctcgccgtacctgcggatacagatggaggcgaccagggacggcatcctggccaacaacgggacgcgggccgtgtacgcgccgggcggcgacatcctccgggccggggacgtgtgccgcaaccccaggctcgcccagacgctgcgggccgtcgcggagcacgggcccaccgtgttctacggcggcgcggtcggggcgcggctcgtcagggatgtccgggaggccggtggggtcgtgacgctggaggacctcaagaggtaccaggtgaaggtgcggcggccgctgacggggaacgtcttggggctccaggtggtcaccatgccgccgccttccgccggcggcgccgggatgatgcttgtcctgaacatccttgaacagtatggtgttcctgctggtttcgctggatctcttgggatccatcgcctgatcgaatccttgaaacattacatggccgtaaagatgaacctcggcgaccctgactttgtgaacaatagcgaggttgtgtctgatatgatgtcccccaagtttgctgccgagctgaagaaaaccatttatgacaacatgacatttgcgcctaaacattacggaggaaggtggaacatccttgaggaccatgggaccagccacctgtccatcgtcgacagcgagcgaaacgcggtgtcgatgacgagcaccgtgaacgcgtacttcgggtcactgatcctttccccgcgcacgggcgtcctgctcaacaacgagatggatgacttctccatgccagcgaacgcgtccgagaattctccaccgccggcacctgccaacttcgtcagccccttgaaacggcctctctcttccatggctccgaccgtggttgtcaaggacgggaagctggtggctgcagtcggtgccagtggtggcggcatgatccccgccggaacgatcgaggtgttcatcaaccatttcgtcaagaacatggacccgttggcttcggtcatggcgccaagggtgtatcaccagctgatcccaaacgaggtcaggtacgagaactggacgacggtgaccggcgaccacttcgagctcgacgccgccacgagggccgacctgcacaggagaggccacgtcctgacgccgatagctggagggaccataagccagcttgtggtgcacaacgtcgggcgccaaggcgacctcaccgccgttagcgaccccagaaaaggcggtgtcccggccggttactgagcaggatcggaattccaagcacggttcattagtcccctgctgatccgtgtgtgatgtgcggcgaagccaggaattatatggaatggaatatacaagagacaattcattatttgacactggtaaagtttttggtttattttcttgagcctcaaaatataattcttccctaagactaaggctaagggcatgtttgtttatctcctaaattatataaattggattacggtggaagagtagaactagaagagtaaaatatcactttgaaaccataaataagctaaaataagctagcattgaatagcttatttcagtttttttttatctcaaaa

SEQ ID NO: 102787 - DNA, 1840 bp, Zea Mays
ctttgtcactcggctgcccggcgtttcctttgtgtcacttcctccattgtcctttttgctttacccaatgttgtatgttccaagtccaaggacgagagaatgaacactagaaccgccaaccatgccttcttcaggacatgtacggcggcaacgagtcgctgaaagcgcggggcgcgctctccatagccgttcccggggagatcgccggcctgcacgaggcgtggaagcaccacggcaagctcccatggaagcgcctcgtcctgccggccgcgcggctggcgctggcgttcagggtctcgccgtacctgcggatacagatggaggcgaccagggacggcatcctggccaacaacgggacgcgggccgtgtacgcgccgggcggcgacatcctccgggccggggacgtgtgccgcaaccccaggctcgcccagacgctgcgggccgtcgcggagcacgggcccaccgtgttctacggcggcgcggtcggggcgcggctcgtcagggatgtccgggaggccggtggggtcgtgacgctggaggacctcaagaggtaccaggtgaaggtgcggcggccgctgacggggaacgtcttggggctccaggtggtcaccatgccgccgccttccgccggcggcgccgggatgatgcttgtcctgaacatccttgaacagtatggtgttcctgctggtttcgctggatctcttgggatccatcgcctgatcgaatccttgaaacattacatggccgtaaagatgaacctcggcgaccctgactttgtgaacaatagcgaggttgtgtctgatatgatgtcccccaagtttgctgccgagctgaagaaaaccatttatgacaacatgacatttgcgcctaaacattacggaggaaggtggaacatccttgaggaccatgggaccagccacctgtccatcgtcgacagcgagcgaaacgcggtgtcgatgacgagcaccgtgaacgcgtacttcgggtcactgatcctttccccgcgcacgggcgtcctgctcaacaacgagatggatgacttctccatgccagcgaacgcgtccgagaattctccaccgccggcacctgccaacttcgtcagccccttgaaacggcctctctcttccatggctccgaccgtggttgtcaaggacgggaagctggtggctgcagtcggtgccagtggtggcggcatgatccccgccggaacgatcgaggtgttcatcaaccatttcgtcaagaacatggacccgttggcttcggtcatggcgccaagggtgtatcaccagctgatcccaaacgaggtcaggtacgagaactggacgacggtgaccggcgaccacttcgagctcgacgccgccacgagggccgacctgcacaggagaggccacgtcctgacgccgatagctggagggaccataagccagcttgtggtgcacaacgtcgggcgccaaggcgacctcaccgccgttagcgaccccagaaaaggcggtgtcccggccggttactgagcaggatcggaattccaagcacggttcattagtcccctgctgatccgtgtgtgatgtgcggcgaagccaggaattatatggaatggaatatacaagagacaattcattatttgacactggtaaagtttttggtttattttcttgagcctcaaaatataattcttccctaagactaaggctaagggcatgtttgtttatctcctaaattatataaattggattacggtggaagagtagaactagaagagtaaaatatcactttgaaaccataaataagctaaaataagctagcattgaatagcttatttcagtttttttttatctcaaaa

SEQ ID NO: 102788 - DNA, 383 bp, Zea Mays
atgtacggcagcactctatgcactacatccggacaacatgtgtacgaaagagatttaaaaggtgatataatatataatagttgatttagagtttagatatagagtaaatatgactgcggaggattgtgatataggtaaagaattttgctgacaatgatataatatttcttttttagtagaaatttagaggtgtttgagtgcagatagctagagcaaaactacactgccaacagatggctagagggtctgttctagactcgagttgcctgtgaagatagtcttcagttcttcacccgctgaaaaactacgtctactctgctatggttctaaacgtgtgtgatgtttaattccgccaatataatgatgtaataattatggataaa

SEQ ID NO: 102789 - DNA, 609 bp, Zea Mays
tatagtcgaactctatagatacatcgccttgacgctccatccttgcacaaacgcaactacgagagagaaggacaaggaaaaaaacaggggacaagatcgagtgagaaagaggagatatggcgtccataataacaggagatttcgcggaggcctacgtacggaagaacgcctgcgaagaggagacgaggaaggcagaagcaagcaccgccggcggggtggcggcggcggcgacaccaggagacaagaaggccgacgctagtgcatcatccgagaagaaagtggccaaagaggctgcagctggtagcaacaagggagaaggaggcagtctcttcgggctgctgaagaagaaggttcaccccaaagtcggtggaagttcaggagcttattcttgacctcctgtatgcatctgcgcgtggctacaagcatgctgcatgcatgcaagaaatttcagaattttacccgtgtccatcttgaagtggtttcagttcagatttttggcctttttcgttactttccctttcatcctccttgaataagatgtacctgtttgtttgataaagaggtggaagtaaaatgtttaggggaaaggaaacgaagcagttcttttca

SEQ ID NO: 102790 - DNA, 1158 bp, Zea Mays
atctctacgccttgtgctgaacccagaggcagcgagagcgagtgcgagacaccggatcccgtccgcccccggaccaagaatcccaacctcacagcgatggcagcatcccgcagcgaggaacgtgatcagaatcagccagtggtgcttgtgacggggtgctcggagggcggcatcggccacgcgatggcacgcgccttcgctgcggccgggtgcgccgtcgtggccacggcgcggtcacgcggttccatgcgcggtctcgacggcgacccgcggttcctgctgctggagctcgacgtgcgctccgacgagagcgcgcgcgccgccgtggcggatgcgctgcgggagcacggccgcatcgacgtgctcgtcaacaacgctggggttcacctcgtcgcaccactcgccgaggtgcccatggagtccttccaccaggttttcgacaccaatgtctatggtgcaatgaggttaattcaatctgttattcctcacatgatggaaagaaggaaaggaacaattgtgaatgttggaagtattaccgctctggcacctggaccatgggctggtgtgtattcagcatccaaagctgctcttcatgcattgagtgactcgttaagggttgaactaagaagcttcggcataaacgtgatgaccgtcgccccaggagggacgaggtcgaatcttgggaattcttctgcagccaagtatgatcagatgcacgagtggaagtactacaagaaatacgaggaagggctccgagccaggactggcatttcccagggccccaggtccactccagcagaagagcttgcaaaggcggtggttgcatcggttctaaagaagaaccctccagcttggttcgcttacggccagtactctgctattctgtcgattttgtattatgcaccgctatggttcagagattgcctctataagtttgtcatgaaatgttagtccctggaagaataatggctgtatggaccaaagagagagctggacaggcccagttcaattcatttcattgtactgacagcctgttacgtcgtactcctatattgtatatatagaactatgctctgtacctgttggcaacttggcatactacagcttctttcagggggcagattcaggttcaaaaagcttgatttcctcttcactaaa

SEQ ID NO: 102791 - DNA, 754 bp, Zea Mays
gagcacgtcatctctctagaatatttctcaacgccttctttcttattctttatcctatccaccgtcgttctccttcattctcatttcttgcacactgacaccagcccctcctgctggctgccccttgctccctcccatggggctccccctggatccctctccatggcgtggatcagccccagcttcccatggatgtcgccctcctctccctgatggctggcgtctccactccctgcagcaaggacgctttcctctgctccctgctcttcctcccatggccccccatgtagcagtaaccatggaaacccctctgggacgcgccctcagcatgctcaatgatatgctgcagcgagctccaccttgatctatgccaacccggccgcaaatcatcgaaccttggggaacccttgggaccgatggtgaagaggtgaagcccatccaacgtttgttaaatgttcgatagaaggttcgaaccaaaagtcatcgtcgatcttgtgatttagagtttggtttagttattgtgatctccttcgcaatccatgttaattaacttgtatggtgggatggaatagatgtattggttgtgatggtcatcttgtttatgttcatgttgttatggaggtgtcagataattgatgaaatgtcgtagttgggtgcaaaaacatgattgtggtagtttgacctttgtgatttgtattcttgcaaagggacttgactttgaaatattgcaaatatgaataaggtattcctgaca

SEQ ID NO: 102792 - DNA, 119 bp, Zea Mays
ctgatttcaaagtattcactaactcaaaccatttcgcaagtaccgttgatccatattattatgatttaacccactttatcactaaaaatctggaaccaaaatatctacgatttttcggt
